United States Patent Application Publication US 2008/0114160 A1 - sequence listing, part 3

SEQ ID NO: 1768 - DNA, 34792 bp, Oryza sativa
tcccctcccctcccctccccgagggcccacggggtggacctccaaccccggggccccacaccgggtcctcttcgagatccgcatccgcccccgccgccgcatcttgtcctcttccccggccgccgctgttcctcgatcctgatttgctggtggccggccgccggcggagcagcccggaaggtctacggcgcgccggcgatgtcgcccagcaccctcgctgcgtcgaccagtatgaaatggagcaggtcagtttcgaacccaaaaaattgtaatccatttcatgagccggcatggacagattagggatccatttggaattcgattgatgtttctcctgtcgaattaattcatccagtttcgtcccgatttgatttactaatagcaattcgtttccattttatttacttatttgtggttcagctgaatccccaagcctcactttaggtctgccgctgttacaatgagtccatcaaggagcaggagcaacagcaggagcagaagcagaagcagaagcgggagcaagagcaagagcaagagcaagagcaggagtcgcagcaggagcaggagccgaagccgaagccctcggcgagaaaggctgcgtagtgagcgtgtatcacgtcgcagccgcagccgcagccgtagccgtagcccaattcgtagaagagaacatcgcggccacaggtgtgtctccaaatcttgcttgcaagtgatgctacattgagttgtatatttgcgtagttctaggagcagatgccggagtagggtagctaaaggcttcatctctattgcgaagctcaaataccatgtagattaccctgctaagttctaaaaaattaggaactaaaaacccacttgtgtaaaattatactagcccagccctaggtgagagctaaatctggctccgcccctgcacggggtgtttatattacctgaatggtacatccaataataacattgagttcacacaatttttgtttgcctccattattgtgttcattgtctgctcttcactacattttggtcatggacatacgttagctccattgagggaaatggattgttaaccaaaatttggcttgtggtcaactggtcacggaggtgttaggataattgcatggcaaatgtatggtagggttggcgaaaagcccagaggaagaaagagaaacatgttaatttatttagttgttctgccaatcccccagacttgacccacctcaacccccaaggtattataaagcttgtttcagggttcagtcctattaagctataactatgaagtaagtttaaacttattaaagcataatatctttgaactgctggttcaatgatccaaccattattcagacctattagacgttgaattggtcatgtaaccagtttttagaatctgtggtatggattctggaggggcctttactgtttccatcaacaaatatagcatgaaaaaaaatctaaatggtagggcttaactagtgggataaatgttgagaaattttaagaaaaaaaactattattcatcagggcctgacgttgtcatctgtagttctctggtacaaatttgagaaacaaggctaactcagtatcaggaagtatggaatgtaataaccgcaactctgttacaatgccttaacagcgccctcactgaactgtgttatatttgtgataactagcacattattgaaagtatttcaaatcagacaatgctattctgaagcaaatgcaatgatgttttcccccatcagtatgagcccttggcagttgtcccactacatgtattatgtataatggtgtgcacttgtaatccatgatccacttttcaaattccaatcacattaaagacctgagcacaaatttacttagtgcagatacaccatgtatatccactagaaagtgtcaattactcgtgtcatttataaatctatgctctcaattaagaagacacatgccctttgaatctagttatgccaaatgtgtttttttttctgtatattggagtacaatctgtcgaaccctcaagggaataaccatgttaatatgaataattttccagggatcttatatgcaagaattgcaggaggcctggtcactttgctagggattgccaatctactgctacatgcaacagatgcaatcttccagggtaaaatgagatgaaacactcacttaatgtagctgcatctgcttcattttggggggaatctagatgttgttatcattaagtgtttcgggcctagtactgttaacttgctcttgtgttccattttctgctgccatcttttagtcttggaaatatattgaagaaagtgcgctaacttctttttgggcgttattttaaacagacacttcgcagcagaatgcacttctgaaactgtttgttggaactgcaagcagtctggccacattgctaccgaatgcaagaatgacgccctgtgtcacacctgcagcaagacaggtcatctggcacgtgattgcccaagttcaggatctagtaagctatgcaacaaatgttttaagccaggccacattgctgttgactgcaccaacgagcgggcttgcaacaactgtcgtcagcctgggcacatagctcgggagtgcacgaacgagcctgtttgcaacctgtgcaatgtctctgggcatcttgctcggaactgtcaaaaaacgaccatttcttcagagatacagggcggccctttccgtgacattacctgccgcttgtgtggcaagccagggcacatcagccgcaactgcatgacaaccatgatctgtggcacctgcggtgggaggggtcatatgtcatatgagtgcccatctgcaaggatgtttgatcgtgggctccgcaggttctgatgacagccatccatacgcactgctggttctgatgctcggaatttcgcattgttccattgattctgcttagatagcttgcttgactataccgaaacggttcttttataccttttgctctctgggagttgaggaatgattctgtaggatgtatttgggtgaaacttttgcttgtgttaatcagggtgttgtagcctttcgtgggggaacaaaatgatgtatcttcccaagagagacatccagaaaaactgctttggtagaccaggccatatcaagtattgtgcatgactgtttgagctatttgactcctccaagcttgctcctccccactgactgttgcgtcgagttgtcctcattgttctgtattctcatattatcttcctggaagaaaagttgacgagtgagatcaggataatcagattatgacagttctctgatggtctttgcctttaggctgatttggttaaggaaaaaaagctcacatcttcctaaaaacattgcgtttgcccaaagaaaatttatagttcatatttgcatattttgattatgtgttttgtattttttttaaaccttttccagttcatattttgattatgttttatttgtttgtcttttcccaatttttatgcatttgcccaaagataatttacacttcatatttagataattattattttctgcattttgccaaagagaattagcactttcatattttgattatgtttttattttgtcccacaagcgcattttcccaaaatcacacatcatattttcccacaagtgaatttgcccaagaggttatcttttaatttagtcccacaagtgcatttggccaaagccaaagtcacgttgtatccaacaaaaagaggggaactatctttatcttttaattttgtcccacaagtgcatttgcccaaaccgcactttcatattttatccaacaaagaagcaaacgaaccgaaacgctacatcactcaaccttgatgaataacatagaaccacacaaatcatccaaaacatttgatatttatcaaaataaagagcaaacgaactgaaatgctgtattgcttaacctcgatgagctaacataaaccacacaatcctcccgaagcattttatactttatcaaataaagagcaaacgaacggaaacgctgcattactcaacctccatgagtagtcagaaccatacaatcctcccaaggtgtccatgagaactgagaacatatcagcaatttattctgtaacttgaacattgacacatctcaattaaacttggaacagtgcatcacaggcccatacattctgagcgcaacaacgaaatacaggatagagccatatctccatggttccatgaacaaacccacaaaccatcaagcagtctcacactaccaaatttagtgacacacaaatccataatagacaagtccatattgcaagatcatgaaaggcatggcaatgcttatttcacacgatctttgagcgcatcgagactgatttcgccggcgtcagtagcctgcacttccaactgaatgccattcagctccttcttgaatctttcgttggagctagcataaagcatcttgctcctcacttttgcattgtctggggaccttcaattcaatcacaacatatctcataagcggtaagggtaggcctacagtaaagtaactatggaatagacggggcacagaagcaataccataagatatagaatatcctgctctttggcacatcctctgcagtaaggaagtcaaagtcatagattgcaaaccggcagtccccttcaggcaggctgctagtgaaatcctcatagcttgttgtgcgatccccaatcttgtccacaatgatctctttccccttgttatccatcatgaaagttatgaagcggtgcatccttttggactgtagctcattgaacttcagcttgcaatcatcatgaattgcaactccagatgatgaatttgcctgtgtgtaatgtaacatcatgtaaggaaatctatgtcagttcatagttactcgagtaattcaaccttgaccttttccttcaaacaatataaactcgtgtgaacttagcattcaacatatgcatgcagttgcttcacctcttatagcgttgccaattataatttacatcctaaaatcagactgttcttcagtttattcaggtagagctttatcgtttttaattagttaatccgctgtagttatttgttctctcaaacctgatggggagtctcaatataaaactagactggtggtgctaccgtgctactgctacctcaacagatgtgcccccaaattaaacaatttagggattaataggaatgttcattaaacactatgcaattcaattggcatggtcgaaaagaccaatgagaaaatatccagccagtaataggcaaagaggtgtgtgccatatgagaccaaatgataatatctaaaccatcaacacacactccagtatccatatctgcaggcgaaggtcacaacaaaaaaaaaagatgagtgatacagtgtgcatgaagatgttcgattcaaaggtgaatcctgttctatgcaatccttttcatgcacattcactgttatttttgcaacagttattacaccaagtgccacatacaaagttgcaaattggcagcaaaaggacataaaaaggattgtatgaaataatttttacaagctatgactatcatgcaaggatatggactacaaaaatatggatgctgacgtactgtatcatatagtctacgttttgtgcacggtcacttgttgctggtggtttcatcagtgccaattggaaggtgtagtcattgcactaaccattcccttgttaatggcacacgtccatagggatcgcattaaaccacatttagctgtcttataccagagatatccccataagatcaatagaatcagtgggatctgaataaactgaagaatcctgatgagaaacaacatgcagcaacacactcttttcgctgctaattccagaaaggctagctggcagctatctcatcatatctggacatattgcagtggtctaacctcagtcagcatgtgatccagatacagatcaacttaaattccacgactactcgacgtctgacgatctgaatctaacaatctggagctcatcagctagaagctgccagattcccaggcttaaatctacatccacgcgaatctcatcacaccgcccccgcatgtgtgctttgacttggttccgctaatctcaagaccggacagtgtcactccaacaacccaagcgaagacctcaccgatcgacgagaagacaacatccaaaattcctcacgatccagtcggcggcgatgagaaaaacatcaaaccttaccccgccgcaacataaaggaacagccgatccacaaccggaagggccccaaatccccctcgatccacctcgattcacgaccaccacacctactatcccgcttctacgccccccaaactccaccaaaaatcaaccaaaggaacacagccacgaaccccggaaccgatctgaaacacatctaccgaaaccgacgcaaaacatcgcagacacacgggggagggggaggaggaggaagaggagaaggaaggcgtacgtaccattgctgagctcggaggggaagggaggggagcggaatcggcggcggcggcggcggaggcggcggcgcagcagcagcagcagcagcaaaggggaaagcgagacgcttctgctactgcagcgagctcgggcttttgttctcgtgtctttgtgttgtgtttgatggagtcgccgcggcgtccactgctcccaagttcccaacccaagtggttggcctacctctacacgcctccgcggtcgtcggattcccggatggacggctgagatgaggcgtgacggcctatcattgctgccgagaaaagttgtccaggcgaaatgtccttgctaaaagcgagattttttcccccgtattttatttatttatttttatattttattttacccttttatagaggacacgtcgttatatgcttgtgctgatctgttccatggacgaaattaaggtgcaagcgcgatcgaccgatcaccggtttaatcgtctctttattattcgcgtaatgtaaattaaccacacacgtacacaatccaaacaccaagcaagccgtacaaaccacacatacacatgggctgcaatgccaacgtaattacttggaaaatcgaggtaattaacggcgtgattaattaggaggtgtggtccttgagcacgtcgagggtgagctcgctggggtcggtggcctgcaggtcgatctggacgccgtcgagctccttcttgaacccttcgttggagctcgcgtacaccatcttgctcctcacgtccgccgccgccggcgaccacgacacgaagaagatcttgctgcgcggcgcctcgccgccctcgccggcggccgccgtggccgtggcgtcgctgacggtgaagtcgtggtcgtacacggcgtagcggcagccgtcggcggggaggctggcggtgagctcgtcgaagccggcgtcgcgtgggcccaccctgtcgaccaccacctgccgcatcgcgtcgtcgatcttgaacaccacgaacctgtgggcccgccccgccctcagctcctggaacctcgccttgcactcctcgctcaccgccacacccgacgtcgcgttcgcctgcacaaacacacgcataaagttctgaattctgaaacttcgaacaaactgatcactgaattatgaccaaatcagtgaagaactgatcactgaattcttggcaaattcagttggcaagacaacaacctgaattctgaagcagtgagcagctttatcatgcttaccatgtttcgttcgaagtgtcctggagaatgctctgaagaagtctgaagaaacaattagttggattctgcaatggtcgatcagaagttcgcagaaagtagttgcaattgaagatttgcactcagtagcttgtgagtgttttatcagaatattggatcctttaataggatgtccgagtccttttcgaagaaataatttagagggagatgtgtacacgtgtgagcatactgtggctttgttagttttgctctgggatagatggttccagtcttccagatggtgtcttgacgtggcagcaggaagcctaactcaagccacaaacactctcccagccaaaactgaaactacaaaactccaaattccgcttgtgcgtcgtttctctcacaagcttctcttgattaattcaaatcagctacgtcttgctgactgaactagtcatgacgttgaagctttccatatgcgatcagaaatgataataattagctctaataccgttacagcgaattcatgatgagtccacgttgtcatgcatatgttgaggatcgatgcgagaaatatgacaccatgacagtaaacaactgaaaaagcttcagaattcgcagctgttgcgtactaatcgtctgacctgtgcaaggtagctgccccgtcacactttgctgtgcaaatggaccaaatccaccgaaacaaatcggccggccggtgactttccaggacggcaccggcgcaccagttgctcgtcgccaccgtgttttctttttatcaagggaagaaactcaactgaaatgcgcccagcttggcatgtctgtactatgcactgccttgacagtgccacgtacacagactcgaacgactagccgcgtttccttctgatagcttgcgtatatgagcttttctgatctgtgacgcctggtaaagtggtaatatcatgtacggtcaattcaccgctgttaggcgttactagctgtgagcctgtgatgtctgacagaccatagaatggaatgggaaccatcggattagctaataacggacggtcatttttgttcagcacctcaaacgtacacaagaactgtaattcccagggcgaaaaaaattaaaaacggcacttattaaccatttcccacctccactgaggaaaaaaaaaagactacatttttaagcacatagaggtaccaattttagataaaagtctatgcctataatattaatatattttttaaaatataatacttataatatatcatagatgtcatcactacaagctgagcgtgccacgtggggaaaaaacgacgtgtggcatgggagccaaatatatatggttctccttatgcccttatcctcagcttctcccgctccagctctcttctcttcctctccatccgcgcctctccccagcgaccagtggtcggcctcgcaccctccccccctctagtgcttggcagctagaggccccgtttatccccagccctcttgtgtcggattctttagtgacggcaagggtggtggctccaatgccagatctaacatgtccgagctcgaagacctccagatttggccccgcgcggtgccctccaccagatctgctctcgatgacctcaatagcaatctttcctcaacaaccgccttgcctcagtcgatgctcagtggccaacggccttccctagacgtcgtgaagtgaatggtcgacgggtttaatttgctgatttgcgaaaaaaaatttgttgtctttgattatgtgtatgcccacgttatgtgattttcaatcgatcttggtgacgatctaatttggatttgagatttgaattggagttggggtaacgaggagtaactcgatgtatcagctcgatttctcaattgagccttaaatgtgctggttatggaactggcaccaatgactcggagtcatctacgccacccgtaatgccggttggaaaattcggcacctatagggatttcgcaatagacaccgatggtctttctgtaacagtggtatggtgtagattatgtgtatgtacacagaacaaactacgcttccatcatgtgagtaagatctctgttatctaaattattctggcatgtacatgtgtggtacatatataaatcaatatttgaaaacagggaacaatggacgtagaacacagccgattcgatcgaacagtctgacacagataaaattcgattggagaattgactaatgaatgaatgaatgaattagtatatccagcgtaaagcaattcctacaatggtaaaatctctatctgaaaaaagaaaaataatgaatgcaatagccacaatcgtgcaccaatatgtacaggcagcaatcgcacgaatctaaacgaagagctcgagcagaacgggcggcgcgtgcaccgccgcggcggcggcggcggcctcctcgcggtggcggcgcatgtggccgccgagcgcctggcccatctcgaagccttggccgcagatgtggcactcgtgggtcgccgccgccgccggcttctcctgcaccttcttggtggtctccttggccgtggcggcggcgaggccgagcgcgagcccgtggcggccgcgcaggtggctggtccggtggccgcccagcgcctggaacgacgggaacgcgcggctgcacgtcttgcagacgaagtccccactcccggacgccgccggcgacgacccgcgccgcggcttcttccgctcgccgctatccgcggcagcgccgagcgtgagcgacagcgagaggctgatcacctcgccgtccctcggatgcttggtcatggtcaagaaagaaaccgaacgaactggagatcgatcgaacacaagatgatcgacgagacgagttttagctagctagcttctgactcgatcgagagaatggttaatattgctgtgctggtgttgggactgggtgttatgcatggggtggctcttatatacggtacgaaaggagatgagattgtcacgtgcacgccacggcgcaggcgcggtggaggacgccatggcgagcgcgtcggtcgcagtcggcgaatcgtctgaaacgtcggaaccttctgtacgtacgctttgggtgggacgcgtttactaccttgggccggctggcttggcttggctcagatgtgcgtgtgcgctggcctcacaccgaccgcgcggcccgcggacaagacaggaagggtccacgaaatagtcaagtgggcgttaacataaacggtgggggttacgttagaactccgtataaaaaagagtgtagttttacagtgctcacatccaaagtttaaccgtttatcttatttaaattttttataattagtatttttttatttttagatgataaaatataaataatactttatatatcactatttttttaaataaaattataaattttttaaataaaacggatggtaaaatatttgacacggaaacttgtatctgtactcaaattgggacgaaggctgtgtttagttcagcgtaaagtttagattttagttaaaattggagataatatgactgaaaagttgtgtgtgtataacagattgatgttatgaaaaaggactgaagtttaaatacaaactttggatctaaacacagccgaaggcagtagctgcgagtagaaagggtgtgtggggcccactggtgctgcaccgttggatggttcggggtggtggggtccaaccgacgtttggttttgaccggtcagagtgctagtcttgcacccgaagaagaaagtgagtaaacttccgttatttggtgccttcgcgttggattgatatcgtcatgcgtactcacgtgaggtcagtactagtagtagaagtacttggcaggaaatatcaggtactagcaacctaccacttccagatttggatccgcgcgtgttctccaaacaagattgtggataaaacaaacggaacatgtaaggtgtttgtgctgtcaattgtatgatactacgtactttcccgtgaagtatacgtagcacatacaagcaactaacgcgctcaagattattcacccgtacgtactcggtactcctatgtgagaccattcaattcatacctgaagagaagtgctgaatattggcttgctgtttcttacgaacaaagactcgtttcagtttcaggttcggtcctagcttcctgtcactttccttgttccatccttacgaaacaattatactagtatatagtaatactaatactgcgaagtatccgaaggggattgattagctctagcttgattagtttaatttacagctcctttcgatggacatgcatatgtatgcatgtgtgtgtgcttgctcctgctgtgactacgtctacaagcgtgtgctcaaaaactgtgtaaattaatatctactatgtgatcgtttagtcggtgatctgtttgctagggaatcaattaattagtgaactgacgggcgcgtcttcggtcgtaaatccctgaaatccttctccttgatcagcttgaagaggtccaaatgtgttaatttcccccaactagcgtcaataattgaagaaaaatgataattcaaagagagtgttgttttctgccaagtgttgccctatgctaatattgctgaagcagtttctctctttgacaaatgtccctcgtggatgagatcaattgcattatagtttctatccagctagctagggacaattttctgttgttttctctcaaatgtttgggtaggcacttaattaatggatgagagtatggaagaatcacacatgatcgtacctatacagtggtggttaatcttgatttctttttttttcttaagaacaagggcgagatttgtctagcctgtattatgtaatttcggagtacttgaggtaaattaacagagagtggatatatgtacatacttcctccgtcccagtaaaattgacgtttcaacgccccaagcttgtcccaaaaaatgtgtcgctacacagagaagatgcactcctggacgccaaagcaagtttaattgttgattcaaatttttgaatatgttaatgatggctttgcccctttatcaaacatgtggccaaggcgccaatttgtgtactccccgtaacacgtggtagtgagttgtggttacttcattactgctggaaacatcctctagaatattcggaatgcatgtataaatgctggaaatgacagctgaatcaaatcatggggataatttggtaattttgcacaacagctaatcttggatgctaaccttaaaacatcaattttactgggacggaggaagtatcagatatgtccccccagtaaggatctagtcagatcacatttagaggttgaaagggatatgacgtggctacacgtataaggaacaaattcacagatatatgtgtgtctccgtcagattctgcacgcaacagtgcaacactgttattacgcatatcgaagctcagttgaacttggactgcaaatttgcaatcagggactgggaaatttaaatatcttttttgcttgaagaataatctggggataaaatttcggaaataatgatcaggaggaacagcgcgctgaatttatttctggcacaaacataaatgttgcatatatttacaagaggtatagctatgaatgaaagaattatattacatctgtgtgtgtatatacatctgaactcaacaaatctccaccaaacggttcaaaaactgaccgattcaaaaccgaacaacccaaacgctaatgaaaaaaaaaattaaacccctatcatagttacaagatcgatgaacctgactttttttttctagacatgtacatgaactaattaatggtgacacacactgcgtcagttcaaaacttggacgaaactaatggagaccagcggtaactaggcgaacaactccagcaacaccggtggctcggcggcgatcccctccggccgcgcgtcgcagcgccagacccagtcgtcggcggaggatccaccgccggcggcggccatctcctcgcggtggcgccgcatgtgtccgccgagcgcctggcccatctcgaagccgaggccgcagatgtggcactcgtgcttgtccctgtgctccttgtcggccgccctgtgcagcctgatcgccttgtcgccgatggcgccgaggtcgagcccgttgctccggccgcggaggtggctggtccggtggcccccgagcgcctggaaggtcgggaacgcgcggctgcaagtcttgcacacgaactccccttcccccgacgtcgccaccacgctcctccgccgcgccctcttcctcctcgccgcgccgcccgccgccgccgccgacgagtccgacgccgtgacgagcagtccgtgctcagcgccagcgccagcgacacctcctcctcctgcctcgggtgcttcatctccgattcgataagcttgtgaattaatggatcgatggattgagagagagatttttggttggggggagatcgatggatgggttggtggcgcgcgccgcgcttatatataggttttggagacgaggcggtgggggcttacgtgtttgccaagaaggtgagggggaagcgaccgacatagtggcgaggtggcgtggctgcgccaatcgcgtgcggccaacgcgacgagcggcgaggtggacggcttggatttggatggggtcggggggagtgggatgcgggcgagacggacgtgtgggtgggcagtgacctcatcagctggcacggcatggcaaaccatggcgcgtggcggctgttggttgcttagccgcgggggcaacgtcgtcgcccgcgccgccaccgcccgcggcggataatccactcaattattttattccgatcgattatattagcactagttgggccctgcttggggttgctggaagggcctagaacgttctcgagctcgatttgctgagcgatggattgtgtctatgatcgcgggattaagggctggtttggtttgaggtctaaattagccttatcaatatttatcaatttcaatagtgtttactgtttatatggtttgaaaccaaatttaggtatacctaagaaaataggtcatttcaatagttaacttaggctattttagctctaatccagacataaatttgccttgccaaaattaaccatacaaaaacttgctaaaatttagtatcgacgaaaattggtaagaccaatttaggtcacaaaccaaaccagccctaattaattaaagcacctatagtggtcaatcgaccgtgaccatccagaacatttgaacccggtctactgcagtacttttatggagtactagtattggttttactatttgttacggtgaaccgtgaatccagaccatagacacagttgtaaacctgtctccgttttgtgcggccggggatagtcaaacgtatatacatcgcgatgcatgtacagtctcgatttcctctcagacctgtagagctgtgtagaaactgtacgtatgacctgtgaccgtgatgtgaattccgtcccaccacacacgtacgggaagtcggaacgggagggcgcgtgcgattaaccgagccgcgcctttcgcggaggccggccgccgcgcgatccactccacgcacgcacgtaattacgtacgcccccggtcggtgacagctagcggcttacgcccatcaacggcaggcgggcatcaggccggcttaaccccagcgcggcgcgctgcgacgcggcgatgagattggcagcacggccgaatcgtgaggaaaaatggcagaatctaccgcgatattctcacgttctccattttccccacaagcgtactagtccaagccgcacgggcgcgcggcttccgtttgcctcgcgcgcaaggagcggtggttcctgtcgttgcgtcgcgtgcgcgttgcgcgatgatgtgtaaccggtgttgccgcttgctagtggaaactgctcgtactagtcagcggagtttggtcctactggctactagtactactcggttgcatcatgttggttcgtatctgatgccacgactttttatcttttttttccctgcattgaatttctagagagttgggggttgggtacggagaacctggccttttttttctttttttttctgggaatacagaacatcgatctctggttttgtttatgctggttccgggaggccgcctgccttggtcaacagtacttcgaagaacgaaccggcaacaacctctagagggagcattagatttgcagtgatgtcatggcaacggttgttagtgctctttcttttgctcaaatttacgtgtgccccaagtgggcaggagtctgaacgcgtactaaaaattcttaggcgccggacatgagcttcatgatcataactacagaaactagataaatggataaggacatcacatggatcagcatcggcgtctctatcctgatttaaaatataaatcaggagagagaatagcagcgggctacagatttatatccagctgtagcacggactccaagacgcagtgtatctatgacatgtgagactagatattaatagtgtattatataactattgtataaatgagctattagattggctatagatgaattggagctagtagttggctatactattgaactttctcttacatcgtcaagtgtctacgcggttaagcaggtcggtctgttcttgcgcaaaaggctaataatatctactccctccatactccgttttatattataagttgcttgttattctttgcagtagaactttatcaagtttgactaaatttataataacaactagaatatctaattagttttattaaatatattttaataatatatttattttatgttgaatattatttttttataaatttaattaaatttaaaaatattttattagaaaaaaaagttaaatgatttataatataaaacggagggagtatatatacatgtcatcgacgacatgatacctggtcgtcgaatcagagacgagtagtgcagtacggagtagtcctgaacgagtcctgaccccatacttggacggtagttcttggatggatttcgcgtgagtttcgttgattgagctccatatggtacggtgcaaattaggcggcgtgttttccttatatctgaagttccttaccgggcgccgcttgctgcgtgacagcttgagctgatcacctgctataggtttctacatgcgcctctgttcttcgtgtgaacagtgagctagcttactgctgtgagcctgtgagctgtatatatggtggatcaatcatgtatacttctacttgggttgccgacatcaacagcttccctgcctactgaggcctgtttctttcatcttaaaattattataatccagattattagaagtaaactaaaaaaacagacaacttattaaagtagcttattaaaatctggagcccagcttattataatctgataagctcatttaggtaagctttttctagattattaggtgaaaaattacccaccatgccaccccactccctctttagacttgcaaacctaataatctaggaaagaaacaactaaccgcttattctactacagattataacaatctagcttacagtaatctgactcaataatctagattataataatcttaagtcgaaagaaacagagcctgagttaaggccttgtatagattaaaaaattttagccaaaaacgtcacatcaaatatttggtcacaggcatggagctttaaatatagggaaaaaaccaattgaacagtttgtatgtaaattacgagacgaatctttttaaacctaattacgccatgatttgacaatgtgatactacagtaaacatttgctaatgatagattaattaggcttaataaattcgtctcacagtttataggtgaaatatgtaatttattttattattagtctacgtttaatacttcacatgtatgtctatatacctcaaagtttttacatctgaagaactaaacacaccctaaaaaccaaaacttgaaaacgcgttgcacctaatatccctgcagtacataggctgacaattgatatggaatcaggacatgattgtaacatgaaacttgtagtgataagaacgacgtgtatacgtgtgtaccgtgtacgtatatgcggtgtgagcgtgttacttgcatctaaatattatctagaaaaataataatatcacaaacatggctatttgtgtcgttaggttaataggaaccagaagctatacttgtattttactccgttttgttagttcagcagggtcgatcgacgaactcaaggagtgggtaatcgtatacacttatttactccataactggttgcgcgtcaacccatttatctttaatctagcttatcaaccatggttaaatttaaattttaacacttaattttgtagtagtggattttttatgtttgttttatccgagatttttttttacgttaactcttaagtagctaggaacaaatatatataagtttttactcataaattatttttaagctgctaataaacattacaatttatagcaacgaagaaactgattgttagaaagaaaaatctgacgataataagtgagccacaaatagaaaggacaccgaccaactgctgtccactgttgttagtccggtgattttggtatgctaagagcaagttcaatagtatagcctactactaactccaatttatttatagccgatctaatagccaattcatacaatagttacttactatactattactatactattaacatatggtcccacctgttatacacatattgtgtcttaaaatccatgctgcagctggctacagatctgtagcccgctgcttttcttttttattttttatcttattaaaatatgtttatagctggctaatagtattgtacctgctctaacgcagactctagactgcttagcatacttccattgcggccatctggcttttagtcggttagcatacacggttgagctcacagcgtactgacgttttgtcccatgaaaacgacgtcggtgatgacgtgttctcctgtacacgaagagatagagctcagccgacatgcttcacgttacgtgtcgtacttttattagaggcaaacaacctgaagcagtacacgttttcgtcagcctgatgacaggttaatccactgtaaacaatcaaaattcataatccgcgtgccttgcagggtttgactacgttatttactggtattcgtccgaacagaataacacatgactacgtttcagatgcaagctcctaccgccatacgctatgcgcgaaattgccaccttgaagatgcgtcatgcccttgggatacttttcctcatttcactcactcttgaaagccacaaactgcctagcctggtttaaggctcccctgatcaaaacatttctctaggcagacggtcaatttttgattgtttaataagttcctggcaaaattaaaaacagcatcgaacaagaaatttcttctctattaggacctaaatctacctacagaaacacagcacgctatattggtagagaagaacacggagatctcacaaaattcatactgtttcaaggggtattttgaccttttcccatgtaaatacgatgataattccaaatctgacaatgatcatttatatggacaagtgattttcattgcaccggaaggccataatacaaaatctggggcaactctaatgtaattaattgggtgaggttccgaaaagctctataccagattgatgttataacgccaaaacttgagatttgtgatcaatcccgttgaatataaatgttcccagcaaaggcacaaactgtttggtgaccagctggaaaagggaatgagtagttagtgcgatgaaagaacaattaatggttgtccacaaattaccgtcacgagatcaaaacacaccttaattacttcttgggatgctactccgccaatgaaggcagccacgggatgaatctctgcacccccaaaccggcacatttcagtaatcaggtcttcagacaaaggtgccccgttcatacccatctcactcattactgaaacagcagctgtcttcagcctaggcacatcctcatcaatctcactaccgaatccagtgtattattagtattataaatacatgtacgatgttataatgttcaccgaaagtgaatgaacattttactcatgcttacctttcaaagattccagggcatctgttatagttggctgcaagtcgatcaacagcacgtagcagaacatagaagttcattgcaaagctgcagccaaatttgcttgtcatttgaataacaaataaatcaataagaacaagataacaatggctagtcattctaacaacagttccggcaacatacaaagcaaaggaagaaacaatagctgacttctccacctactccaaagttgcactgcatgctacagtgtgaccaactattggtttgaaagaaaacttgtgtttgcaacaagacgatgaaaccacaattcgaagcagaaaaagtcttcaataggttcaatcaaggcatcttgtaatcctggtattgcattacaattcagtttaacaggtattttcaatttctatgatttaggataggctgatattctaggatgcagcaacagcagtactacctttgtaacagctgcatggagcttgaaaactaaagtaaagatgccaaagtatatgaacagagaaagttccataacattaaaaaaatgacaagcacaaaggagtaaaaggtactgaccagtagtcttcatcggtgaagtatatttgaacttcagaaagaacaggagagctaaactcttcctccatactgcggtacctacagacctagacagcagatatcacttactcaataactatcaggtatagttctacaatatttatcaatcatgatatttaaagtgagagataagaattagcatgttatgtcaaatagaaaattgaacacatgcattccagtggaggaaaataaatcaggagtggcatagtttaaaagggacaattgcacctcttgtacaatttaattcttttgaaacaagtgcaaaagcaatgatcagtactagctagtagctagtataccatacacatacaatcagctttgtctttatcaaatatatggaatatggatagggtacaaaatactacaaggttcttctcaattaaaactagttagatcaaatgattatcaagcacatcattgtagccatcccaaacaggtgttacaatgtatatttaaagaaagcagcttactctgagttttctagcatttttgcaaaatgtttttatgtatgcccgtgaaatagaatcagggtctctatcaattcgcttcaagatatcctttacatgatgctccaaggcaaggcagtcagattcagccttagcttggtaaatcttttgcaggctaacatagtacctgtaaggttataaaagagaaacagctgcattcatgtgatagaagaaaatagttcggcagaagttgactgaatctgagatcattgcaaagctagatgactgcagggcactaactcagtaagtgaagtcatatcaggtatcgtcccctcaagaggtagctcaccgttgccctcatttgcaataaattcctgtaagtagcaagcgagagaaagaaatccaaattgagacatgaatgctaataaaaaacaataatttcaaccaaaaaaagaaagcataaagtatgagtaagtccatgttacacccctgaactctcaaagaaatttaataccctccaaaataatatcatatattcagaagctatatacgctttcttccggtggcactcaagagtcagactcactaccattggaaatgtcaatgctgtatttctttttcttgtttggatggtttagacaactaagcaagctaaccttttgaattatacccatgatgttactgtcgatatagcaaaagaacagagttttttttaatcagaaagaacaccttgagttggattcatgccagcaactgcggctcctccaaaaacactttgggttgaaaatttaccaggtttactaaatttttggtgctcgataatcaattttgtacttgtcagtgttcgatatatttcctgagaagttgaggtgcgtttagtagacttcttgctaagctgagggatgtaaaatggaaacattcctaaagggatatatggtgcaactttacagatggtaagtgtgaagatagttcataaacaacacattatttcaggctttttaatatacattcattatgaaagcagcttcagacacacaaagcttctagagcttttttgttctaaatgagcattctccagggagagaactcatatgcagctttagcataagtatcaaaattccaaagctacctgacatttgcttcaggttatatgaggcatctggctagagagaagattaaccttttggatctgacttgttattttagcccaaaaaataaaactagaactgggtgtctagatcatgcaggttcattgaatatcgcagagacacctcaactaacatatgattcacttttttaaaacaaagaatcattgaatagcgccgagagacctcaacaacatatgatacacttttttaaaaaagaaaagtatcattgaatattgctgacacctcaacaacgtatgatactttccaatttggtttcaacaacaaactttatcaagagtgcctggaacctcagataacagctcagtggtatggcatatcagacaatagaagttggcattccataattgtaaatcacaattataactaccttcaaagcagccactaaaacccagaaatctgaagaagatgaattcacttcagcggagctatcatcaattatctgacggatctcatcacctagaagaaattaaccactaattagaacttgcagttctgcacagaagctatgttatattgtgtacacgtgcatggctgcaggaacatacaacaagaatacaacagatatttataaataagttaaaatatttatgggttcaaaaagagactacggctgtgttcggtatccttagttcccaacacctcttcctcgtgttccgcgcgcacgcttttcaaactgctaaaccatgcgtttttttaaaaaaagcttctatacgaaagttgcttaaaaaatcatattaatccatttttgaaaaaaaaattacgtaatacttaattaatcatgtgttaatggaccgttctgttttccatgcgcaggataagtgttcccaaccctgatgtccgaacacagcctacatgtaagtacaagacccaggaggtgtttgttaacacataggccacattcattcattatgtaaactagagtgacaacttcaagttaattcaagtagtttttactagtggtatttaagaaaggaaatagtcaagcacacaaaattatgtctgcaagtaaaattatgctgatagaagaacatttaaaaataaacttactgatccctggagtaacagagactttatacgaggactccactgcttctttgtagttttcttcatctaaattaagcatatattctcgaatcagtgcctgaagaagatattagattagtcaataacctgacagtccccaaaacacattagcaaccactttttactgattggggcaacaacccaaaacacgtaccttgaattcatttttctcttgcctagtcgaaggtaagcgcccatcatgtgcatctgcccatttttctgcaagcctcacaaggataacaatgtagggagtgtgcttgtgcacaacaggatctttatcatttatatcaattgactttgcaaatctgaaaaacataagcattaagatcaacagtgatttcatctagaatgagaaaaggatcatgcaacttgctatgccaacatgtaggtacaaataactcttactgcttgagttcaacccatggattgtgaaggcgtaaatcatccaggaagtggtccggttttgattctataacattgtgctcctgctcaatagttagggaaacagttttcagtctggtgaaaatgctttggctcatgactactgtggaaatgaaaaccgccaagcaacattaataagtcctaaataatgaggtcaggaaacaagatgcagtccaccgctaaaagtcaaataaagaacaactcagaaactcttgcacagatcaataaaggtaccttaacgctgatcctgactagaccagttagaccatatgaacgtgcagcaaccaacacaatatttgctttcctgcagatatcatctagtttcagtaaagatctctctggaagctgcagtagaaaaaactgggtatcagcaaaatttggccgcgagaggaaaaactacgtgcacattgttcctaacaatccatgtgtagtaaatagctaaaataataaaagtttgactgtccacactaaaaaagcatctcttactagagggagtatatctatgaatatctaatgcgcctgtgcgattataaaaacttgccaattctcatttccttgacttttaaatcttcttgttaaatgttctggctacgcagagaagtcaagaaaatcaatcactgattttgcatcttaccataagagtaaacacacacctgagtagcaatgactacggtaaattgggaaaagaatgaagggtttgtgtctatgagagccagaggagactcctcgacaaacttggcatttacagcatcattcagctcttgcaggaacgaacatacagattttgctcttgattgccccaagcattctgcatccactgaacataaacagagtactcggaacatgagttccattgctttactggaaatttatcgaaatggaacaggaataaacgcggagcacagaaattacacaggaaattgtttcccatgtcagattgttcaactttggaaccatcaacaacagtaacactccctactcctccaagcacaaggttcttcatcgcttcagttcctgtagggccacaggtaagcaagcatatgctagccttctccagtgcagcctgtccttgatcaccccatatcctgtactttgcattaacagaatcataacaggtagtttttagtatgtgggttgcttcttcctactcggatgcaaaataagcagagaataagaagaatacacaagtcgcaggctggaaaaatgaaggtcaaattttataaagtaaaactgaactgtgctatttatatatgcaactgaactacccatgtgaagcacaactacagctcagataatcagatgcacataagaaaacacccaattaagccacagactagaccaccaacaccaattatggacccctaacataatccactagggtcttagtaatcagcaaagtgctatcagtcggtatccccaactacatgtgaacaacgtaaacaatatttcaaccaaccaagctccaatgcatgaccggcagcgttcgaaacaatttctgtcagagaaaatccctccagctcttgaccacccgtcacccgaacagaaggagctccaaaaccctagatcagagaccgcgcccactcgaaccgcacccgaacagcggtgccggaattccaccaccgcgaagagccctaaaccctaggatcgaacggcaagcgcccggaatctacccgtcggagatgagagagcgcagatgcgcgccggttgcgttacctgagctggcgatcgtacttggtcttgggctccgcgaaggcggcggcggtggcggcggccatggcttccggcggcggcgtggtctcctctccgcgtgtggagtgggctctgccgctcttccgaggttttgctttgcttcgccttcgccttctcctcctcctccctgagcgaggaataaagcggtctcaagctaagtggaggcggagcaaggagaaggggatcgtgggctttggaggccaatgacatgggcctaatcgtacgccccaatattgtagctacttgggcctattgggccgatccagtttagttagcatctaccatctctacaccaactaaacaactgcacttgccataaacaagtgggattagcgacatgatcttacttgtttgacttaaagtgttattagtggaagataattaaggattaggaaggttcgttagtcgttgggggagacgaccagacatggctagattcattgtaccaattgggccattaccagacagcagtacagcacgatactactgaataagcgttgctggatattgaagatatacgcaattggagctcttgctctgattggttccacgcaaggagaaaactacacataatagctccgcttttgaattttaatttgagctaattagtcatggcttacgatcgattgagtcgaacatttacgtgctgtcctttctttctcagcactcttttctttttaataaacagtgcataaacttaacctggttttcaatttgaactaactgctcgattatggcttacagttaaggttgatcggttcagccattaaggtgatctttttttcgccatttcttgtttattaaactggatcaatgaggtggttgcagatgcttatagttgaaaaacggatttcagcgcttgttaaatgttaattatgcgagtccaaactcaaaagtcagaattgttagacagtaccaattcggaaattagtgagtcaaatgatataaaataatccacctcgaccaaacatgagaagttcagcttgcaaaattaacaattcattgctctatgatgaagtttatccgactaataactactcctaactagataagataaacaccaatattttactaaacagcaacatagctagtaattaaaaacaaatttgatttccttgctgaaagaaaaatacatcaacccccggaatgccgcggttacacgccaatgctctatttgatttttaaccatgcaacaaactgagattgaaacagtacttaattagcactagcgtaatcaactaatcgttgtcaatgtacacgtgagctcgacttagattacatggctagcaaaccaacttttctctagtttaaaagtccatctttctgaaattttaatggaacaaccagtaacagaagtctacttgtacctagtttattattagtacaactagatgaagcagcaagtcaactagtagcgcacagccaaagtcgaacaccactcttcgttctcttcgcacccaagaaatccatttttgcgagcttggtcatcaccgaaatctcattggccatggaagaatcttatataaatagatggaacacctacctctcccacgatcgcaacgaattgaagcatttcgtctcgaggcgcggcacgatgaagaggctgacattcggcgcggaaccggagatggtggacagcgcaagcatagctcaggaggtcatgctgctcctcgcgcggagcggcggcggcggcgccggctatgtcgtcggccacggcggcgaggctccgcgcgtcttcgagtgcaagacgtgcaggcgccggttcccgtcgttccaggcgctcggcggccaccgcgcgagccacaagcggccgcggggtggtggcggtggtggcgcggccgccgccgtagccgccgcggcgggcgagggggaggcgggtgtcgcgctctcgctcgcggcggggacgccggccgtgaaggcctcacgcgcgcacgggtgcgcggtgtgcggcgtggagttcgcgctcgggcaggcgctcggcggccacatgcggcggcaccgcatcgccggcgccgaggccgacgaggcggtgagcgcccgcggcggcgagccggcgcccgagcggaatccacgcgaggcgaggggtgtggttggcttggacctgaacgctgctcccgccgacgacacaggcctcctgctggtagactgcctgtaatggcattctgccctacctaaccatgtgatcgtttcttctttttatcgttttttttggttttgtaaatttgaaaaattggcagctgttctccaaaaaaacagtaggatcaatagttcaaaatacaacatgaatacgatttgattacagacttgtaattacagaattgtagtttgcctttcttgcatgaatcgtgcaagatcattctttctttgtaataaaataaaataaaataaatactatgggtgatactgggcttgcagcgggcatcggccaatagacaaattctggagttgattatgttatagttcgtggtcttcgatttcttctacgttctacgtgatcagtaacccagtgtcgcaagtaactgtagttgaacactgcagaaacgcaattaactacataaaaaaatttgcatacttctatgttatctactggctgtagcctcaacatcagcacagccaacccaattctatatgcgctcatcattatcaagagcaagagttactttccaccaatattcaaagtaattgttctcacttaacacccatttgtccaaatcaagacaattgcaataagttaaataacgcacaaagagagtagctgacaaagaatgaaatgataaaaattacaagcaccatttcaccaccattttatccatgtagtgagaacccttctaagatccacagcaagctgatttctgagccgccgctgcctcggcttccccttccgatttgatcttgatggttcggtcctgcaatcaaaagaacacaataaggaaaggcgttattgaaaaaaagtatgtcaaaccagttaattcatacctcaggcttggaatcagtctctgagagtctttgtttgatatctcttgctatagaaaagaaaacctgctcaacattcaggtttgtctttgcactctgcagtagtcataatgaaacgaaattatgcatgggattggctacagaggttcgggcatcaatgcttaggagaaagcaacatttattgtcaccaacaagttacgatgaaggaataccagaacagaagttgtgacttcgcactaaccgtttcaaagaacttgattccgtattcatcagcaagagcctgtccctttgaagtgggtacagcctgcacgaatgaaattcagccgatatgaataagagagctaagaaatattccaaacatacaatttgagaaggtcattgggaactgtaatggtaggtgcataatgtcgaacacgttttctattatgtttacgctttgacacaacataaatatatctagtgatgaccatgctagatggatcagagtaacaccacaggatgcaaatcttattcacgaaatgtttttcatactgcatatgaaactaaccattccagagcatgaaataaaaatgagatgacagaataaacatgtggaaacagctaagccaagtagattatacccttttgctttcatccatatcagctttgttccccaccaaaattttgttcacattatcagaggcatgttgttcgatgtttctgatccaatttcttatgtctgaaatccagcaacaatggaaatattcagaaatttttgagcttaagtactatatcaaacaaagcatctgaagtaaagtggtcaatactgttgaatgaagattcatcggtgacatcataaacgagtaaaatgcccattgctcccctgtagtaagctgaaacaatgaagcccatttcagaagcttgatcaatgcaattgccagaagcaaacttagctttgttgaaagtaaacaaacataccagtggtaatagttcgaaagcgttcttggccagcagtatcccagatttgcaatttaatccgtttaccatccaactcaacggtccttatcttgaagtcaatactgtttcagagaattcagtgaggacaatatataaggtgatgctatcattcagatgtttcctttggggactttttacaggacatacccaattgtggtaatgaaactagtcgtgaaagagccatctgagaaccgtaggaggagacaactttttcctacacctgtataatgtatataaaccttttaaatagaatgtacgtgccactaaacactgaaacatagtatgaatatcaagtaaggccacaaaaggaaatacaaatacaagaaaaaacattgatgtggaaacaaaatcaacatgagttaaagggctcccctaggtacacagaaccagacagatgctatttactcactccgcttcatattataagtcgctttgactttttttctagccaaacttccttaagtttgaccaagtctatagaaaaatttaacaatatctactgcaccaaattagtttcatcagaactaaaattaaatatattttgatagcatgtttgttttgtattgaaaatgttgttatatttttctataaacttggccaaacttaattaagtttgactaggaaaagaaaatcaaagtgacttatattatgaaacggaggtaccagtttcattttattgtcaaactagaagaccaccataccgtaaatatggaccaggccacataagcacaaggaagatagtttagttgaactctgcttgcaaagctgctagtgagtgggaaggaaatgttattgtatgatttttacacatatcctcaaatatttactctttcaaggatgaaaatgaacaatgctttcacatagtagaaaacaaacagcatgattacagaaaccctttagtaaacttttatgtggtacaaatattattcgagcctcaaaatactgtggtgggagggctgggctgggtgaaaatatcatagaatatacttggagcctaagcctgcgcaaaattctaaaacatatgaatctcagcagctcccaggcctgagacgaaccacagccttgaacttggcttgcctcaacggctaaaaaaaacacagagcgaggttccaacagtgcacgtcaggtcatcaggtgaaagtgttgaaaccattgtcagttctcttataatgacttaatgagaacccttacaacaaacaaaagtaaccacaacagctacttacaggcgttagtttcaccaataaactattcatgacttcatatggcgatcaatctaacaataccagcattttaatgtgtgtctcagtttgagaatatatcaggtcataatcacatgattgtcgcaagcaggaacagaatcgctattacaaaacacttatgcgtagaaaactgaaacaattgttgccaacggtttcgcatgcttcgattcattcacccattcaaatttcacacacacacacaaaaaaaaatccccacaaactgatccagataacagatcccgctcgaatcctcggatcaaacgaaacaacacacttcacgccggaggaaccagatctcgcgcgcgtagatcgagggagtgagagagagaggaggggcccgcggttactcaccgctgtcgccaatgaggagcagcttgatgagataatcgtagtcggcccgagccctagccggcggcgccgccatcgctaccaatcaatcccccaagccctaacacacaatcaacatcgatcagatcggatcaagcaacgaaacagcaagccgaaaacgagcaatggcgagccgcaataccgtggtacacgcgcggcgggggggcgcggccgtccgaggcggcggcggcggcggcggcgatctcctccggcgtcgtctccccctcacgagcagcggcagcgcaggcggcgagttgcgtgggggaggggaggagattcgcgaggcggagagggggatcgaagcaccgcgccagcctgggttgggtggtcgtctacttgggttgggttggctcggtcggaagcgtcgtggtggaaccggtccactcgtctgacttttcacaggtgtcgcgcgcgtgcgcccgactgggtcctaggcccggcccattcaggcccattaggataagggcccagtgcgaagaacgaggcctgaatgctgtgtgggctgtctggcccgatgaaacatgatggattttagtttttttatttcaaaaatgaattcggattttttgttcaactaaatgccaaaccatgtgtggatttgagcaaataaacattttagacatagaaaatctccacttgtcaggggggccgaaactatttaaatttcgcggcgcgcgagtaggtctgcggtcgcggtcgatagtcgacttaatttgcttatcagcaaacgttgcgcgctttgcgtaagcactgtctttatcctagtgaaccacaacacgaaatttcaagtcttctcgattacgccatttgcaattcgaatttcgaaatatttagacttacagttttgatgtctgtcccgcgcatttttcggtgcaaatgcagctaaccaacaaatatctagcatattcggtgtgttgtctttcatgcttgcttgctgtcacgccccgaactagtaccgaccggaactagcccgtgacgctccaatttaacctgttaatcgataccagtcccaggacacagtgctgatatcacaggaagacagattatcacagcaacagaggtctctttattatagagtagatgtacagtcatgttgggctgcggacagatcccgatctcacaactgcattacaaaagggaaacggaagccgggacttggaccaaacaacacaggcgcgacttgggaactaggccgaaaccctaaaactcatcgtagccggcttgctcctggaagaactcctcatcagcaggatccgcttcgtcttcttcagcgactgggggggattatttatatagagcaagggtgagtacggggagtactcagcaagccaagggaaataagtgtttaatgcaggcttcaaggaaaggccgttgtttttgcaattgattttagttgaactcttttctgaaaacaactaagtgagtgcttctcaaacgacacggttgtgacagtgcgtctcgtccggtcggagtatgtgcaatgtatcagtctttagaattgaaacaaggttggcacccggccaacagcttttcaaacggccacccgggccaacaactttttaaacggccacccgggccaacaaccttcaaacggccacccgggcctagctgatcccatcagctgcagatttttcaaacatcgaacccctttccacaacagcaatttcacaagcagtagtcaaacaaaactacgctaggaatcacctcacatccgcccatgaccgtgggcacggctgttcgaacagtttgttaacctctgcagagggggtacactttacccacatgacattactaacccggatcacccagcccgtggggatcagccacgtcgggagacctccaagctttcatgacaaggcatttccaaagccgatacaggtttaccatatgccgacgagaggggtcccagaccaacaacaggttaggtcccagaccatactgtgccaggaagcccaggggtcctccccgacaccacaccggcgaatccacatgtctctcgacatcaaggctcccctgataagctagttactcaaccaggggtgtcccattccacccatgtggtcttacttgtcttatgtttggatgaaattccaaggaatcggtccttaagtgcgagagcgggaaaaccgtacacccggtacgttccccggtccgcggttttggaaattcatttagttcacaagcaccgacccaggtgtcgggttttccaagtcttttgtaaaactcaagttttacccaagaagttgctcagattttaaatttgaaggcgcccttcggtactcgcacagattgcacgatttccgaggcgcaactgggtggttacaagggaacatggtataacaattaacaaaggaaggatcaaatgcaacaaactaggtagatccgccaatctgccttgcagacgggacaacagattaagtgcgatcctatcaatgcataatattttgcaagcaacataattaaatttcaagtataggctcaagatgttcaaaggtggcttgccttgctcgagatctggagcttgatcctcgaaatcctcgcactgcgggtcttcgggctccggaactacacgcgaaacgggacaactcaacaaacggcgaaaatgaagccctaataatgacctctaagcgtgccatttgatagatctcgagatttgaggaattttggaagttgaacggagtcaaacggatctacggttggaagatattgaatttctaagattattggatttttggtctaaaggaaaaggatttaattaaatcctttttggaaaagaaaaagaaaataaaagggaaagagggagggattatagacttctcctcgggcggctagggcgtggcccaagggaaaaggagcggaccggccgagctaaatgggccggccggcccaaggcggcccaagtgcgcgcgcgcgggaggggaggagagagagggccggtggaccgggctcaccgtgcgcggtcccgggtgggacccgcttgtcagcggttcggctcaccgtgcggagggagcacgcggcgcatgcgcgcgggcgggggagggacgcggtgcacgcgcgcggtctgcggaggaacggatgcggtgggcccacgcgcagcctcacggctcgcggtggaacgcgcgcacgggaggggctgaccggggtcggcccgtcccgacctcggctgagctggcgcctacgtggctgccacgcgggccggtgggaggtagacgacgacgccggccggaacggacggcggacaacagcggcgagcggcggagcgaaccacggcaataccggcgaaagcgagcacaccgggtggttgcacgagacgaggggagacgagccaacggctcggattcgccggaggaaacttgacggcggcgaatcgcggcggcggcaaccggcggggagggaagagggaaacggcgacgaggtcacgaggggccgattcccggcggtgagagcatctacgcggccacgggaatccgatgctagcgtcggattgggcggagctacgccgagcgaggctggcgacgagcgggtgctacggagctcgtgcggcgacggcggcgagcacacggcgggcgacggcaacggtcggggcggcgccggctagctacggggaggctactcgtgctaccaccgaaaactaaggggggagatggagcgaggaggaagaacggagggaggcatcaccgaggtgaggaggggcgctatgacgagaggccgacggcgcgggagggatctctccggcctcgggccggggaagaggaggaagacgagcgcccggagtccccttccgcgtcctagtgcgcaccggctcctccggcacacacgcgacggctgcggtcggcgagagggacggcaatggcgcgggcgagaaacagggaagagtgggagaaaagggaagggagggcgtctgggtttatagggggcggcaat

SEQ ID NO: 1769 - DNA, 17616 bp, Oryza sativa
ccggcggccgacgtcgacgaggacgacttggacgacttggtgcgcttgttgcggcggcacccgccgccgacggggacgttgcggagcgctccgccgcgcgtccagtagcggcggcacgtcttgcagaagtggcgcggctgcgagagcgagtagttgttgaagtagcagaacttggtgttggtggactcgcagcgcgggcacttgagccccggctccggctgcgggatcttcgccagccgagcccgttccgtcatcgagcccggccgcaccgccgtgccgccggtcgggccgccgccgccaccgccgccgccgctcgccgcgacggccgctgctaccatgtcaggccgaggcgccatgaggccgccgtgatgcggcggcatcggcggcagctggtggtggtggtggtggtggtggtggtgcgcgtccactccacctccgccgccgccgccgccgccgccgttgccgccacttggaagctgaccgtggtgagcttgctgttgctgaaagcaccaccattaattccaaatcaaacacgtacacacatgcaccaaagaaagagaattaaaggcgacgagaaatcaagatcacaaactaaaagacgagacggtatattcaacaagagatcgatttaattctcaaaagagcgtaggaatatttcctcagcgcattttatttggttttgcttttttcatgaagaagccatacatacatacatatatggccatcatcctacataaaaaagaaagaaaggagagagcaaaaaaagatcttggccaagcaagaaaaaatttcacctgctggttccaattgggtggatcaagatagacggccggaaccgaagaaaagaccatggtatagaattgatttcttttgatcttttcctacttggggccttcttttttgggttttgtttgttcctctcctctcttctttgtgagataagggtatatagctgctttaggcccaggatcatgcaaggatggggaggcggatcgataaaaggcggcgaataacacacccactagcaagctggaaattgtgtgtgagctctatctaatctagctgagctgagctgcttgtgagaagagagaaactatatcactactactactactctggcctgcgtggtgatgagttagctggtacaaagagaggaggaggaggaggaggagaatgaagagaggagggaagctagagaaagggaaagagattggggtgagagggaatgaaagggagagggaataaaagggagaaggggggcttgccacccctttattttcctttatttttttgtgtcttagtggtgtgcttgcattatatatattgggttgtgaaacatatgcatgggaggagttgaatggtgaagagtgatgtttccttagctcataagcatgtgtgtgtgtgtgtgtgatgcatggatatataatggatgtggcatggctagccagctagctagggatcagtatgagagatcatcagagaatggggttttatgcagggagaaagctgatgaaaaccctagatttctaggagaaggagaggtggccttggctgctagctgcatgcactgtttattggaagtctctgctggatttgtttgtttgctgttctagcttggctggttattagttaattatcaaccactgatctatatatctatcttggtgtttaacagtactggatcaggcagagctagctagaggttatcaaaatgatgtgagctagcagctacaggtgtctaggggtggcattctagtgtgtattttgcagggtgttcaactttatgtccattttgatgaaagagataaatcagtaaagctggtcttgctagttttagtcctcttggactctttggccagtggtgcagcaggttgtggtgtagaattctccttctccttctttctctaaacaaagtttatactgctaagtactactaattaacaagtatatagtatatggctagctatagctagctgacgtacagtagtctcatgtggtaatatatatgagtaggtaattagctttatgtgcatatagatatatgcatgttaattgaattctttggtctgtattcacaatatatatataatactacatggttattaatttcatccaagtctttctagctcctgtagcttgacatgtctgtgtgcagaatatgtgatactggtagttcagtgtgcaagtactgggaaacttcaggacatgcatcaattcatggcctcatggatgataggctacatagatgaatagatctatgcaagctttgttgccttttgttcttttttttcctccctcctccacattgtacaaactaagcaaacatggcatttgaatacactaacgatcgtaaagctttacacatttgaattgtgcaagatctgaaaagatcacagtccatattcttattctgttctggtcgtccgataactaaaatttaactgactttcatgcatggcattcccttaatataatacatgggcagaatctttcctgtcaaatattctgcttttgccaccacaatatcacatatactgattatttttctgcaaatgatgagagaacaaatgcaagctagctaggatcagtgctcattagcgcttataattaggttattattattctccctagtttagataggtagctagctaccggttaacttaatcgagcagaatagaccccacttttccttgtccatgactgattagagagattggacagaagataacaattttgattaacaataggatctaactagtgtgcccagctcatgtaccgatgagctctcattcagacattcagtcatatggggatcgatgagaaatcagatacagagacaaattaactagctagatagagtagtacgtagttgtacaagtgattgatcgatcagacatggaggactccaaaagattcaggtaatgcgttccagagtgcagctgattggagcatgatgtataagcggctaccatctagtgctgccccatttacagtatacacactgctagctagatatctgtgtgtccttgctcgctacctgataaactagggtgtcaaattattttatattaaatttgttgatctatggagtcaaatttctcaatcatgtctgcaaacccttcattgttcatgcatgtatattcaatccggattaactagtatagtaaactgcatatattttgaaggtgccacacctgcagctgtatatttatgctataaggttcttatgctgtttatgttcaaaatgtcgacaggaaagttcagatgggcgatgttgcttggctatactcaagtaatctttcatcattcgactttgtggcgaattgctttagcagttaagattctgctccgcttttgcttcctctgataatttgtatcattgtgtgcgcactactgcaactgctcatttctgctttggagattgtacgtggcgcagtgaagcctcaacactgacaaaataattaacccattagataaggtctggattcctcttggaccgagagaacagcatcaccttttgttaaaaacatgacccttgaggtattaatttagaaggaattctagatagtatcatggaatcatcagtggcaggtaattaactaacttaattagctcacgaacatgtaagctcgctagaatcaccgaaactctatgtaaagaaaaggaattgtaatttcatcttacttgactgtgtatacacagcatatgtcgaagatgtaaatcatttttattataaaaaatatatatctcaatctcaaagtcgatcttgccggtttgcatgggcagctagccatcctgccatccatgtcgaacatgtggaactctagaacacacatacaagtgattgaggcacaggctgatgggctgatcagcaagtgctcaaaatggaggaattttacgtcaatcaggcatacgtcaggactggatttccaactgccggtgaaaagcgcaaccccagaatgccgataaagtgataaacgctcgccctgcttttgtttcctttattttctcctttttaatactgacagtccatcacactgttctctgctgcagtctgcagaacaagtgcagtattgctactggtgctgaattgcagatgaaatcaatattgagcagttagattgtgtagcgaattggtaatattctttaggataatagaagttctcgctcatcaatgaaggcatctaagcctctacaccggctgatatcagggcagatacaagcctaacgcagctagggctttagacgcaggcttcctctataaccatgtttatatcctctgaattcaccactgaaaaatagaaaaaaacctacaatttattagcagagctccaggtgagcattaggctttggtaatttctggctttgtacctggctgatatgatggtcatcatgaatgtacagtgatgtttagtattaactttctaacttgctcctggtagtacaagccagagatcacctgagcaaatcatgtgttgggaacacaggattaaagaggtgaggtgatgcacgtaatgatgattaaggcagagataccgggtgtgggttctttgggcgggtaggaccagggagtggtcgctttggcctgcattattattgcttatgactcattgggcctgctgattaaagcgaaagacgcagcagtatagtccctcgtagtgtgtatgtccccagcgagatcacattgtgtgactttccttttcttctcccgacatcgcaggatgtgagcgagattccgggacatgcaacacatgtactagtaatccgagctttatcgtcggactaatccgagaacctttaggtttatcgtcggtcgagctaagctgagtacacagcttaaccaacctgcgtgagtgcgtgacgactgacgatgataattgcatcgcaacagcaacgggggcagcatgtttggagccaggggttaattaatcacagcggcacggcactaagtaacaagacatataggactatcaaggatagcattagctagcagcattatgaaaagcacaggcctggtctagctattacatgtgtttccaccccggttcaagataaactggacagtggaacactctcatcaacagatcagcaaataacgctgtttcactaacaaaacatttaaaacatttaaagcatattaaacatttaaaacatatttaagtaaccgggggccaaacccacctagcataatcaattgcaattgtaatacagcagtaaaacaaaaggggtaattctgccgcggccacctggtaaaaactgaaacatcatcacattactgaatgtctgttcgaatctgagactagaagtccaaactcaagcatcaggtgataataagtctttagttaacagaaagtacgagtagcccaagtggtatgattgccaactgggatttgaaaacaaaaggtgtatgatcaatatttttctcatcacatatacgaaggtgtattgatttagtcgacctcctcaatcttagggccagcaccactcccaccagcagccggagcatcatcgtccattccaccacccatgtcggcaccagcaccctggtacatcttggcaataattgggttgcacaggccctccagctccttcatcttgtcttcgaactcttcaacctcagcgagctggttgttgtccagccactggatcgcctgctcgaccgcgtcctcaatctttttcttgtcgtcagctggcagcttggaagcaatcttctcgtcttggatagtgttcctcatgttgtaagcatagttctccagggaattcttggcgtcaactttcttttgtgctcttcatcctcggacttgtacttctcggcgtcctgaaccatcttctctatctcctctttgctcagccttcccttgtcatttgtgatggttatcttgttcttctggccagttgtcttgtcttcggcagacacattcaggataccgttggcatcaatgtcaaagcagacagtgatctgagggactcccctaggggcaggagggattccagacagctcaaatttgccaaggagattgttgtccctggtccgtgtcctctcaccctcatagacctgaatcaacacaccaggctggttatcggagtaggtggagaagacctgctccttcttggtaggaatggtggtgttccttgggatgagcactgtcatcacacctcccgctgtctcgagaccaagagacagtggagtcacatcaaggagaagaagatcctgcaccttctcgttcccctctccactaaggatagcagcctggacggcagcaccgtatgccacagcttcatcagggttaatgctcttgcagagttccttcccattgaagaaatcctgcagaagctgctgaaccctagggattctagttgaaccaccaacaaggacaacatcatggacagtgctcttgtccatctttgcatccctcaggcacttctccacaggctccatacatttcctgaagaggtccatgttaagctcctcaaacctggctctggtgatggtggaatagaaatcaacaccctcaaagagggaatcaatttcaatagtagtttgggcagtggaggagagggtcctctttgccctttcacatgatgttctgagcctcctcaaagccctggggttcccgctgatatccttcttatgctttctcttgaactcttggacaaagtggttcaccaggcggttgtcaaagtcctccccaccaaggtgagtgtcaccagctgttgctttcacctcaaaaataccctcctcaatggtaaggagggagacatcaaaagtaccaccaccaaggtcaaaaatgagcacgttcttctcaccaacactagtcgccttcttgtcaagaccataagcaattgcagcagctgttggctcattgatgatacgcataacattaagacccgcaataacacctgcatctttagttgcctgcctctgggaatcattgaagtatgcaggaacagtgacaacagcattcttcacagttgaccctaggtaagcttcagcgatctcacgcatcttgataagaaccatggatgaaatttcttcggcagagaattgcttctcctcacccttgtactgcactacaatcataggcttatcccctgggccaggaataaccttgtaaggccacatcttgatatcgctctggacagaggcatcagaaaaccgtctgccgataagacgcttggcatctgcaaagtgaaagatgtattcagaaatctcaattggatatattggcattaatcaagaaaaggtaattgttaacatgaatagaagataaagaagttaagataataaagatgattgcaaaatattattcatgtccttgctttgagttggacgagaaaagatagtgaaccattatagtagcggacgaaagagactgctaatcttattgttcatcacaaaggttttgcctgttttgcatttatcagctagatttttttcaaaacaggaaagaagcacaagttcaagaacatcacagctgctgaatgaagctgcaatgatcataacaattacagctcgcaaacaagaaatcgtcaagtaaaaagtgttggtggaatagttttaaatctaacaacatgcaagataacattatctgaattcaataaaaagtctagtttaaaactttatagataaattaaaaataagccaattgtgactatcctggttttcatggtaatagtagcctactttaatcagcaggtaccttaaaatagagaattaaaacaacaaataaaaaattaaataataccaacaaaagcaaataaccaaacaatacaaacaaaagcagatatcctaaattatttctcaagaacagtatttactttcaatacaccagcctgctttcataacaattctaatttatgagcaataaaacgttgaaaattgagggtataagcataaatgcgaaaatatacaacgtttattggcgcttttacaaacacataatatagcttaaggtgtatgggtgaaacttaattatatttaatgcccggacatttgcaagtaatgtactaactaaattcctgtggatcaaaacaggttgtgcaatggcgtcagttacttttgggaaataaacctgttgaataacaatcttcagcatatgcagaaactaaaatgtatatatagcctacttacatgagaaaagaaagtataatcaagagcaatgagaaacagagcagcaaaaaataatctaatataatttatagctgtgcaataatcaatttaaacaaagaaaaaacagatacattccaagcggctggatccattccaagtggctggctgttggtagtgagcaactgagcatagcaaaccattcaataaagcatgaagagaactattgaatatgacgagttgcacacctaatacagaatggattactaagataattgacatgcagcttttcagtcacaaaaggacagtttgactctcatttatcaggaataacagccaactttagttccatttttttgacatcctaagcatgattcagaaagcactttcatgtaaaggcctctctgtttcattaattctaattcacactaggccctaacagcaccatagcaatgcaatgtaaaaataagtgcaagttgccacacgccgactgattcaatctttcccttccataacatcaacatatgcaaatagcagttcagtccaaaagtgacagcacaattttatagggagacaaagaaagaacgtacatgaaagaactgtacatgattacaaacaactgattcttctatccaacagttctgattgaaactagagtgattattttctaccggcaagttcctacgtggccaacaaatcaacaacacagagccatagaaattaatcgactatgctcctgctatatagatctaccttgtactgaatatattcagacgtcactatgaaattatataataatgatggtgataaaatcagtggtgtaatcttaaaaaatttcagcgcgtgctcttccccagcccaacgaaaaaactgtgataccaaatcaccagtcgttttctgttaaaaacatcgcctattttcacctacaatatcataatgcagatcttattccgcctaccggctagtacatcaagcattgcgtctctcgcattggagcagtgctaaacatgtactagacttgacggatctagcaaatcgggcatcacattacgcgaaacacagatcacacatctagtcgcaacagtacacagatcgaatcagaaacagggcaaaagcgtcgtggcgttactcaccgaagacggtgttgatggggttcatggcgacctggttcttggcggcatccccgatgaggcgctcggtgtccgtgaacccgacgtaggagggggtggtgcggttcccctggtcgttggcgatgatctcgacgcggtcgtgctgccacacccccacgcacgagtaggtcgtcccgaggtcgatgccgatcgctggcccctcccccttggtcggcgccatggctcctcctcccgctcgcgggtcgcggcggcggcgcgaggaacgagtgaacgaggagagagagagaggaggctagggtttccgcggatgcgggaggaggagtggaggagaggaggcgagtgcggctgcggcctccgtgtgcggcggcgaggcggtgcttttatagtggcgggcacggtcggcctcttcccctcccggaatcgcgggggcgtggcccatccaggcccagttcgtacattaaactattgttactgcaagttgggcccccacaggtcaaatgtccatgtagtaggagtaggagtactccatttttcacgcgtatcgagcatggtttctctctctgcaggtggggtcccagttgggctcccacaggtcaagtgtcgatgtagtaggtgtatttttcacgcgtatcgagcatggtttctctctgcaggtggggtcccgaacattcgtgtacaccagtgggtcccacgtacagcctctgagaggtgatctttcgttatgtgtggcggacttgtgggaacgagtcgtttggtcagggagtgggtgccaatatttggggaagaagtttctacggacagaggcttttttgtggacaggatcagtaatatgcgcataaagcactctttgatgtcgctacaaccatttgatcgcgttcgaagggtttggattaaccggacgactcacgcagcttgagttatcacacaacaactgaacaatgctggtatggatcatccaataagctatgttggggttacagtcaaagttccaaaggtcttcggacccatcagctgccctaaaaagaataagccaaagttaaattttaaatttaaattttaagatctttttaacatagtttctttttcaacatactccctctgtttcaagttatttacgttttgatttagtcaaagtcaaactgctttaaatttgactaaatttgtagaaaaaagtagtaacatttttaatccaagacaaatttactatgaaaatatatttaattattgatttgatgaaactaagttagtattataaatattactatatttgtctacaaacttagtcaaacttaaaacagtttgtctttgactgaagtcaaaatgtcttaaaacctgaaaaggatggagtatcttttaaatcgctaagaatgcatataaaaaagttttacatgcagttttttttaatagacgttgtggcttatagtcaccttctgcgtaatcaatgaaaccctttggctagtgtcgtgtcacgtgactggttattagaggctaccaatgatacggacgatactagcaagagttggaagtagggaagtttaatgcatcgatgtcttgggattcgtaacgccaatattttcaacggtatggtgtgctcattttcttcatgtataaattagggtggtttgaagtgcgaaaggtaaaatattggttaaatgattatcaaaacaagacaatgataataaagtaactaaaatgaaatgtactcgctttccttttatttgttaagatggtggtttgacgatcgttcgtgcaggtacaactacatatcacatatctaggctatattatttgggttggaccaagttagtgtttggtacattggcattttttctttggaattgtgagatttttttcgaaaaatttccaaccgatttctaatagatagtagtttatgtttatgagaaaaaaattcaaattcatttatgttttaaaaaatttcaaaaaaatatatctccctattcctaaaaataggacaaaagcaaatacttttcaccggtttcacgctaagcatctaatgtctcggagcctcatcggttacccatattcactaataaatcaaaactaataaatcaaaacagcttatcaagaataaaaatcattttagaagtaaaacttttatatatctatccatcaatactaataaaaataggttaaaaatatctaaaaatcaactacgaaatcaaatttaaaaaatttaatttacttattgggtgctctcgattattttccccgtcagttgacaggcagagacagagacaaggaggaggtcgtgcgagaccgcgagaggcgtgtgcgccgtgcgcgtgtcctctgccccttcccttctccccatctcgcctcgctcccttcccttctcttgcccaccgccaccgccccgcacccacccacctctgcctagatccgtctccaccatcgatctccctcccatccccggatgcgcaaggtggaaggcaagatcgaaccctaaccggcgacggaggaggagcggctccaccaccaccacctcgaaggagttgacaggcgggggatggattctgcagcgtgatttcatttgtggttggtacggaagccctaatgcagcatgcttggattgctcgtagggtaatttgttgtttgagcaaccaatctaatttgtcctgtccaatccatcctgctatttgtgggttttgttggattgctctcataccagcttgtttcccaaaattttgggggaaagtacataacctgctttgggtcgggtttccgacgattagtgggagatactctgattgtgtttgattagtagctaggtgccatattgtttggacttggtggtagtatagatggagatttttcgtcataaattgggagaactggataattagagtccccctatgttgcttggatcatttttagtattattattgtttttgctgggagatttatatgtatgatagtgctggaccgtatgcttccattgtagctagataaagatcagttatagaaccaagagaagtgacattcatatcagacaatatatccatatctcatttcaccatatagttaggaatagtcaatgaagactgttctgtttgctggtttgattcttaaaaagttagtatcagtattttttttgtttacttttctaacacctcatgctgatgggattcacttcttgtttgttttttcagctccatttcctgctggttcgatgcaactgctttgtaactgttgattgatgtggtgatacatttcaaaaccagggattagattctgtttatgcctatgcttcataaatcataacgatggccagttcaagcaaaaacttccagtcatcaagcaaaccaggcagtgacaggaagtaccagggtgcattggttgcttctccagcaaaagccatttcacccaagacagtcaagcagatcgtgccaggaaaacatttaatcttgagcggggagtctacaagtcatctggcatcttttttggtaaaggttattgccttggaagtagtaagaagattttcaaaagcaagatgcccttttatatggaattctattcaagcattgcaagttcttgggtaccctccatttaggtggattcaacagtgggcgccactcaaatttattgtgcaaggcattcaggttgttttacctctcggtccttcaaggccttaactctctttttttagataatggaagtaaagaccttgattctcttgatttcctagatacacacaattatttttcttctatcagcttgtgcttttgaaaattgcttgcttaaatgagatatatttctcttgttgcctctcaactaagtagcaattaccaataagaactgtcacttatgttgattgtagcattttatattccacttttgacacttctggttgcaaccataacatgcaccaggttcagatgcaagccacacactctgtccacttaatcatgctcaacctggacttaaattttcacggagaaatgaatataggtccagcactattattcttcacataggcttttaggctgctataattttcttttcaccattactatattctttgctgacagcaacactagaccattgtattacaggtttttacatatgaacgattccatttggcttggagtttgttttggcataggttatctatttatcatgcatgttgggctttttgaagcatgttctgggcttccacttagttaaagattaagaaactagaaatgaccatgtcttacaatttcttgcgacgtatgttagctacttactgagttaacatagtgaatcccagatcaattcatgtgaataatatgatggatatgtccatctatgctagactaaacctgcttcaatcctcgttttgaacatggttgtgggtttttactagtttgatgaattggtgcactgtgacacttctgctatgctgtttcacttgtttctttaataatttctttctgaatatttttctcctatacagaaattatcgacaccactgttgtttctttctgtcacaacaacattatgtgaccggtcctctaagcgcaatgatgaattgggtagcaatacagaagctcctgatgtaccttctgaatcagatgaaacagcatcaacttctggtataaggttggttaagactaaagaaagaaatactagaagtatctcttagctgaggaatgtgttgctagcttcttttcattgaatcatagcgttctagttctgaccatatcacatcacaataatgaaataaacttacggaaagagggctaaattttcatctagtgttttatttcttgttttagggatgttgctgatggcacaaaggataccgagccagataactggctcatatcactgttcaaggaacttgagaaacaaggcatcactttgcctgaaaggtaaatctaaaagtttgtttgtttttatgaacgatacatttctatatgtatcaattattcccatccagggtgcaggattaaaaaaatacaacatcttgaaatggattttctaatgcagctcttgttattgtgatgtatccagtactaaaagtgccaacttacatataagagtgggaagtgcacagatgtgtacagaagtgtgatataggtcaaataaagctttatatattttgaatttcatgagttgtatcttgtgggtatagctgagggtttcaggctatgtaagcctagtttggtgtatgagctggtgttgagcttatttgcattgagcttagtgttcaaacatgtctttctgtgcgattctgaagtcttgttatagttgtatatacacaccagtgccctgagctgcaaaaatgacatatagctgagagaatttaccttatggacatttcaggttcaatgaggatgaactacgcagattttacattgcagccaatggtgacttttcaagtttgctctcttcagttaagaagacaattcgttggagggaaaccttccatatacttacattgcacgaactcgagaagtggtcccatttagttttttggcatggattcgatactatgcttcggccctgtttaatagtccgtcttggtcttgcatgctctagtctagccccttctgatagacctcggtttgggcaagcagtaggtaacttctcagcctgctctatacacccattcatttatgtcctagattgtcttcatgtgatagtttttatcatctttgaactgggaaggaacatatagtgtgggaaattgctttgttgcttgcagtaagatattttctttttcaataaatatggttcatctagcaagatactgtccatcagcagttagtttgacagaaagaaggccatctttctttaacaacattgtctatccaagttttgagcagataataggattctgtccggctgatttaccaagaggatcactaatagtaatctctaacattttcttttcagtttctcaaatcgacaatggtattgtatacttgaccaacaaagaagatccgagaataactgttttgctggattgtcatgggatttctccattcagatttccaatgcaaatgatgaggtcgtttatcactatagttcaagaaaactatccaaatcgtcttggggtactatttattgtgcgtcttcctcctgttgtcagagtaattgcgcagactcttattcaggtaactttctccacctacatgtcatctcaataactatttaactgtccccactgaccacaaatgaacaagagcatgtcccacagacatttgttagggggggcatagttcattcatgagcacaattgcttgagttttgactacttggactatctgcctaaacaaggatggctacaaatcagaactagcattagttatgactgtgagatgacaaacaattgtgtcctgcttcctcaccacatctaatgttacttatatgttctttctaatctacctaggttctgaaaccatccacaaagcagaagttgcgttttgagggagaatcatataagaagacattagccgagttcttgcagattgtgccaacttttcttggtggcaaatgcagctgcccgcaatgtgagaagccgcgtaatatttcagtaatacaggcaggggaaggcagcaagagccaacctcgccagataaccattgatgatggatcacctgtcgcaagcatgaactttgatgaggcggagcttccatctccttatagctgcgagaatgccataagggctgccatcattggtgttctaatgctgtgggtcttcattgcatttctcgctgggatgaacgacccagagtccatctcgtcccatgccccctaaagggccttgcatttttttgccatgtcaaccaggatccacagaaccacctgagctgtcagttgtcttccatttgcatctgtggttgctagaggcgtttttcatagcagattttcgtggtctgtactatgtgcgccacatgctaaagcatcaaaagagtatcttcgagtcgctcactgggaggtcatatgaggtgtgcgattcagcattaccttgaaatagtcagttagaacaagacaattccttgttttgttttggtgccatcttagtatatatagtagtattagtttgtctgtaagtttgccgacttgtcagtttatcgtgggtggctatatagtatctagaagatggttcttacacttaatacttcctggaaaattctacgaacgctacttgaaaactggaatttctcatctgagaagccaggtccctgtgctatgtatgggtgaacggagaatccagtctggtgctgaactactaatgaatgaatgcacgtgcttgtcgaactcctaaataatatcttttttaaataaaatctttctacatatgattttcttgtaatctgttctaaatctatttttaacattataatagttatttgtttatttgtaccttaaataattatcacgtatccttgggctattcagatattcagctcaagaacacggccgtcagatcatgtgtggacggtcacgattaccaagaagcttaaggttccgttggtttattttgggacggaggaagtagtcgtatagactcttgtataactcgccagtgtccttgttctaaaatgtcaaatatttaggatccttatcatcaaagtttttgatcgaattttgttctaaaatgtcaaatatttaggatccggaaaaatattttgggaaggagagtataaaaatataaacactttactttatcatatatccaaactttttaagaacctgtttgataacttacataaataaaatgagatgcatatcatttctcgcaatatagctgggcagttgtaaaaattgatacagtcgaagtcaaacagccggtgatgaaactaggtatatggataacaacataggaatgttcgctgtcgatggattgtgtgagcaagccaatggtaaggtatagtttcccgcggtagcatttccttttaattggtattatttgctcaatccaacacactccaattgaacagctaggttgtccggtgtagaaaatgttacaagaaagcaccgccgaacctcccaatgcttaaaagtcaacatagtcatatatttaaaaacgaaataagtaattattttttatttgaaatgatattatagcccacttactctgtaataaaagtagagggattttactctactactcccatacagtatatgtagtgaaaggttttttcaccaattgtaccacagacaaatccaaaccaactttaaagttgggttgagtgaaagtggcaaagaagcaatttcctcgaaccctaccctaacgccattccccaccccagcagcagcagcagcagacgccagtcacctcgcaatctcacgcggtcacccgccgcatgaccgcggctcgatagcgccgccgcctcgccgccgggcgtctcctccccggcgccaccg

SEQ ID NO: 1770 - DNA, 22426 bp, Oryza sativa
ggtgggtgttgattgtgtggtcgtgcgtgtcctcccctctcctcctagggggtcttgtatttatatccataggtgtcctcttgtccaagtagaactagggaaaccaatatggatataatccgagtagtccttgtcgtttccatgtagaactctggttgtctttccttattcggaactccctccatatccgaagtcagtttccgtataggacatggtatgtggtgggtcctgccgagatttagttaactactattaggtatgtggtatccataaccctgacagtagcccccgacttcaatgcaaatgaacgaattcatattctcgaccgcagaccatggagtaactgttatcgagctcaagtgaccgttctcggtgagttcagagataacgttagacttcctttatcagcctcgtgcgggcacctaaagggtttgtctgagtcaatctctgacgtcaaccaagaaagtacagagcatacaactaagtctcacgtcttgccgtaatcgagaatttggattgaagtcaagaaattttatctcggcgggtacaccatctcttcattccgtattccttgtcgagatccaccaaaccattctcgagtgatcgagaaggcgtagagtctgcgacggagccttgtcaacatttgtcgtactcgccttagtcgatcttggtgtggaaccatagagacatggagtcttcgataatgtcgaatagaattttcctaaaatcaatactcagaaaagaatattagatagaaatagcccccgagcgaatgctcaaagggtgacatgttataatatgacagactagtgaattgaatgtacagaccagtgttttgtatatgagcgtcttctctcttaccgactccgatcagtcagtttgtagagtcatacactccccctagcccccagccttgtcgtcggagaatcgttctcggatgataaggctcttggacctttgacctgcttcggttgaacaagcactaatcctagcccccagccgtgaagttggaaaactcaatttccgattacacggcttagttaatacgcacggcgagaactcttacacgatcagatcttatatggtcttttatctctacaggatccgacaaggccttatcggctctgggcgtccccagccgaagtttccttaggttcctcggaggccttgtcaagacggcgtcaagggacagtaggataggtttcaacgctaggtgtcatcgtggtaagggatctctgggtaaaacacttggcgatcttgtgtacctgatatcaactttgttggagtagaggtaatgggagaatcgctatacctctggtcggggactaggtagtagtcgtaactcaaccacttgaagtggaaatagtgggagaatcgctacaccgctggtcgaggacctggtgtagtctaaacccgaccactagaagtaagggtagtgggagaatcgctacaccgctggtcgagaacctggtgtagtctaaactcgaccactagaagtaattgtacgagagatcgctacgattgactggttgagaactagtgagtaggtgtctctcgatcatttgaagtcgtctgaagtcgtagtgcaaggaccgctactctgctggtcgaagaccagtcatagtcgtacctcaaccgtctaaagtcatctgaaatcgtggtgctaggaccgctactctgctgccggtcaaagaccagtcgtaatcgtaccttgaccatctgaagttaaggcgcgagagattgctatgatttactggtttgagaaccagtgagcgaatagaattatctctcgaacgccaatggaagtcgcggtgtgagagattgctgctgtcgaatggttcgggaaccagcgagttgaattatctctcaaacgccaatgggagttacggagcgagagattgctacgtactggttcgggaaccagcgagcgagcagaattatctctcgaacaccaatggaagctgcagtgcgagagattgctacgtactagttcgggaaccagcgagcgagcagaattatctctcgaacaccaatggaagctgcggtgcgagagattgctacgtactggttcgggaaccaacgagcgagtagaattatctctcggacaccaatggaggtcgcggtgcgagagattgctacgcactggttcgaggatcaacgaatgtgtagaattatctctcggacaccaatagaggtgttgcggtgcgagagattgctacgtactagttcgaggaccagtgaacgtgtagaattatctctcggacaccaatagaggtgctgcggtgtgagagattgctacgtactggttcgaggaccagcgaacgtgtaggattatctctcggacaccaatagaggtgctgcggtgcgagagattgctacgtactagttcgagaaccagcgagcgagcagaattatctctcaaacaccaatggaagctgtggtgcgagagattgctacgtactggttcgggaaccagcgagcgagtagaattatctctcgaacaccaatggaagctgtggtgcgagagattgctacgtactggttcaagaaccagcgagcgagcagaattatctctcgaacaccaatggaggttgcggtgcgagagatttctacgcactggttcgaggaccagtgaacgtgtagaattatctctcggacaccaatagaggtgttgcagtgcgagagattgctacgtactggttcgggaaccagcgagtgagtagaatcatctctcaaacaccaatggaagtttgcggtgcgagagattgctacgtactagttcgagaaccagcgagcgagtagaattatctctcggacaccaatggaggttgcggtgcgagagattgctacgcactggttcgaggaccagcgaacgtgtagaattatctctcgcacaccaatggaggtgctagagttggtttattacatgtgcgtctcatgtggccagcatgactcacacacccaacttgtagcatatccggatgtccgttcacaatcatgtcgggtgatcaagccgacggcgttcgcgaggaattatccgttaacaaccttttctcgagtagtccagccacggccggtgctatgagataggtcgtcggtcttcgttggtaggttcggcgcgacgactctgcatttgtcgagatcgttctcgataatgcggtgtactcgaccacgacctaatcgagtgcttaattgttcctgaaaaatattttctagaaggcaagatatatagcagagaatatcgagtatgtaatcaaaaaactgcatggatcttctagtattatcaggatataacaagcagatgtaaatatcaggcattatgtaaaccgtaaacaagcatgatttatacagaagagaacagagcgagcccccagcgttagaccgtagtcggttttacgtcggaaacattcgcgcaatagatattgtataaaaaatatgctctaggtaaacataataaattatagatctgacaatgctgtatgatctgaatagatacgataaattacgtataaaatattacgtacctttgtatatacataccggatgtatctacgaaattagtagatcaatttaaaaaatcaatctcataattacctttgtttatgcctgctacagtcgacaagcatgtagtagagttggacgtgattactttgttggtcctgaaaaacatgccgacctgtcatatgcttacacgtgtgtgtttgtgcacgtgacatgtctaggccaatatgctttgttgaccatctccgggcaaaacacgtgatagcacaagtgcactggtactcggatgaatcccggcggtgcggcgttgcattgtgctcggcttggacatggtggcgtgttggatctggactcggtcagccggtgcttgcgcagcagccataccagctgatgtcgtaggcggaggtcttggcagttgattctccgcggcgttgatgttggatgatctcggtagatcaaattgttgatgacgatgattccgatcttgtcgggggacatactccggtcaggttagatcttcccacagcgaagtcgtcgagtatcttgttgtcgaagaatctatcttttgaactcatctcgtcgaaatcctagagcaccaaagtcccctacctggcgcgccactatcgatgtttgatgtcgcgattccggtatttgcatagtatggggatcgttggtactagggtatacgcgagactaaggtaaaagtgacaaagacggggatttttatacaggttcgggcccctcaattgtcaggtaataaccctatatcttgttggccgaagccggtattgctcttattcaccataatcacaccagtacaatatttggggtagcctatctaactgttgtcgacatggtggtctgaaggtctgactcgtagtcgacaacagggtagtcttcctcctcgagttcgtgcccggcgagatcagagataacgctttcgtctctcttgacagtatccggagacaccgtaggggactagccgtgcttatccctgaagtcgatatccggcgtcttgtcttggcgtatgttggcttgtatgttgatctatgttccgtgtatgttgattgtgatgggtgtgtattgtccctgttatctgttgattgtggtgggtgttgattgtgtggtcgtgtgtgtcctcccctctcctcctagggggtcttgtatttatatccataggtgtcctcttgtccaagtagaactagggaaaacaatatggatacaatccgagtagtccttgtcgttttcatgtagaactctggttgtctttccttattcggaactccctccatatccgaagtcagtttccgtataggacatggtatgtggtgagtcctgccgagatttagttaactactattaggtaggtggtatccataaccctgacatatgtatttatattttttttaaaaaaaagatgagactgtacacgcatttccctgttttagtgttttatcattatgggggtgctctccttccggtccaaagcaatgttctctttgtcgtcaaacaatcaaattgatctatttaatctcttaattatgagatgcactcctttgagttcaaatcaaattgctctatattatctctttcttagaagatgctatcttttgtccttcacttgttaaagaaaaaatactaggccactaggggggtcagcttcatcttcaaggtcccccgagcgttatctttccgaaaagttgttcatgacatgggttagatttgttttatacgcacaaccgaaggccaaacaagatgtacctttcctctcgtcgaatggtactcttctggttttgttttcctgtctcgtgcagacttcaacacatttgtccagtgaaaaaacagctccttcagaagaagaacgaaagtgtcaagctgcgaatttcttcatccagcaccctgtttcccaagatatcgactcagatttggtttgatgaatttgatccaagatgttattttgctcatatattcttagagatggatcgtacactaactcactgcactgataacttgctccctcttgatagtttgcttttccaggattacattttctagctaatgctaagtttgggcagcgggatttttgaaaacacgtacggaaatgaaaatctcacatgaaacagttggttggagcatagaaaaaacacaagatttttagaagaaaaagctatacacgaaggaaaaaattttagcgttttagctgacaataggaatcgttcaaaatttctatgaaacatataattccatataatttttaaaggaattatagtgtctcgatcctttgtttcaaagtaaatcatagggatttttttctactggattcaaattatttaaaaaatcttatatgtttcctttgttctcatatgcatatcacggttaatactcaaaccttttaatctctaaaattttggggtttccacctagcttcatccagaacctcgtatctgaccacaaacaagaaccggcacgacaaccattagcggacaagaaccattagattgttagaacatgtatgtaagaattttattttttatttttaaatatgctatttcgttttttcctccaatatactaaaagcaaaggttaaaaataaactacaataaaaaaaaactttaaaatcaacttaaatttaaatttaggactaaaaaaattaaaatttagctaataagggtctgtttagttcgtgaaaaggaaatttttgggtgtcacgtcggacgtttgaccggatgtcgaaaggagttttcgtacacgaaagaaaaaactaatttcataacttgtctggaaaccacgagacgaatcttttgagcctaattaatccgtcattagcacatatgggttactatagcacttatggctaattatggactaattaggctcaaaatattcgtctcgcgatttctcctctaactactgttaacgaccaaatttggtaatatcagcatcggaaaaggagattagatcaaggtggagtcgaaggcggagattgatccgagaacagagcaagaatcggctgaagtccagattggctacgattagaatcggctgggtctgagtcggactaggtgagccgatgcggccgattctgacagtataatttgatgtatgacattgggttgaattgaggtgcttcaagatgattgccgcacatggataaagtcctgagaaggcaattgtatctattaatttggatgttttatataacttccttagagatatgtttgggcaaaagtctgccgcaaagacttatggtatcttagagttttttagagatagtggtcgtgtccggtatggacatatcttgtaattctcgagtataaatagaccccgagccctatgtaattttagaacacacacgttcaatataatttcggtgcatcgccacatttttgctttagttttgtttcgacgagttcttgctttcgggttgagctgcatcggtttcgatcttcaacaagaggtaatacttgttatgacgacttgcgttctcgagattagtgcttccatctttataacactctaatcttgtctatataattcgtcaagttatcatatatcctacataatctttggtaatatcgtcatctaacctacaatcggctaacatctgttaatagaaggcaaccaattaggttaaatagcgacattgtcctagattatataagatatctaccactttatgaaacacccagcggtttgattgtctagatattgttcttcttttcatacttaatgctgcatcagttgagtttgatctattaagtcgtgcttagaatatcaatctctagcctgtcctctggttgccgattagggtagtatcggagtttcagccgatcttatttgatttaaccatattcgatctatatgcttcaatgacatgttaaatccgccctttatgtcaggatcttattgcatttaagtatattaagcttttgtttggtatatgatatttgttttgatatctttatataaagtagtatcggagtattagccgatacatgctagatctatctgatcggctatgctataaacatatataatcttgttattaatatatatttcgatctaagtgatttatactgtctcggcatgatgaccgatctatcccaatcacttgatttaagtatatattaatataagaactatatatcgttaatatctacagccgatcgaatagatttagttccttactatctatttataaccgccgatcgattcatatatgacatcggctcaaagataaatgatatgtcatcggcacccagccgatcggctatcatttatagatttaaccacgaattctttgtctctatttcttgttgattataggatcaaatcaactggcacgctcatacattcgaaggcgagctttggacctgcactggagttaagcagatctcccaggcctcgtgttttctgtcaacaactatgcaattagtttttttaatttatctatatttaatactccatgcatgtgtctaaagattcgatatgatgtttttaggaaaaagtttttggaactaaacagggcctaagtactccctccgtcccaaaatatagcaatctagaaccagatgggatatatcctaatactacaaagctagacatgtcccctatccatattcgtagtaatatgatacgtcccatccggttttagggtgttatattctactctctccgtttcacaatgtaagactttctagcattacccatattcatgtagatgttaatgaatctaaacacatatatgcgtttagattcattaacatctatatgattatgggtaatgctaaaaaatcttacattgtgaaacggaggaagtaggacggagggagtataaggtaaaggaaaagacaaggctattcgttggcatctcggaagtcgaaagcacacgaagcaaggcaaagcattttaggccacaaccacaacgaaaacgcttcgtatcgagcgtccgatacgagacaaactccggacggtcgatggggcccacctttcccccatcttatcctcttccttctcatccccaacctctcgtttaacttcttctcagcgtctccacgctgcacatgcggccgcggtgtcatcagccggtgccgccaccgccgccgcagacggcggggctgccgtcgcggatggccggattctggcgccgccggcgacgttcgttagcggcgtcgtgtggcaggcgcggtggccgtgttccgggcggcactggtaatggaggcgccgggcggcgtcaaacagcgacgaccgcgcgccgctgttcttcaccttctccctgatgacggatggaagaggaagcgtggggtggtgctcgtcgccagcgaggactaccatgcgctcgagcggtggccggtgcagcagttccggcggcgggatgcggtgagcgccggcacccacgttggcagcaacggggcagcacgacggaaatgcttgagacgccatcacctgagagggttctgagctcggcgacgaaggtgaggaggctgcacactacatgtttttttgttgcacatagtgtgttcctaatgttgcaatccgttttttctggatgtttcttaaatcggtaatggatgttgcatttagtttcttcggatgttgcatatattggttttttttgttgcagacaacattatcgagtgttgcattcgattgaaacatcttcgataaagtggtgaaacattttttttcgagcggtgaaacattcaatgaaagatgaaacatcgagaaacaatttttgttgaaacattttttccgagcggtgaaacattgcaatattcattcaacatactgtgaaacatcgtctggagattttatgttgaaacattacaatattcattcaacatacagtgaaacatcgtccggaaacgtccaatgcgtagctttctcctaaccacaaccgctgccgccgtcattgcggcacaccggataggaggtgatccggatcggagccagtgccatgggacgggccgggtatgttcatgggcaaattttttactggcggtgggcttggtctcaaaagccgagtttgactggtactgtgctcgcgtgggccacgggccacggcctccactcttcttgcctctctcactgtgcccaaaaccagatcaaagctactggtctcactctcacggtctcacctcaacatatgttttccctcttgccgcgatggtcgctcgagttgttgatgctattgatcagctagttattccccggataaaatcctttccattgacgctgcacatataagaattctcactactagtagtactactactagtactactacagtactacctagcagcatggtactagtataaagtatgtgtcctggtatagaattactacatgtgcaaattggcactatgatggtacagtgcacgggacgaatcgccaaaccagaactagcataggagtagctagatgcatggtcagctaggcatggagtatggtcctccgatcctaggagaggtgatcatcgagcacacatcgatcgatccatcgatctagcacgtttgtcttgagttttactcctacatgcacatgtcgtcctcggaatgaataaggtggctccacgtactactactcatctcccttctccaactccaatcgatccatggcaataatatctgcactgaaacgaactgtcacctgttgtgttgctgctggtacgagtagtaggaccagcaatgagcaaaatggtacagtactactcctccaatagctaacgctactagtactcgtgctacagcactggatgtcatgccggccaacgaccaaaatggtacagtaccagtgtaccacttccaccacaaatcaacagctacagtatagtataggctgtatagtcatgcatggaaatcgttggattaggagtacaattaagggggtcaaaaggagaaagtcagggctcgtttagttggaaaaaaaattaccgttgcatgtcacatcggatatacggatgtacatttaaaatattaaacgtaatctaataacaaaacaaattacagattccgccagaaaattgcgagacgaatttattaggtataattaatccgtcattagcaaatgtttactatagcaccatactatcaaatcatgacacaattaggcttaaaagatttgtctcgcaatttcctggtgaattgtgtaattggttttttttgtctacatttaatactctatacatgtgtccaaacattcgatgtgacagcgtgaaaaattttgtttgggaactaaacaggccctcactctatccatccgaaaataaactaactcttaccttcgtaagtcgagaaaatttattacttcaatatcccttacgtaccaactaatactagcatacaatatttacattaaataaggatattgtggggtttttttctctccttaaaattactttgacatgctagggttcgagattttgggggtatattgggagtgaatccagaggccgggatcagcatggagagacagcactgctgagcaacaaagcaagcatcccagcacagcatctgattcccctgcccatccgatgaaacattcgttgcagcgaaaaaacacaaaagtcgtcgtcgtcgtcgtcgatgaaaaggcaccggatcgatcgaggtatgattgcatggtggtcatggtcaaatgctgcttgggcatatgctgctgctagcggcgggagggccccggccggccgtcgatcgactgcagttggaacagcggccgtgagagccacctttacccaccacacccatccagcggcaaggcaggggatcgacccggacagacagccgcggaaaaggttgccggccggtgagccatcagccatatggacaccaccaccgtctgtcactctctcactctgtcatcagtctgtgtcactcacactgtcagtcacttgccactccaaacaagcatatggagttcggccctgtttaaataccacctaaaatttttcatcatatcatatcaaacgtttgaattattaaacacctaaagtattaaatataggttaaaaaaataactaattatacaaattacgactaatttgcgagataaatcttttaagcctaattgctccaagatttgacaatgtggtgatacagtaaatatttactaatgatatattaattaggcttaataaattcgtctcggtttaccgacggattctataattatttttttattaatacccaaatactcttatatgacatcttatgtgacacgataaagctttacactcctgcgtcaaaaaacacccctggtagaagtactagcagagtaatgtagtggtagtagtagcatatgcacggatcaccaaaagaggtggatttgccagcagagtggtacacgtctcctgcagctgagctcgccgttggactggacgcccagctactagccctcgccattgtcgcgcgcctcggaagtcgggaccgagtaggagtagtgcgggaatcccatgcatgcatgcacgcgtagccggaggccggagcatatgccgaagagaaagccggccggggaggagggcgccgacgtcgacgccggctggccgcagtactgtggttctctccccagtcattggccgataaaagcagcggcgagcgagagcagcatgcctgggatggttttattaacgcatgtttaattaaatattagtcataaaaataagagaatggataaatataatttttacaagtacttttttttataaaagattttctttttaaaaataaaaataagagagaaaatttctaacatagaacacaccttaagttgtgttcgtttttttttttgctgggaactgattattttccacataccttattagcacacgattaattaaatattaattttaaaaaacttaaaaaataaattaatacgattattttaaaatatatatataattttttatagaaaaatatttaataatttggaaaacgtatgctcaaaagacgagtgagtgaagttaggaaaggtatccaaataacacatgcttatgctccgttttgagatctcatttaacttttgctcttttaccaccgcagtacaagaaatatgattaaacttgaaaaacagatttatttgatttcttttttaagaaacttaaaaacattaaaaaagggggagaatatattagaaaacgcacgaaaacatgttcattaaaaaatgagggagttgcggagaacgcaccgtgtgctacactaccagtcagtaggcgtctagtaggccgagtataggccattgccagcggcgacgatgcaacagcgctgtcctaggctcctagtgctagctgcgcaagacgacgatgatacccgaagagctttcactgcactgtgctgacttaactctgacagtagcgctgcgtttcacagccccatcaatcagagttctttctcctttctcccctaaaccaaacaatctccgtcagctggtagctggagagtactccatccgtcccaaaatataacaactactccctccgtcctataatataagagattttaaatttttatttgtaatatttgaccactcatcttattcaatttttttataaatatataaaacaaaaatttatgcttaaagtactatagataataaagtaagtcacaaataaaataaataataatttcaaaaaaatttgaataagacaagtagtcaaacgttgcaaacaaaaactcaaaatcccttatattatgggacaaagagagtaacttttagctcttaaaatttgtcctgaaatataataatttctctaccaacattatattcccatccaatcacgaccctcaaccattcacttttctcacctacctccactacccatccaatcataaccctccaccacttacttttatctattttcttaataaccgtgtctaattctaaaatttattatattctgggaccgacggagtactcggtttcacccggccaaacatgtcagtcacacatgaatgagcacaacttgtcaagctccatgcccatgatgaattcattaattatattcatggcacgatacgtacagtagcagcagtattaacacggagaagacagagagatcaatgagctgtgggtgtcaatgcacctggctagtactacctcactgccttaatactgtatataaatttgcaagaacagttaatggtgtttcaccggcaaggcgatcgatccgaagtcgaacgccgtgcaaacacgtgaaccgcgatggtctgtcaggcggttggcgggaagtagaaggggtgatccgccgggaacggcggctgccggcgggtggcggcggcgacgccggcgccggcgccggcagagaatcctgatgatgctgcagcgtggagcaatggcaagtgagaaggggcctgcatttgccaagcctgtgttgggaacggcatgggacccagctcaggccttctgtccattggcctctcctgcagttccattgcaatttgcaacagagcaatcatctatatgagctttttttttttcacattgcactgtatctttcatgctatcacagcataggattcttaatgctataatgcttctcctgcagttggaacagtacatattctaactaaataaaaatttcaaaaggaacagatggcacaattgattggttgttcgttacattaaccttagttatgcatgcgtgcagtgtgccagcagccagcaatataaaggatggaaaagcaagatatagtagatcactcagagccgtgcaagcttttaaacagtatctgaatctagagcatcttgagggttaaaagctgcgccaggtgatcagtgtactaacttgaagttatatcagaactgtaatactggaatgctttttcaaagaaaaaatcatgctgacagaaccacctgacgaaatactcaggtatttatctacccatcagaattcacaagggaaacggtatctaacaactaatagctgcagataaatacctgtactcgaggtagaagtactaacaaaggtagtaaaaagtaatgtttgaacttgctagatgactgttcttaaggcagaaagcatagtattcagttatagaatcctaagctcgttaacgataatttatttgacaaacccattagaattggtaagcaaggggtgttgataataatacctgtaggttcgggaggaagccaagacaatgagatgggtacaaacgttgatgctgagggggcagtggtgtgctttggtgatgcacagtccattggggagacgagcccattggctacagcaacgccaaaaggttaaacaaacgttataatatccggtctttcagaacttggatcatcgacaacgtactgataaaaacaagaagtacagtccatctttataggaggttacatggataagagaaagctacagttgtttccattctactaccatttttttttttttgcatgcactttttttcgacagatatatacttgcagagaaaatcataaaaacaggaaaaaaaattgaaactaaaaacagaattgagaatttattactttctataagcattacggcattacctggtggactgtaatatttgaagattcaggggaatcacaagttaactggaggccagttgtggcgacatcgcttttggagtcacgcgcattaggttgcgaaatccgcaaatccaaatcaagatcgccatcaacaattgctaaagaaaaaaacagtgatggctatgagaaatggtgtttggtgtgcttcggctgaaacggaaaattcgatggtgagactgattgtagtaccctcatttccggcgtctggtaaagcatccacattgtaggatgcaggctcgaagttggtaacagcttccctcccattgaagcgaatagctgccctgtcatatgctctaccaaattcaaccagacatgaatcgaaagtgagcgagaaaccaggaagttcatgactcgtcatgcatgtcacttcatcaaaggaatagtaccttgcagcttcaacttcggtgtcaaagagcccaaggtatatgtacctgcaagaagatatttctgaattctgagaccacttcagatcagaaaagcgtagtacatgcctaactgctagctagactctttgatgacaatactgtctctccagctgagaaagtacatgtgttttccccaatattggctgcgaattgatgcactgagaattggagatgtggacctctcacccgaatcatattaagacgccccaaccggaaacaacttgtgtcacactagcatggccatggactcaattaattagcttaaactcattatcattcctaacctgaacatctcacatctgtactttcgtttgtcactcctaattatacggttgtgaaattgaagtattgatgaagggggatcactagctagctagctaattaagcttacttcttgccaagaagttggcccatgcgtgcctcccagcggccgcacttgtgcagcgtgacgccgcggaacttggagctccccctcgcgaatcccgtgctctgtcgccggagtatgtgcacgaactcctccttggtccagttcctcatctgcagcaacccagctcagttcactcacatgagatcgaaaggtcgagacgagctagctagctagcatggagtatcatactacgattagtatgtaatcatatatctagatcacctgcttcagatcgtcctcgtagtcgctcaggttgaagttgatgtcagcctccagtccccggaacttgatcgcagcgcgatcgtaagccctgcgtaaacatgatcgatcgatgcaaatttagcaacaagtacatcaacctcgatgaatcaatatgattaccagttaatccaacaaggttaattaattctattcacgcgatcgagcttaattaatacatcaccttgctgccgcgtgcgccgtgtcgaaaccacctgatgataaatttcatcagcgttagcacaatactacaagatagagagctatagccagcaatcgaattcacagcaactaatgaaactgataattagttgaattgctcatcacctaggtagacttgcttcccgcaatccctgcagagattaggaggaagaaagcgagggattaatggcggtaatcagctagacacggatgtggattaatcagttgatgattagttgattgattaattaccatatgtgcgactcccagcggccggtcctcctgtagaaggtgacgcccctgtactgcgagctccgcgacctcggcccgcgccgcgtcttcttcgcgaccaccggccgctgcgcgagggcggcatcctccgccgcgcggcgcggcggctgccacgccggcgccggcgacggcgccgcgggaggcggaggcgggaggagctgacgcgtcacgatccccgaggcggccggcaactgatgctgctccccggagcactcgtcgtcgtcggggctgctcgcgaggaggtcgaaccggaataatcctccgccaccgccaccgccaccgccgcctccggcgtccccggagtttagcaccgaggagctcgacgtgccggaccgttccggcgactccacattgagatccaacaacatctccaatcctcaccacaccggcaacccaaccaaacacttccaccctctctcgctcttccgacttcgatcgagttcaactcaccaccaactctcctcgccttctgcttcaccctggctatagctcagctcgatcgttggcgcctcgactgacgacgactcactcaccggcttcgagcggtggcgaggcaggagcagcagcaaccacagcaccaggtggtggtcgccatggggggttggatgaagaagaagaggaggaggagagagagaggtggggagcagcgggagaaaaggaaatagagagagatggatgggacgtcgaagtggcggaggagggtatctcagggaggagatgagaaactatcgcacaggggattagaatttcgctacggccacacgcgcagcggacgcctccggtggtagggacggcggcggtggctaacgtgtcgcacggcgatcggctcgccggagatggccggtctccactcccaagtccccaacctctggtcctttgggagagagacgatgatgagcgggtttgcatttgcgtgggtttttctaggcgcttatactcgataaagaactactgtacccaattggggcgattttgtatgcgacaaataggacaccacatgggtgttagtttattcaaagtcggcagattctgacgttaattatagcatattaataatccggatgatagttgggctttgggttgagtttttttttaagacgttactttatatataatcataggctagatttgttgtgtactagttgtgtcaggtgaattgttattataaaatgaaggacgttgtcaaggtggttatatgactcgtgcgatattacttttattcgtgaatgtactatgaaagtataagtgagtgatgtgatttacaaatcatgtaaaccaaagactacaggtggaatattctaaacgttctttagagcttccgatatgttattacatggtggtaggataaagtaaagtgaaccatataaaaaaagtcaaagtataagtctattgaacaataatgaaacctttttataatatacatagcaatatttaacaccatataatttactagtataataagtattataagatgtattcctaaaacagacagtgtatagtgtatgggacacatggccattcatatcttattgtactagtagctaaaaccaaataaacttataaatatcttcatcgcagaacaggttttctttatcgtaaaaaagggaacaaccgtaccctcttgttggatagtttagccatttgaggccaccagccaagcgcgcagccgggagagggagcacggtccagaccgtgcacgttggatttgacagccacaatcaggaatcaacaacagcaacaacaacgcggaaaagtgcaccgggtaagattagttaggctacgttacaccagtggccaatcagcaacgaaccatatgtgcattgcatgcacactggcgtgcaccagacaattccattgccctccacttcaactttttttcatttttcacggcaccgcgcgcgacagccataatggcaggcagcatcaaaactcctgtggcatccaacacgctgaaagcgccgaacgccgtacagcctcgggcgcagccgttttaggatgtgtttagttcacgcaaaaattaaaagtttggttaaaattgaaacgatgtgattgaaaagttggaagtttacgtgtgtagaaaagttttgatgtgatgaaaaagttgaaagtttgaagaaaaagtttggaactaaggccctgtttagttcccaaatttttttcccaaaaacatcacatcgaatctttgaacacatgcatgaagcattaaatatagataaatgaaaaaattaattgcatagttagggaggaaatcgtgagacgaatattttgagcctaattagtccatgattagctataagtgctatagtaatccacatgtgctaataacggattaattaggctcaaaagattcgtctcgcggtttccatgcaagttatgaaattattttttttcattcgtgtccgaaaaaacccttcagacatccgatgtggcatccaaaatttttcttttcataaactaaacaggccctaaacaaggccttaggccattctcaacccaatgactagaatggtgtctatagcattaaataagctgccacctaaaatgaaaaatgatgtagcaagtgaataaatgaggaatgagaaggaaaacatatcttgcatgagacatggtttctacacaacattcaagacatcatgtgagataagtggcattaattgaagtatggattagtgatatttacattggaatagtagtgtctagtactaatttcttgatgatgtggagcttacagaaactatgtctagtgtcatgggttgagaatggccttagccgcacttgtacaggcaaagtggagtatatccatccatcacgcacggcacggtgagtggacttagccgcggcgggccgtgcagttgcagtcgctgcccgcgccgcgagcgtggaggtcaaaccgcccgtgcgccaccgcgcagccgcccgctcgtgccgtcgccgcgcgcggcgcgcggcgcgtggctggctgtacgctggcctcggttacgccgcgcgcggtctcgcggcgcgcacggcgcacgtttcttcgtttcaccgcggccgcgcggcgcatgctgctttgcggcgccgaaattataactcgtagtaactcgtaacagatcgatggatgtgtgtacgatatggatcgatcggctaagtctacgtcgcgttgatgaactcaacacgttaggccaactgttactatagtctaataactgggcccgtgtatagctgtgtacatgggcgaaaattatgctatgtacccggccggcccatggcgtgccatggccgtacggtgtaccggctctccgatcctggacagtgcagaggccgccgtacgtgcacgatcgatcgatcgatccaagcggggaaacgttattcgtttctagaaaaagcttttattggcgtagggcgacccgtatagcgtatgtacaggtttgacgtgagaagtgagcgaatacgtagctcgctagctggataagccgcgttttgtgccgtgcgcacgaacgactcgcgcgtgaaactcttttaatcactttagtcgacgtcaacttaataattacatataaacttaaacagggacggatctagaaaggattaattaataaataagagggcttaaataaactatacaaaattatatccctcttctaataaatatatgacagaaaattttaataagatcccatggttaaaatcgccccttggtggagaaaccatctttcgtcggtcgggttatttccacaatagtcccggttgcaataaaaaccgggactaaagaccggttaaaaagggtaacaggcaatttgatttttagtccccgttggtaacacaaacggggactaaagatgatcctagtcctagttcaaatgttatcagggcttgtcaggcctccccaggaaccaaccgggattaaagatctatttatagtcccggttgataacactaactggaataaaagatcggcatgcgcaacatgggcgccggagagtacgaggctagatcgaagaggaggaggagcagttaatatattctatctcctccctggccttatctcttcctcctccatatctcttcctcttcctcctcctctcctttgaacttctctcctccttttcctctttctcctctacgagcgccgacgggcggagggcctggtggccggcggcgtgccggcgcggcggcgcggcgctaggcgatgcggcagcacagcggcctgggcagcctcttgggcggggggccgcgcgcggcggcggcggccggcgggccgcgccccgcggcgacgggcaggcggccggcggggccacgcctcccggcggcggcgccccgcggcggcgggcaggcggccgacggccggttgggccacgcccggcggcagcgagcggccgtttttttttataatctgtgattattgagatgtataattttgtgattcattggacatttgtatagatctgagatgtataatctgtgatgtattttgtattgtttaggatttgggatgtatttgatttgtgtgtatgagtaactttaagatttgtgatgtgagttgagatgttatttgatttggggatttggggatgtgcatgccactcgattcgggagaaaataaaaagaaaataaaagaaaagaaaaccatctggactacccgctactctctctttagtcccggttgataagaacagccgggactaaagatccctcttttttactccggctgttgttatcaaccgggactaaagatcaatctttagtcccggttattttaaccgggactaaagatacctatctttagtcccggattgctactctcggttgaaaacccgagattaaaaggggttaccaaccaggagtaaagaaggtttctccaccagtggccatcgccatcgtccttacgacgtcgtggtctagttcactgtggggattgctattcaaccaccttatcctggtcctcgaaaaagaatggacaactgttcgggattagctaatgaccattatcattcatgaatagcactagtacttggttcgtggccacacgtccatatatattctactccctccattttataatataagtcattctagcattgtttatatttatatagatgttaataaatctagatataaacatatatatcgatttattaatatctgtatgtatatggacaatgctagaatgacttatattatgaggaaatactgtttttaaacaagtgtttggttctctgttactcatgttagagcatgttagcgtaccacatatactatttttagcgtgctccatgtgtgccaatagtcccggtttttcaagtcaattttgctgtcgaagttgtggtgccgtgcaccaatggaaagaaggatttgcagccaaatgtgtcattaccttagtattatccattcaactgcactatgactatcactcaataaaataatagttaatttgcaaggtcggagataaacttcagagtgcaatagcaaacggtgagtggttttaatcctgagatttatgttcaatccctaacacgcttacaatttctttttaaaaaagtttggagcgctcacaatttctttttagaaaagtttggagggatgtgtctccctccaaatcttgttttaaatttgcaacgttgtgtttgctaccaaatttgtaattagctcggtattattaccagttgcacgctgattatataaaatagtgaattttcaagtttgtgtttaataccaaatttatcattagcttacggcctgtttggtagagctctagctcctaaatttagctccaggagttgggtctggagtggagttg

SEQ ID NO: 1771 - DNA, 2699 bp, Oryza sativa
aggtggtgtcggggggcagggtgagcgtgaggccggagccgaggacggggtcggcggcgtcggcgagggagaaggggatgggggagggcgggccggaggcggtggaggcggagtggacggcgagggcgcgggtgtcgaggaggaggtcgccggagtgcggggcggagagggtgagcagcgcggaggcgtggatggtggaggcggcgaagtcgaggtagaaggcgagggcggccttggcggtgaccgggtggtcgccgtcggtgtacgagtggggatccaccggcggcatggctgagctgcagcggcggaggaggaggagatcggagtggagggtagggagggagggacagggtttggctttggcctgtgtggatttggtcgaactcgaatcgagacaggattgaaagaagcaatgcaacacctcttcagggaaaaggagcttcaaacctcgaattgaaagaagcaaatcacatgcttaacttttttttttaaaaaaagaatacagtactccatccgtccagaatataagaagatttagagttgacacggctattaagaaagtatgaataattaaatggtgaaagattgggattggttgaaaagtgaaggtaggtggggaaattaaatggtggagggttgtgattggttaagaaaaaaatgttagtggagaagttgttatattttaggacaaattaaaaatactaaaagttattatattttagaatggaggaagtacattattaacttttaaattatatactcacactatatctatatatagtacattattagtttctttaatatactagtagattgatcgtaagtaatgtgtatacgttttttctacgtgtcggtccgagatcatacaacatatactatactcgcactaagtcaaaacaatatactaatagattgatcgtaagttgtcagggttatggataccacatatctaataatagttgactaaatctcgacaagacccaccacataccatgtcttatacggaaacaaccttcagatataggaggagttccgcataaggaaggatgaatagagttatacatggaaacgataaggactactcggatggtaccatattggtttccctagttctacttggacaaggggacacctatgggtataaatacaaggccccctaggaggaagggggagacagaacaatagatcaagacacaagatcaacatacaagccaacatacatcaagacaagacgccggatatcgacttcagagataggcatggctgatcccctacggtgcctatggctactgtcaggagagatatagcgttgtctctgatcttgccggatgcggattcgaggaggaagactaccctgttgtcgactacgagtcaaaccttcagatcgccatgtcgacaacagttagataggctatcccaaatattgtactggtgtgattatggtgaataagagcaatgacggcttcggccaacaggatgtagggttattacctgacaattcaggggcccgaacctgtataaaaatcctcgttttcatctcttttatctaagtctcgcatatatcctagtaccaacgatccccgtactattcaaataccggaatcgcgacatcaaacgtcgacataagtaatgtgtacacgtttttcctacgtgttagtccgagatcatacaacacatactcgcactaagtcaaaaagaaataagtgatactttcgtaatccaaatttgatcaccaaaaaagaaacaaaagggaaaatgatcagcgtgtaacgttgagaggcctttttttctcaataggatgcaatgtgcttgggcatagagattgttcacattgtagtaattttagtcaaaattactacaagattgtcaaaattttagtaatttaataatattgctaggttttagcaagatttcttatgtatttatcaaagtttaataaaaaaaactaaatgtttgcgtacatttaacaacttttttaaaaataggatggtttgaaatgatgtcgatatgagcaacccataatcgtgcgagtgagtacaaccttgtagttccttcaataatgggaagttatttgttctccttgatcttgatacccctattttatgtggtgatcgatatacggaacacttaatttttttaaataagacgaataatcaaacatcatattaaaaaaaggcaacgtctcatctattttaaaactaagatagcatgttttggtaaataggatatattttcaactatctcaagatttattaatagaaaatgtctaagtttgagcgtatgtagtgttgggtgataagcatatattgtcgacgtttgatgtcgcgattccggtatttgcatggtatggggatcgttggtactagggtatacacgagactaaggtaaaagagacggagatggggatttttatacaggttcgggcccctcaattgtcaggtaataaccctacatcctgttggccgaagccggtattgctcttattcaccataatcacaccagtacaatatttggggtagtctatctaactgttgtcgacatggtggtctgaaggtctgactcgtagtcgacaacagggtagtcttcctcctcgagttcgtgcccggcgagatcagagataacgctttcttttctcctgacagtatccggagacaccgtaggggactagctgtgcttatccctgaagtcgatatccggcg

SEQ ID NO: 1772 - DNA, 10186 bp, Oryza sativa
  unsure (1)..(10186): unsure at all n locations
tgtttctggcattcatggcaccgcggaggatcagctgtacaaggtatgccaatctcttgattgtcccgcaggctatgatgtgtttgagaagcttgaaaagaagtacatgaaagttgctgaatggtcaagatcagacaggaagcttatctttgatatggttaacaccatattatcagaaattcttgcaccatgtttggacatgcacccgtgggtgaaatctgctagaaaaatggcaccagtatggggttcagagggtctcctggagaagattttgcagatgttggttcagagacgggaagaacttgggctaagtaagactaagcctgagaagaaagcgttagatcggaagtggccagatttatcggattgcattgacagggtagggagggatgtggagaacatgataaaagatgatcttttggaagagatgcttttggatctgttcagttaggctgttggctgctttcagagtttcaggtttccatggcacaatacacttgcttcccccttatttagtttttgatttttcttaggtacttctcagcttgtaatgtttcttcgttggttcataaggtcaaaagttttttttttttttggtttgttgaagcagtggttgacgagttttttagttgagtcgccgtgcttgaggtatagagcaagttgtaaattttgttagtttagatcaggtccgtagattaaattcttttagaacgagaaagggcatcccataggttgtaagtctttggcggaatgtataaggagtatagtggctctctatttgttggattttctcagttgaaggcatttaagtctgtaaatcggggaaatagtaccctgccaacatttgtattgttcattggagaataaatgaagtgtgtacttctgagttttggttgagagaaacatatcgggcaagagtaaaaaatagtctgcttgaatgtgattattgtagtttagtatatgtaacatagagctgtttagatgatgggcatgtctctattgaaaaatagatcctgcatggctgcatccctaattcctctggttcttgaatgaattgtgtggttagcatagcatgcgaagctcctgattaattgttaagttcgacggcatattctctcttcgatttcaaacatagatgttttggactttataacttgtctccacacccaagtcgtagaatctttactgattgaatgctatcactcgtcatttccacaagcctaacctgtaggaacaattaattatgtttgacttaatttgtgatatactaaaaggaagcttttgtataaatccaccttataaaatgactaatttccacgtcccaattgctcccaaccatcctaaccatgcttcgtatggaccgtaataaaaaaaaaacagccttccaaagtgaagacactcgccaagaatctcaaggaaaataccagtaccttcttatagcacacaaaacaatactcaactctagccaactactcctccgttccaaaacaaatgtaatttcgcactattcttatctaatgtttgacatttcatcttatttaattttttttatgattagtatttttattgttattagatgataagtcataaatagtattttatgtgtgactaatatttttaaatttttttataaatttttttaaataagacagacggtcaaacgttggatacatataccctcggctatatttattttgggatggatatagtagtaacaataaagtaacagagtccaacgcaaaaatcaacttgatataaaagtggcatgatagctctaatttcacgaacacatgctattgttgtcaaacttgccaccaaacagcacggcagctccgactacacagtgatagcatcatcttggccaaagatatcatcaaaatgaacaaacatcaccgatttctcacagtcgacattagaatcattcttacctgtaaaattctaaacaaaacattgcttgtaaaagtgcaagaaggcttgcaggccagagatagagacaagacatccccgttcaccagcagcacaaaagaacgtagcaacgatcagtggcagcgttgcaattacggaccggtgtggcggtgttgttgcccatcccatcaatttagcagctgcgatgtcaccaccacaactattcattatagccacccagctaacaccatctcgtgcgctcgtggcccttggattcaactacccccgcgccttgatatttgcaactgcaaatttgtctatatacaaaatttgtctccacgttttcttggatagttagttgctcacccgatcctgtatccatggcggccgtgtcggaggtggaggtcgacggcgtcgtgttcccgccggtggcccgcccgccgggctccggccacgcccacttcctcgccggcgcaggtttgtttgtgtttgcgttgtgtgttccgtgtcagtggagaagtggaaatgccgtgcaagcgaacttgcttgctggtttgatcgatccgtcgtgcaggtgtgaggggagtggagatcgccggcaacttcatcaagttcacggccatcggcgtgtacctggaggagggcgcggccgtgccggcgctggccaagaagtgggccggcaagtccgccgacgagctcgccgccgacgccgccttcttccgcgacgtcgtcaccggtaactcatctcgctaaatttgttgctcgtgtcgacgggcggcgcgacatgacatgggcgtcgtctcgcgttgcaggcgatttcgagaagttcacgagggtgacgatgatcctgccgctcaccggcgagcagtactcggacaaggtgacggagaactgcgtcgcggcgtggaaggccgccggcgtgtacacggacgccgagggcgcggccgcggacaagttcaaggaggccttcaagccccacagcttccctccgggcgcgtccatcctcttcacccactccccgcccggcgtcctcaccgtgagcaccaatccgttgttgccgattactccgatgcgtgatttgcttcgtgatttggactccgtttgattcgatttgcaggtcgcgttctccaaggactcgtcggtgccagagggcgccgtggcggcggcggcgatcgagaacagggcgctctgcgaggcggtgctggattccatcatcggcgagcacggggtctcgccggcggcgaagcggagcatagcggcccgcgtctcgcagctcctgaaggcggaatccaccggcgacgtggcggcggcggagcccgcgccggtgtccgcgtgaaaatcgagctgcgaattaaccgcgcatctaagagctcctcctacacttcttgtacacttctactgccctcgtgtttgacaatgaaataaaaggaaaggagaaatcgcggctgttcttccgttccatctctgaattgcctgtgcacggctcgccacggtagaggtgaaaatggttacgaaaattctcgatcgacgccatttctgtataatgggtaccgttttcgatcttattatttttagctatttataatattttatacattatagtattaattaatataaacattaaatagtttaaataataaatatagttaattatcctgatcgaacgtcgttttcaaaagatgctaccaattcagatcgttttcacttatacgaccggtgagtacgggatattttctgcgattaggtagacgcgaatggctgatgtgagtggctacgcaattatgcgaagcgagcgaatgcgagacacggctttccgctaatggggcccggcccaattggcttaagtagatagggtgggccagtcaagggaggatctttggttgggccggcattaacaacggtgctgaaaccgtgagaaataagtccatcttccaccctcaactaatgctctttgtagggtttcataatgtctataaaatgaagacacatgactatggcagatgtgaacgactatgcagttacacgaagcaagcgaaagggggcagctaatgggcgggtgataagctactctctcacttcctcctcccctcttctcttcctactacactatatattttttaaaaaataaaaaaataaaattgtaaaaattcatgtatagaaatactatgtataaaaaatatttgaattcaaattcaaatttgaaactgtatgtaaacttttgacctataaactttgggtctataaactttaggtgtataaactttacatgcatagaaatactatatataaaaaaatatttgaattcaaattcaaatttgaatttgaaatataattcaaattcaaatttgaaatcaggtatataaacttttgacttataaactttgggtctacaaactttaggtgtataaactttagatgtatagaaatactatatatataaaaaatatttgaattcaaatttaaatttgaatcggatatataaacttttgacttataaactttgggtctctaaattttatatgtgtaaacttgaggtgtataaatttaataaaataggaaagtaatttggtgccgaaaaaggaaaccatctgaagagaagggggagcgcgctggggcgatcgctgggggcgatcaatcgccccttagcctttccgaagcgaaagcgggcactgtttctgctaatatggtccggcccaactggagcagtgtgggcaaggcaagggaggatgtctgcttgggccgacctttacaccggtgccgaaaacgaagggaaaaagtacaccgaaggtccctcaacttatcatcgagtttacaagatcgtccctcaaccacaaaacagatagctgacgaacctcaactaacaaaaccgttcactatacattttttggtgggtactatcccggttttgcgtggcttgagtcaacgtgggacccacgtgggccccacatgtcagaatgccagttatctctctcctcccctcttctctcctttcctcatgtctatctgacttctcccgatttgacggcgacccggttgcggtggtggcggcaacgggcgacgcggcagcagtggggggaggacctgcgggcgggcagtggtggaggggcgcnggggtaggancngntcncgggctcctcttcggccgccacccacgaggcccacgaccacgaggcggcgtgtgcagcgtcaagttcggctgctccaccacgacggccggctcgttcccggccgacgggctggtcgggctcagcggcgacgcggtctccctcgtgacgcagctcggcggcgaggcgtcgctcggccggagattctcctactgcctcgtcccgcactccgtcaacacatcgtcggcgttcaacttcggcaccctcgccaacgtcaccgagctcggcgcagcgagcacgccgctcgtcgccggggacgtggacacgtactacaccgtggtcctcgacttcgtcaaggtcggcaacaagacggtgcatcggcggcgagctcccgcatcatcgtggactccggcaatgcaaaaataagctttgttactcctgcaaattgcaagtgaacaaaacaatctcaagctaagttgttctttaatcagaagaacggtatatgaacatgcagaatttcaagatattttgtggcgccggtttcgctttcttacctcgctatagattctgtgagagatcaaattacatgacccataaattgtagagcaatgcaggagtaacactcccagctaagaaattgattgatgtataacactccgatcttctatcttcgttgggcgatgcaatgagaattcagaattctcactaacagccagcttgctagaatagagtatgagttactgatcttgaatgacctcatgtgtacatccagcaggaagcaaaccgaacaagcgagtccggacttgacgctggagttcggcggcggcggcggccgcgcggcggtggcgctgaagccggagaacgcgtccgtgacggtgcaggaggggacgctgtgcctggtaatcgtggcgacgacgaagcagcagccggtgtccatcctcgggaacctggcgcagcagaacatccacgtcggctacgacctcgacgccggcacggtcaccttcgccaccgccgactgcgcggggagcggccggccgacggagcagacgagcggcgggcaggcgcgctgcgggagaggaagagagcgccgacggggagcggggcggggggagcgaggacgtcgccgccgtcgtcatccatggccgcagttctcgcgcccgcgccgtcagcggcgtcgccggcgggagtgtgtgagcgcggggcagcggcgggcgaagcaggcggtggagggcagagcgggcacgacgccgaagacagcttcttcccgcgccggcgccaccggccgcctctcccttctcaagcgtcgccgccgccgccgcctcccgggcctctccgacggtccgaccccgaggtcgcatgcgccgccgccggctgccggacctcctccctacccgccagcggccctgcagagaggagagaaatgagagggagagatgaggaagggagagaagaggagggagagatgacctgtcattctgatatatggggtccacgtgggttttacgctaactcagccgccaccttagataaaatcgggtcaaaatcaccggagtatctaaattgaactgtttcgttagttgagagatgtcggtatctggttttgcggttagggaacgattttataactcgataacaagttgagggaccttcggtgtactttttccaaaacgaagctcaggtaagccttcgagtccatgtcccatgggtttcatcctctgctgtccaaattccagtatgctggatgctgcacgcctgaaccgagctgtacttacgtagtgtttggatccatgaacttagctttaatccctgtattttgagtattaaatatatactacttacaaaactaattacataaataaaagctaattcgcgagacaaattttttaagcataattaatccataattagataatgtttactgtagcatcacataggctaatcatagattaattaggctcaataaattcgtctcgcgaattagtccaagattatgaatgagttttattaatagtctacgtttaatatttataattagtgtctaaacatccgatgtgatagggaattaaaagttttagtcctatctaaacatggtcttattcgttgatgattggtcaccaataaaacaacataaactgcccaatacactacaaactgccctgtatacagtacacattccaatcggagcacactctttcgttggaagaaatagaaaaaaaaaacgttctaggcttcatgttaccgctgcatccagccattcagatgggcagaactagttgttgttcggcttgcacggaagatgatgtgccgtatagagagatctcctgactcactcaccggcatttaataccttaccttcgcgactgcgacccagttttacctgggacccttggatcttctcgtgaggttactgcaacgagccgttggtggcgtacgggacgcacagtttgggacgagcagctcgcgcaggcggcacccgcggtttttaccccgacacggccagcgccactcacgtacaacacgacgagccctcccatcacgtgcgcgccactgacacgcacgcaccgctagcaacggctcgctcgctgctgccgccatctcgtccagtagccaaatccaagtagccgagtggtttcacggttttcacctcgcgagccaagccaaagccggttgtgcacttgtgctttgtgctcgcgcgcgcgaccgcgtcaaaacctgcctcatctatcgctaaaaatcacggcgtctcgcggctctctctcggcgtacgtgcgtctcgctcgctctcgcgggcggaatccgtgacgccgactcggcaactgttcccccccggtgaaaaggggtggagaagttgggagaagaatctgatgctgctttgcgcgtgcaggcgatcgatcgcgagaggccggccactgtgtctgtggctgtgcgcgcgcacacacagatactcctcgctttaggccacatttacaatcatacatgcatggtacatacagctgctgaattctttcttattaccagagacaagaaggtactaccatgatttgtgtacatctgtggtagactctagccatgcaaaatgatgattcatggattcaaacgagaacaacaagtacagtaacttgcaaacattgcgctgcaaccgtctcactctccatgtcctcctgatttccgttcgaattattgtgaaaggaaaactgttgactcttcatcattaagaaattcggcatgcctttgttctgtctaccaatacgctggtttcttgacaggttttgatactcctggccatggattgctatcggatagctagctttcgtccaaggctttatttttcttttggacgtgtagacattccttgaattattcggagttgtaccgtttcagccaccttagcaatcctgcctcatcctttgtcgaggaaaagaaatggagaatccttctacacttttagaagctgttcatgaaagagcaaggaggatatatctagaagaaagattggaacaatccatgtttcttcaacttgaaccactagcttaactgaggatcagataacctgtttgatgctacgattagtactataaaatctgaacctgtttgacgattcggtgttctgtccagattcgttatcctagaatgtgtcaaatcccattaaactagattcattaggtagcaacattttaaaacgacggaggaagtaatccattagtgcttgttacatcaatctcaactactatattaatttcttgacagggctttctgtggtggaaacacaagagtcatcatgcagctagagataagcaactgaagaagtgaaccatacgacaacgtggctgaaaccaggaaagcctgaacacgccaggaccatcacggtaatctggcaacttagcagtaaagctaaaaacgagccgtttctctgaagccaacatgtgtaccaactcttctttttttttttcttgtgatataaaaaatcgtacacaccctagctattatgcctaactttttttttaaaccgcattatgcctaactttgcccagaaaccgcattcatgacttcttgtttgttttaacctccatatgtttttgtttctcttggtagcaagggtgtgtttagtttcacaccaacattagaaatttaactaaaattggaagtttgaagaaaaaaaagttgaaagtttatgtgtataggaaagttttgatgtgatggaaaagtttgaagaaaaagttattatttcctccgtttcacaatgtaagactttttagcatcgctcatatttatattaatgttaatgaatctagacacatatatgcgtctatattcattcacatatatatatgaatatgaataatgctagaaagttttacattgtgaaacggagggagtagtaactaaacaagcgctaaatgggaaaataaggggaaatttaactatttgccactcttgtgacatggcaattaacgatttgccaccccctgtcaatgatatgtgggccctcatgtgtctgtgacatgtgggtctagtgccaaatcgttaagcattatttgtaagagtggcaaatggttaaaagccccgaaaataagagcattttttagcagttagcacagcttctaccctaccgtagtgctaaccatggatagcaaagttgtcttctcctatataagctaagatactcttccactcttccttgctccatcagtattacaccacccaacacaagctcagccagtttaccactcacactagctgagctagaactcaccactcactgcagttgcagcatggcgcctttgctgttcaaggacatgaagagcctctcgtgctcgtcgccggcgtccacggcgatatgcccgagcttggagcggcagccgatggtccggccacacaagggcggcgccattgctgcgagccctctctgccaggtccccggtgagccaagaacggttcacaggcaagactgcaggagagggcagcagcatcagcacaaggcggctgccgcgaatggcggcgagctcgtcagccccgccggctcatccaggtacctgctcagcagccgcgccgccgccgccgaggagatccaggaggtggaggcttcggctgctccggccgtcgatgccaaggtggtcagggaagagcaagctggtagtgatgtgaagaacactctgacgcaggagcaggtgagtaat

SEQ ID NO: 1773 - DNA, 8802 bp, Oryza sativa
ctactcaatagatgatgcaaataattagtactaatatcaggatttgtatgctatgattttctattagatactgtggaacttccacctaaagaaaggcaaatatcatgatgacgaattgacatacatgctaccttcttgatttcagtgagatttgtacgtatattaaaattgctggataactgactcgtaggctcgtaactaagcatgagagattcagaccaatccatagaaaaaagaggagattcagcacgtatcccttaaacaaagagagattcagaacatgacagtattttaagactacaacatgacaacttgctacaaacatgacagcactgcacatctgcatcgtttctgttttaaatttcaaaaagccaacacatagttgctttgaattaattaaccaccggcatttgcattgggtatctttttcaggtggttgtactgaaggtatcactgcactgcaaagcgtgcgcgggcaaagtgaagaagcacctcgccaagatggaaggtgagcctatctatctatctgctagtatctcggagcaaccaaacacagaaatcaagatctgacgctttctcttcagaaacactgaagataaattaaagatgcccattgtaatatgtatgcatgaacagagaaacccctagagtttttccgactagctctacaatgggatgggctagacgacctggattcgaagcctcaccctttataattactctctccgtcacataatataagatattttggttgaatgtgacacatcctattactccgaatctagatatagagtactaatatctgcgtcttttatatgtatgcatgaataggagtgacatctttcaacatagacttcgcggcgaagaaggtgacggtggtcggcgacgtgacgccgctgggggtgctgaacagcgtgtccaaggtgaagaacgcccagttctgggcggcgccgccggcgatagccgcctgatgagagatgaaaacgcataggatcctctctggttaattaggtgcggaagcatgtgggtcactgatgctggaccagctcgctctgctgtctgtgtgatggtggtggtggtgtctcctagatcgatgagagcatgcgtgtgtgtgcgcgtcgtcctgactgatcctgaagcaagcatgcagatgcagctttgcttcttactgtgatccttttggtttcttgtggttggcaccatgctgagctacatgcccgtcactgtgcttcttcttccgtagactgatgagagtgtttgtgactatatatctgctctaagtgtaagtggtggtgttgttcttttgcatgctcttactgtaatataaacgtttcactgcaagtctgcaatactgcattattgttgtgtcgtactgcaactgtaggtggtgatcgcgtaggttgaggtgggatcgagatcctctgccttcaaaacaccatacttttattcgttgaaaggtgaacctatgattcatcaagttcatatgtcagtgataaagacatgtacatttgaaggtagaggaacatgatccgttgtggtggtgagtaaacagcagcatcagcctaatttgcttgcaaggtcaataacattttttagatcaataacatgtagtagcagaactctcaaatggaaaataatgatttatccctagtacaataaaatgcttgtatgtgtactgctggaagaaactttgagccaaccgggagatgatgaacacatatgccgaagtaacagccttctgaactctgaagatcgatgccgtcggagaggactccaacggcacatctgacttgggagatgcggcccatttaaatgaggtctgaacgggatagtgacttgcatatagcccatttgagttggcccttaaacatgatagtggtaggagagtgttttcgcgaactgattttggatgagcctcaacgatcttgccactaaactgtgccaccctcaagctcccaacaaccgtagaattcaattcgctaatggatccttcgctccggcatatacaggcagtggtggtgacctccttaggccgcctcctgtcgtcggcgtgctgcccgcggctgcagacgaagctaagcctgaatgatgtaatggggttcacggagctaaagctcgacgcgggccgggagcccgggacgatgtagctgtgttgtcagggccggttctataattttgagggctctagggcaaacttgacagcatgagccttaacgcgctctcccctacagagagacgtgttatatacatactcacactttttagggttgttcagattgatgtcatttcaaaccataccaatttttagtaaaattgtcaaagatgtatattcatttagtttttttacaaaactttagtaaatatataagaaatcctgctaaaacttggcaatatgactaaattgtcaaaattttgacattgtcaaaatttggtaaaatttattttggttacaatctgaacaaccccttttatttttaaagtgtgttttcaaatctaatcatgaaagaaatgaacatatataacatttcatatatatgttgttagaaatagaaaaaaaaatcgacacttaaactgaccttatttatttttcccctttacttagcgaaaaaaagcttctagagtaaaattacaacttttcagtacctaaaaattttagaggaaatatatattatcaacaagaatctatctatacatacaattttgattgttgaatctacaatctttattaattcactaatcagtactccctccgttccaaatttatctacatatttcataggtacaccaagatcaataaaagctaatagctctctcatactatatttactctaacaacaaactcaatgcatataccatccccactatttcctagccaatagtaaatcaagatattgtatgtgggttataaatacttgtatgcatggatgcatgcatcaatgtccatttactctaatgcacaaataacgaatagaattaatgaataaacacaaatatgtagatcatttaggaagaataaatatgtagatactagtagataagccaggagtagtagatagtacggaattattcactagtcttaaataccactttagctcatacagtactcatacatatttaggcatggcccctagccaggacgggccctaggccatcgtcctctttgccctgcctcagagccgggcctgcagttgttgatagtatctttttctcatattttatttccatttcagaaacaggttacatgatttatcgtacaattttctgaactaaaatggcttttcatatcttcataactcctaatactagaataagttagatgagaaaatatcctgacaatcgtaggctggagtactcagttgtttgggctctcacggctaattgttggttttggcaagaatgtccacacgcatgcatcgtctaaggatggatgtgattagttaggtgcatgaggctggatgagtttggtttgtgggaaataagagttcgatgattggattcggcggatttaaccggatatagccattcacatgtggcctattctgattgcttatggtgggtttaattttctgttagcaagctcaaaatgttttttctcctaaaccttttttctaatttgtgatccattacaccattatatttattacaattatctttaaaataagatctcgtatggttatatttcgatgaatatatatatatatatatggtaaatggacacttaatcccatcatgctatagcacttcaaccaaacaagaaaccggaggcaaactgcagtgcaatttagtttgcttatcacttccacttgcgcccaaacttcttgtgcttgccgtacttgccatgcttgaactttcctttcttgaatttgccaccatggtggccgaacatcccgtggccgccaccgccgccgggtcgtaccatgtgagctcccaccgcagcagccgccaccgcggcgcctccggcgagcagcgctccatagccagatgcgcctgcaccatgcccacctcctaacataccaccacctattacaatatggaacttggaagtgggataaattcaattgcatatactcgctccgtctaaaaaaaactcaacctagaagagggatgtgatctctcctaggacaacgaatttggacaaataatagtccagattcgtaaggttgagtttttttgaatggaggaagtagtgctttgcatcattcaccaagttacatgatagttacacaggaaatgcaagagagagcataccttgcatgggtggaccatggccatgacctgggtaaccagctggcgggtagcctggttgttgtggatatcctgatggtggatacgctcctggagggtacccaccttgtgatggagggtaaccgcttggtggatattgtgcaccagggtacccaccggctggtgggtattgtcccggtggtgcactagggtatccaccgggagtcggatattgtccaggtgaattagggtatccttgcattaggggatatgcaccagggtaaccgcttggatacgctccatggaaccctttgtcggcatttgaggagtcatgattgtcctttctgcctcccatttttgtgacctttttagcacttgactgaaacatagggaaatcaagattacaccatgaccattttgtcgtgcaaaatatatataagatttgcagagacagagagtacctggatatcttaggtgaacatgcagatcataaacttctcaagaaggtggcaccaacagtgacctacctaagacttgaaaagaatttttgaacaagattcaagttgacctatggcttctcctctcatgccatgggcttgtatacatacacacatgaggtggacactaaagcaagcctcctaccaaaaccagattaccacgagctgctatgtttagaagtgctaagctatttgtttggtgtggttgtacatgaagataggaaaggcttcttcccggcccccgcacccttcggttctttgcatggtcatttgtaattttgggctaaataagctccataacacacagcaaaatataatcaataaatgtctaagaatatagctagcaaaatccgttgtagtctagctggttgggatactcggctctcacccgagagacccgggttcgagtcccggcaacggaagttttttttcctagcactttcatttttacacatagatgtacacagaaaattgcattgggaaggcacaacaactcataggaccaggaaattttgatgcgcagtcacaattcacaattgtataccgtcaggacacagttttgagctcccagtttttcccagggttactccagagagcgataatttatgaaactactagtgagcaacaagtcgataaacatcaaatgttcttcctactttaggttcagcaatatataggatatataaaaggataggtttcggcttagccatgcttcgagaggatgctctctgcgacgctacgagcgatgggatgatagaattcatgcgcctctgagaagatcctatgggcaagcatcttctcctccccggagcatcgagccagcgagctgtagagcgggcgaaggtacttcatcctccccacttgcttcaagcatttctcaacctcgttgaagtagcatctgcagccggtgggaattgcaagctggagaaacgcgactttgacctcgtagtcacagctttctgatagcttgtaccgctcatcgagagcagtgacctgtataaggaacaatgaatggccatggaagcagttaagttaaagacatacaaatgtgttacacaccaagctcccacagtataccatgtaataacaaaaatggcaaatactgaccaccaacagtgttgattgaaaactacaaatgatcggctaatagccctgaacaactcccaagcataaatagctacagatttcctttcaacatcttatagtcagtagacagctttcaactttcatttgtactccaaagatgacagccacaaatgatagcccatctttcattgtagatgctcaatcaggaaaagcagcgatgtgttactaattagtgattaactgattattgagtccaaagatgattttcatgtatgtcaccatctcttctgacaaggcccatggttatcatatgaacactgaaatattgggttgcaaagtacactgaaatgtactagggctgtaaatgcaatactgatctgtacctgcagataggagaatgtccaaactactgctagtctgccccacccttctatgatggcaaaaagtgtccaccatgtccatataatgtccccctccgaacaagtgatgtttgagctagagactgattgactatgcgataaatccattcaatccatttcaaatccaactaataagcagaacctggttctagtatcgttcatgagtgaagcataatgcacttaagattatgactgcacacttttgccactttgtacagtgtaatttacatctgattcagggtccactttcctcggtaaacaaaagtctccagatttaatttttttttgtggccagcatttcttaaaaagcatgactatgacatgtaggggaattcataatttgacaatggatacaccatcattggtctcaggccagatgcacctaaccaaacttcatgcaacagaactaagatcatataaagactggtaaattaaacatggattatatgtccgtagaagtattgcttaatactattggcctgatccatatatgtaatagtataataataatataaagacaaaatcacagcagaatgtaaggatagtccttattttacaaacacatggaagcagaaaacccaaccatctaaactgatcagcacgggtgatgcaacattctgctatgcttgagatttgtgattgggtgaaatagcaaattgcaacctacaaatcactggtgctgaactaaaccatcaaagggaacagagaaaattcaatgtataagtctacatgacaggcaaccaatttcagtttcagcttagctgatctagaaaccacaaaaccagaactaaacagtgggtaagtaaaaatatgcagtaagcttatacgaacatggaacaaatcaacaattatagactggaggtatgaaaaagaagtgtgagaactgagaatagacgagaattcatacctgtgaagcttcaacatctgtgggtaagttttccaagtaaagttcccattcctgtccactccagtctgctacctcatcttcacttggaagttttccagacttaaactctgcagctagggagcaaatctttttataaatagctgactctggttccatggcatccggagggataccagtcccctcgatccacagttgaaggtcaatttggttttctattccaggtacattggttttcaggaattcaaggaatgtctctgtgtctatcgacttgaacttaaatgtggatatgtaattcttcaggaattcatcaaatgcaggtcgaccaatctaacaggggaaaaagaatgaaacatcacgacaagtcatgaaaaactcattgattttgattaaagaacgttgcaaaacagttgaaacaaatagtcgcaattttgcactcacctgacgctcaatgcgccaaaggaattggaagcctttctcatagggaacttctgagtacacatcatcagggtcaatccctgccatctttggcttcagcttagtatactccatgttatctttaaacctctccatcattctgttcaaaccccgccatccaattcccatgtttaaggctgcccgctcctccccttgcaccacctcaacaatcctccgctccgcatatgttgtgaaaccctgtgcgcgaaaacaatagtatggttacatgacagcaagagagttttagttgaacgcgtgtgcctcatttctaacagttgggacaaagaggatgtcaaactattataaaacacttttagctgaatgaaattgcaagtgaggtaatctgatgtaactgaaagttatatcgcttaaggcattcaccctaagtaatagttggcattgtagcttggtgccttttttttttctaattgatgttttatactaatccttgagacctttgaccatgcaaagtgtacccccagggtttatgcacaggttaacaggtagtagtgacagagttcgttccaaatcatttgttctaccctattgttaaattggcatgtgaatgcaaagtacatagacacaatttcaaatttcaccggctttaacaatcatctaagtacctaaaagcacatctagacgacaactagaacaaatggagggttcatcacttcacctcatttagccagaaatcttcattggtcttgttagtgatcaggttgccagtccagctgtgcgcgagctcatgcgccaccacttgcgccccagcagcgtcccccttgatcaccgtgggcgtgaggaacaccattctagggttctccatgccaccgtaggggaaactgggcggcaacaccagcagatcaaacctctcccactcatacggcccaaacagcgactccccaaccttgaccatctcctcgacgccggcgaactccctcgccgcctcgtcgagaaccttgtcccctccctcggcatacacccgcgtcctcgggccgaggtccctgaacccgatcccgcctgcggcgaacgcgaagaggtagggcggcacggactgctccatctggaactcctccacgatgcggcccggcgcgcaccacagcgcgtcgtcgcaggcgccccggtggtcggagggcaaggggtcgcggcgggaaacgtggcgcgcggcggcgaccgcggaaaactgggtggggacgtt

SEQ ID NO: 1774 - DNA, 1689 bp, Oryza sativa
aggactatttgctttggggttgacttatttcctgtgctgccatttcttgttatcaggaacaggactttcgcttgtgggcaaacaacgatgtatccgtggagtatcaaatttcagaagcaacactggatccacaaccgaaaatgattatgtaagttattcataacttcaaatcgttcagtgatctcctatgagaaatattaatactattagtacactacaaacttggaaattttctatgccgtttcttgtttctgaaacatatttgttgctacagatttgttcagactctagggtattcaattacagaaattctagtggcacttctacaagatgttctgccggtgaacaactgaaaaatggaatgggaagttgtcattcacagccttctgtgttggcagaattaatgcatcttgatacagcaaaggcagaaacttccttttcgagttcaagacggagcaaattctcttacaattggaaatcgcttcatggaagtagtactacctcaagttatggatcaccctgtcatcctatgttcaacctcagcaaacacagtactaatccgaagccacctccaccattaaagaactccgcacggatgagtaatttcagttatcaattggttagaagtgctgaaagtccaaagaatgcaaaatattccctatcagagaaaatgtcacacttactaaaaccacctaatagtagcagtcatcagaatggaaacttcactgttggtgctttaaagaggcgtcataatattgcacattttggaggagcaatcaacaagcttttgaaaaatgaggttcataagaaggccaccccatcagagggaagacattggcagactttattggataactcattaatccgacagaataaattgtactgttcagagccacgcaatgaagaatcaactgaacaatcatggagctctacagacagtgagtctgagaaggctgtgtgcttttcctccagtggcagcattgctgatttgcatgcatcggtttcaactgacaccagtgactcaagtgaccactctatgtcatcttcgtgcctatcagtaaatgatcgatggaagatgacttttaagaaggtaaatattggaaaatgttcttttagaagaactcttcaattgtgataacattcttgacaggaaaagtttagctagtattagtatttgtcttctctattcaaatagccatatttatttagcttttattattgctttccttcaaatctgctagttatgttgagcttctcaaatgttatgtgtcaggtacactgtgcccttgctgcaaatttagactctatgtatgtcactaaccacaaggagctagagcagccaagtccagtatctgttcttgaaattccagatgaggatttctctgtcactaaaagcatcaagctaggtacagaagatcctcttgatctgatactgttcacttcctatgttacactttccttttattgtagttaactttattttctacctctgtattgcagatctccatccagaaagtgaacttgttagatgtccatctgttgagagtacagctgaggtaggagaaattggaatcagtgattatgctttgggggtggatggactaaatgctagtctgaacggtgaagcaatacagcttgttgaagatatctttgaagaatttggagatgaaaagaaagataatttcttac

SEQ ID NO: 1775 - DNA, 792 bp, Oryza sativa
cgacggaggcaagccggcgaatgaagtcgtagacggcccaacagcggcggcataataggccagccgtgtaggcggaggcaccaatcggcggcgacggaggcaggccggcggtgaagtcgtagacgcccaacagcggcggcataatagaccagccgtgtaggcggaggcaccactcggcggcgacggaggcaagccgacggtgaagtcgtagacgcccaacagcggcggcataataggccagccgtgtaggcggaggcaccaatcggcggcgacggaggcaggccggcggtgaagtcgtagacgcccaacagcggcggcataataggccagccgtgtaggcggaggcaccactcggcggcgacggaggcaagccgacggtgaagtcgtagacgcccaacagcggcggcataataggccagccgtgtaggcggaggcaccaatcggcggcgacggaggcaggccggcggtgaagtcgtagacgcccaacagcggcggcataataggccagccgtgtaggcggaggcaccaatcggcggcgacggaggcaggccggcggtgaagtcgtagacgcccaacagcggcggcataataggccagccgtgtaggcggaggcaccaatcggcggcgacggaggcaggccggcggtgaagtcgtagacgcccaacagcggcggcttaataggccagccatgcagacggaagcaccagtcggcaagagtagtgccgcggcgttacatgcaaacagcagaaaataccaagagagattaatctgacatttagagatcatctaata

SEQ ID NO: 1776 - DNA, 652 bp, Oryza sativa
atttaaattgtcatggcaacccactatttcttttcgattataagtttcatgttctctttaagacagtcagcaacaggctcatatttaagttaatctgttgagttaacttgaggaaaccattttccaataatacatagctaatacaacaacgtttgccttctttacatgcagtgactgaaatacatggtcgcacttttggggtctggacacttttgacctgtactctgtgctttctgtgtgcattcaacctggaaaacagacctctctatctggccactttcctgtccttcatctatgctcttggtcatttcctcaccgagtacctgatataccatactatggctgtggcaaatctgagcactgttggcttcttcgcaggtaatgaatttagttttgactgtgttgtttgctcagttcagccttctacttagttatcatgcaactataatgtcaactgatgatatcagctcaaacattcaatagtcaataataacagtcaaacaccatgcttgtacatacaccaaataggttgatgtctctggtgcttaagtagtggaagatttgttcagtacagctagcggtttcttgtgcatgcttactctttaaaatcacttagcattcacctttataacagttatcttgccatctcttc

SEQ ID NO: 1777 - DNA, 16534 bp, Oryza sativa
ttgaaggagagaagccgatgcatgaatcttggcataggtccaatggtctaaaaatctgtaagattccattcccaaattttattcgaatgacatatagcaattctggatcacgttcgttttattgtatgttcttattattttccctgatacagtttagtagaagtatatatatagtagtaggttcatatgcatgaaatcatgggcagaagacgactcggtagttgctgttgccgttgcaggagcgcagcttggaatcgtcggaggggtactggtacgcgtccgggcagctcctctccctgcacgtcagcgtcacgccggagctgcaggagaagctcatggcgacgttgtacccgtcgatcaccgacaggttgtagaagtcccggttgccgccggacgtccccagcgtgaactccgccagcgtcagcggcggctgcccggacagcctgcacgacagcgcgccgccgcagtcgccggtggcgcacctgccgcggccggcgccgtcgaagctgcacccggtccggccccacaccctgccggagctggtcccggcgggcacgttgatggtccacgtctgccccgggttcagctgcgtgccgccgcccaccggcgtcgccgccggccacaccgtgaacgagcaacggttggtgatggtgaaggtcgccgcgttggcgccgccggcggcgaggctcgccaccaggaccacgacgaggagcactgcggaagaggcggccggagctgacgccattgttgcttgctttcttctaatctttgtgttaatttgtatagcttgttaattaagagagctaggaatcgatcatgcgtatttatagatgggcatggtgttgaaaaatctacgattttgtctgaatattgtactgtgttgcaaaatctagatgtggagagaaacttcaaacaagcacgactgatcgagtcgccgatcgatctatttattttatttttgcacaagaaagatgaactacatctccagcacacgtactagctaccattattgccataattaaatctcattggctgagattttgccatgcaatatgcttggatatccaatattgttgaatcatacaaacacgtacaactcaagtcatcagttatatgtttgctgaattttcagatcgatcgggtgcttgaaagatgaaagtcaatgcttatatgcgtgattctcgccggcagaactactgatgtgagggttaaaaatattgaatagctctacaaatgctgtagagaaatcaattttatcaggcctgcagttgattgatgaataattctaaatgcatgcatgtaatatatttatcatttatttgatttaattagctcctgcatctgctatatattggactctacaacttagtaaaagttatgtggctttttacaaaatcgcatctaaatttcatgagctttttagagcaaaatatttgctccggttttacgtataaccacaaaggtacgatgaagacaacaaattcatgcatactgcatgccgtaacctagagttatggttatacagactttcgctaactatgaatgaatatttacaaatatatagacttcaataattgttgggtttatatcttgtgttggtggtactttagtcatgcgtgcatcgttgtttctgttttgttctctgaggatagtttgtgccctttgttgagcgaattttttaaattaaaaattggctgtagctactttttagcaaaggccgggatttattccattattaaaaaaacttaattagttttgttatttgtcagtatatatattgttggtcaccacacatattatttttctttttttagtcaataacctatacgtaccttggaacaactcaagtagcacgtacttctgcatgcgaagagatagtagtaagctactagtacgtacaagcgtacaacaaaaatatgagttaaccttatttaattagctttgacgctgattattattttttcttttatattgtcagggacccaaaagttaatttttattttaagttaaatcacttatttttcacattgattaagatcaattaataattaaccatgcatgtataagccgtacattctgagctagcagctagttgtaactaaaaaaaatatgtacgagaaagaatttattttactgtagaaattagagaaggttggtcaatagtgtatatatggcggcgttgtgcatgagaaaatttcaattctgtagaatatatttatgggctcggcctaacagctggcagattatttttttccaacacgcaaaagattttatgtgttatatattaacatctagctgactgagaacggcaccatctctaatgcatatcgtcaagtacaataatgtgtatgcgatcgatcgatatgatctctcatctttatgcatacatgtgttgacgtcaaatatttttagttccagcaatatgatctgtccatattgtatatggttttgtttggatgatgtaggggatcggttgatatgagaatacaaacaggtaatagctctatctccattgaccggagtcaaggtagccattatatatcaatatctaacaagtacaatagtgaggaaaacttaatctagtctactaggctatcagtgttgtttacacccaaatttaacacctaggatcgaaataggaaaaattgccaaagtttgaagttatgccggtttcctccagagtgggctggttagaccgccggttgagggccggtcagaccggcggtgtgtggccggtcagaccggcagagtctgagtccgggtctgtttttgttggacctcgagttttcttactcgggaagacatgtttcgggtttcctttagattctatcccgagttggacgtagaggagggcctgtagagggcaagaccaacccctatataagggggtaaggccggctcattgtaacaactaatctacaatcaatcaatcgaatcgttattttacttttgcttctaattctagtttagtttatccatctttgtcgatttgcgccttaaatcgtctgccgccgctacgagagtgcgacacctttttgtaggtttgtcctaaaaaccttctgttttgcccacgagacgggtagttatttagaatcggctccgctagccggtttagttaccaaaacccatcttggtttagcttttgctagatttaggtggttggcaactctaggatcactgcaaggcgtttaggtgctgcgatcatgcttatcaacttgtcacaaaaagttgctaacaagtgtaaagctcgagcatatggtcgaaggatagctattgtctgcttcctcgagaagtaactcagcgagaatgaaggtagctctaggttccttttgacttctagcgggcttgggttgtcttgtcccctcttcttctacaagatcttgtatgtatacctctttgccctttgtccaagtatatattaactagggatgcgtcgtcgaacttagtacaatgtataaggtaacccatatatatttataactctaacatagacacacatatataattagtaatatatattggttcctacaggtgggtggattgaggataaactattggttcctacaggtttcgcacacacgaaaggagcacttacaatgttgggatggctagaactagccatccaatggtattaagataggagaacccaaatattttttttcaacccttcatttaatctaggtgaaatataagcaggttgagaggtcgaaactgggtctgctgggtgaaagcaatcaacccataccaaccgagttaggcacggttctcaaaggagcgcttactgtgagagaggtagggaagaaggacgattgtgcttttaagtactagagaaattcctccattctaaatagtgtttaattacaaattgtctgtcatccctgtctgaatttggggaagctggattcaaattcatacgtgtgaatatacctaggacctagttcaaatttgaaataaaacgcttcactgatgagaacatgattaatttgcaagagggaaatacagtacatacgcgtatatggatctgcaaaattagatagaaatgaaaagcccagcccacaaaggaagcgagatcacaatttctgggccgtcccagaaaggcaagtgtatcggccgataaacgaggcccatcaatcaatctgaccaattcagtcaagtcccaattcccaaataaattttcattcgacagtgtgatacgtataggagtatagaagatcgaatacatgaccgtatatatatactcctacgtaggaaccaagcgtatacgtacatgcatggccttcttccaaatgcagcaaccgtacgtggaaaatcgtctagtcgtggaaaccatggccgtcgatcgtccctcctcctataaataccttagccatggcgccacccattgccacattgcaagcagcagctagctagcagaagaagcaaccatggccaatactcgcgtcttcgtcctcctcctcctcgccgtcgccgtcgccgtcgtctacagcgccgacgcggcgaccatcacggtggtgaaccgctgccgctacacggtgtggccgggcgcgctgcccggcggcggcgtgcggctcgacccaggcaagtcgtggacgctcaacgtcgccgccggcaccaaggccgccaggatctggccccgcaccggctgcgacttcgacggcgccggccgcggccgctgcctcaccggcgactgccgcaacgcgctctcctgcgccgtctccggcgcgccgccgaccacgctggccgagtacacgctcggcaccccgggcgccgccggcggcgacgccaccgactacttcgacctgtcactgatcgacgggttcaacgtgccgatgagcttccagccgacgagcaacgcggcgcggtgcggcgcccggcggcgcgggccgagctgcggcgtggacatcacggcgcagtgcctccccgagctgaaggtggccggaggctgcgacagcgcgtgcggcaagttcggcggcgacgcctactgctgccgggggaagtacgagcacgagtgcccgccgacgaaatactccaagttcttcaaggacaagtgccccgacgcgtacagctacgccaaggatgatcggagcagcactttcacctgccctgccggaacaaattaccagatcgtcatgtgcccttaattaataattaagctaatataagatgtgataataaggggtagtgatcttgtgtgttgatcactaccattaccatgcatgcgtgcatgcgtacgtgttgttcaatatataataaatgaataaaaactcttatcttcaattctgatgaaaaaaaaaaagtgagtcgggttgccattagaaaaccagctccatgcatgcatgcctgcgtcgtactacgtccatatttatgtacgacgccgttaacttttttgtctaatatttgaccattcgtcttattcaaaatatttatgtaattattatttattttattatcatttattttattatgacttgattcgtcatcaaatgttctttaagtatggcataaatatttttatatttgcacaaaaattttgaataaaacgaatggtcaagcgttggtcgaaaagtcaacggcgtcatacattaaaatacaaagagagtatttgttttctgcgaagaaatcacaccaaaatatgtttctatgattttcttgggtgatgtggactttgaagctcccttttcttgcttgcaatatatataggagttgatgatgatatatcatcatatatgggattacctatagtataccatttgatagaaaattccttcacaatattttaatgtaattatattgtaattgaaatataactatcatggtgaaagggcctgacggagctcgtggcccctcaccgggagactgcgcaagcccccctttgccggttcgaccaggggcttagggtgcaatcccaagctctctctctctccctccgtgcccccggctggtggtgttggctgtagagcctttgtggcgagtcttcggaatgtccgttggccctcgtggcccctcaccgggagactgcgcaagcccccctttgccggttcgaccaggggcttagggtgcaatcccaagctctctctctctctgtatgtggaaagatcacccgcccgcaagacacacgagacacggcgatgtatacaggttcgggccgctgcgaagcgtaataccctactcctgtgtttttgtggatttgtgtatggacaagttacaaaagattaacttcctttcccctccgccttccaaaagggccatatatttattctaaatatttagtctgagcgcttatattatttacggattgcgtctgcttaggtagggggcacagaagccgagtgcgccctctggtcatgatactcccggtcccatatcaccgacagtagcccccggcgttatgccagagcaatttcccttccccagggaagcggtcaggtgtgacgccacctctaaagcctggtgacaggtgggaccggtttccgtagttgggcaaaatacccaacggtctcaaatcacgcacattggtaatggtgactttgctgtccataatgggcggtctcttcaagactgccatatcacttgagcggcgtacgaatctgggtgagccgatttgcttcgcctggagatatggtgatggcgcttttttcggagccatcagaatagcgtatagcatcttctgggcctgagggtatcgggttttggcgtcccggagggcctcgctaacaaagtagacgggccgctgcacctttcggcggggccgatcctcttcgctagaggccgcatctccagggcgctcttcatccgagaggcagcgcggggcgcactcggcttctgtgccgacgacctcggggttagagggcgacaggcgcggccttcccgcagtggcctcggggccatcctgggggtcgggggcgcctggcaccgtcgggcaagcaagcggagggccagctccggccgtcgggggccttgggccgccgttcggctcgggggcctctcctccctgctctctcttcgggcagaatcctcggctcgcgttcgccctcaactccgacgaggaggacgatgacggcggagtgggcgacagtggcgacgaggccggcgacccgggtgcatcggagtgagcccccaggcctccgccaatcttaatagcttttccttcttcttccgaggccttcgggcccccttcttgttatagactgatttaatctgcaatcaaataaagaggaaatttttgtgtcaatttcatttgttctgtgtatgagacgaggatgtctgtgccgcgatccttttgtgtcttggcttgaacaagggctcgtgcccaggtcctagtcctcaaatggctcgggtcggggctagtgcctggggagatccacatgtcgagactggccaggccgggagcgtggtgaccgagggttatgggtgacccgattgtgggtttttgccgattcccccccggagttcaccacgtcccggggcacggctcggttctgggccccttttggcgattttagccgacccgagcccccgagggtaggattgagcacgagtgacctatttcaagtcaagattcttcaaaaggaaacaaaagcacagacacagcctttaggaaatcgaaaaatgcttttattgaaatacggaagagaaaaaagataagcccccggccaaccctgcacgcccggggggggtgcggagttggcccgagcccaagacctgacacccgacccccactaggggtagaagcgacgaaggtgttcgatgttccacgggttaggcagctctgtgccgtcgcccgtggccagccgtatggagcccggccgggggacgccgatcactcgatacggaccctcccacattggtgagagcttgctcaatccagcacgcgtttggacgcggcgtaggacgaggtcgtcgacgcagagtgatcgggcccggacgtggcgctgatggtagcgccgcaggctctgctggtagcgcgcagctcggagggccgcgcgccgccttcgctcttccaagtagtcgaggtcagggagcgccggcctccttctttttgtcgctcgcaggcctcccctttcgggtggccagcgaagcgccttcgacagcgaggacatgaccctcgtcgtcggaatgggctgacctcttcttcctcctcctgtcacgccgccctgtctgagcggcggatccgggggcggccgaagctgccactccggaaccggaggggttccaggtccaggcctcctccttgcgagccactcggtccgcgagctgaaaaagctctgcggtagtctggggctctttggaggcgatcttttcgagcatgcggttgtgccgcacaccccccctgaacgcgtagatcaccgcgtgtgcagggatgcaaggtatagtattgcggacttggcagaaacgctgaatgtacgagcgaagggattcatcatcccctcgctgtactgcgtgcaagtccgcttcttcacctgggcgtggataggtgccttgaaagttcatggtgaactgctggcacagatcctcccaggagtggaccgacgcgggtggcaggttcattagccaaccccgcgcctgtcccttcagggccatgggaaagaaattcgccatgaccctgtcgtctcccccagcggcctcgatcccggtcgtatagacctggagaaactcggtggggttgacgctcccatcatacttctcggtgatggtgggccggaaccttgggggccaacggacattccgaagactcgccacaaaggctctacagccaacaccaccaaccgggggcacggagggctggtcctcacgtccatgtcgaggtgacaccctggacgaagaggcaccctccgttgcgcggggagcacgccgatcactacgtcggcgctcgatgtcgaggcgggcatccggctcttcatgctgatcctcccgagtcggaggcgccgacgaaggagtggtagccgaatggcgtgcagcagccgccgctcgccgcgccctccgccttgatgacacagagccggaggtggcggcgccgaaggtcttggtggtggcggaccgtccaccagcacccaggcgctgctgtgccgtcatgaccaagttggccacgtcgtccagccatcgctgggctggagactccgggtcagggacgacaggcgggtgacgtaggagcgcgccaacagcctgaagcgcgccttgaggcgtgctgccgtcgccgtagacgaggaggcgacgctccccatctcgccgttctcctgcaccacccgcgactggcgatgctgcggatttttcgactctctcgagcgcctccccccgcttgggactttggcgtggaggaggtgggggagtacgagctcgacggcgcgggtttggctccccgtcgtcgccactcacactcggagagaggtcgtgcgcctttgcttgctcggccattaggctgaacaagggaatcttggcgcacacggaagagtatgagagctcagaaaacacacgctgagccccctacctggcgcgccagatgacggagctcgtggcccctcaccgggagactgcgcaagcccccctttgccggttcgaccaggggcttagggtgcaatcccaagctctctctctctctctgtatgtggaaagatcacccgcccgcaagacacacgagacacggcgatgtatacaggttcgggccgctgcgaagcgtaataccctactcctgtgtttttgtggatttgtgtatggacaagttacaaaagattaacttcctttcccctcagccttccaaaagggaaaagtcccctctctaaatgggcaaggtcctccttttatatctcaaggggataccacatgcacctttctctttccaaactggactgttctttttctctttaatgggcggagatcggtacggtttccatccgggagcccttctgatgggacagcccacacctacccccacctcccccgaagacagagatgacgcgggaccgtggctgtctgtcgatgtcgcgaccagtgccagaccggtcattcttgtccaccacgcgtcagcttaacaacgtgcatgtttgcccttcttcgtgtaacaccttgcctgtaatggttaggatgaagcctggtataaatctgaccagggctaacgtgccatctctaagagataacacgctagctccggcttgagacgagtgcctagaggctttcgtcttgacgggatggggcaaggcgtgcgtcagaccgccagtcgccacctaacccgtgatctgaccggtctgtgactggtcacagaccggataaaggaacgcgctgtactgcgttgcatgcagcgtgacatgcttgaccagactgcaataaatgctgttaggtgagcacagctgtgctcacttatcccatatatgtggcgcagacttccttaaggggtcggggtgcctcggccctcggggccggggcaagcgcaacccgaccccccctcgggggaaatcaggaggagggcggacacctcaccctcgggcccgacgtccccgaaggtgccaggccacgtgggcgattgcgtctgcctcaagcctctggtcatgatactcccggtcccatatcaccgacagggcctatagcgtagtggttacaagagcctcagtagtatcttaggtcagggttccactccctatggaagcaaattttataggatttaacggctttatgctttcagtggtagacgacgtacccatcaacagcgaggcgcaatctccaagatggatttgctggctcagtcttcaaagacactcacagggtgagtgtctgcgttgtactatgtaattctaagaataaagaaaatatagacatgatggtggccgtacatgctaagctaagttacttcctccgtcccctaatatgataaagtaagtcacaaataaaataaataataattttaatttttttaataagatgagtgatcaaacaaaatgttaaaatttcttgtattatgttggggtgcatgcgcttgactcatgcgtagtacgtacgtgtgtgttaagttgtccggaagagagaggagaattccaacgtttttctccacctacacgtactaaagcttcttccagtatctagacgatcgatggaattcataccatatgcgaccgacgatccatgcataactctacaactcgacacgtacgtacgccttccaaattttcggcgaaatgcacaactacaactcgacacgtacgcacgccttccaaattttcggcgaaatgcaccagctatagctagctagctgcttggccggtccttatttttcttggtgttgtagaagataagggagaccagttgaaaatttgtaagccgaactaactaacgtgtactctccctctataccccaaaaaaataattcctaaagataaatctagataaggagttcagtgcactggtggagaaaccatctttcgtcggtcggccgatttccacaatagtcccggatgcaataaaaaccggggctaaagatgatctttagtcccggttcaaaagggtaacgggcatatttgatctttagtaccggtttgtgttaccaaccggaaagctgtcagggcctgtcaggcccctccgggatctttagtcccgattggtaacaccaaccgggactaaagatcgtaacttaccaaccgggactaaagatcccggtgatctttagccccggttggtgctaccaaccgggactaaagtcccacccctatatatatgtcttcttcctcctccagctgcccgagtaagcttcaaaatttcttcaaaaaagaggggaggtcatgccaaaatttctattgaatttattttggtgattaattacatacaaatcggaggtgcctaaaaggtttgcaacttcatcctccaatgttttttttttgtcatactacatttgcacctatgttttgcacactttttttgtctccaaaatttagttgtaagttgatgagagagaaaatgtgtgtggggaagaaagaatatatagaaatttagttcatttgctaaacaaggttttataaaatagttgagaaggaaaactctagtgaaagttaatctgaaataatagaaaacaaactaaaatgaaaattaaaagaagtaaaacacattaaaattagtttaaaactttacaaatagtttttaagaattatttggtgtaatattttatgatttttgtatgaataaagatatcttataattattgtatgactgtcattattgtaagaataattatttgtgtacggtttttttgactcatgtagatggatcggcaatggatgtacgctgaccggcggtccaaagagtttattgacggcgtgcactattttttgagagtggccgaagctaacaggcaaaggggttttatttgttgtccatgcaataagtgtaagaatcagaaggagtattctgcatccaggactattcatttccacttgtttgagtcggggttcatgccaagctataattgttggacatcccacggagagcaaggtgttgaaatggaagaagatgaagtggaagacgacaatattccggactttgctcagtatgttggatttgaaggaaatcaaacgggcgaggaggaaatagctgctgatggtaacgacgttgcggatgaacttggtcagatgttgcaggacgccagggaggactgcgaaagtgaaaaggaggcccataaattggacaagatgttggaggaccacagaacttcgttgtacccaggttgcgagcaggggcacaaaaagttggataccactctggagttgttgtaatggaaggcaaaaaatggggttagtgacaaggcatttggcgatttattgaaactcgtcaagaacattcttccggggggaaacaaattgcccgagacaacgtacgaggctaagaagatagtctgcccgttaggactggaagttcataagattcacgcatgtccgaacgattgtatcctatatcgcggtgaggagtatgagaacctagatgcatgccctgtttgcaaagcactacgatacaagattagacgggacgatccaggagaagttgacgggcagctaacaaagaagagaattcctgctaaggtgatgtggtatttccctataataccacggctaaggcgtttgttcaggaacaaggggaatgctagaatgttgcgatggcacgctgaagagcgtcaacaggacgggatgctgagacaccccgccgatggttcgcagtggcgaaacatcgacagaaaatttaaagaatttggaaaggacgcacgaaacatacggtttggtttgagtacggatggcatgaatccttttggagagatgagcagcggccatagcacttggcccgttacgatgtgtatctacaacctccccccccctggctatgcatgaagaggaagtacataatgatgccgattattattcaaggccccaagcaacctggtaacgacatcgacgtgtacctaagaccactggtagaagatcttaaacagttgtggacgaagtaaggtgtccccgtgtgggacgaggacaaacaggaggagtttaacctacgagcgctgctgttcgtaaccatcaacgattggcctgcacttagcaacctatccggacaatccaacaaggggtacaaggcttgcactcactgtatggatgaaacagaaagtacgtatcttaagcactgtaggaaggttgtatacatgggtcatcgtcgattccttgcagcaaaccacccggtacagaagaaaggcaagcacttcgaacataaggccgaccaccgtatgaagcctaaacatcgcagcgggaaaacagtgtttgctatggttaaatatcttaaagtagtgttcggaaaggggcctggaagccagcatatagagagcgaagatggtcacgcggcgatgtggaaaaagaactctatattttgggagttaccatattgggaattcttggacgtacgccacgcaatcgacgtgatgcacctcactaagaacctttgcgtaaaccttcttggcttcctaggtgtatacggaaagtcgaaagatacactggaagcacgtaatgatctgaagcatatggaacaacgcggcgaccttcacccggaaccaaaggagaaaggaagccattacttgagtccagccagctacactcttagcaaggcagagaaggaaagtatgtttgaatgcttggagagcataaaggtaccgtctggatactccacgaatattaagcgaataataagcacgaaggagaagaagttcacaaacctaaagtctcatgactgtcacgtgttgatgacacaactgctaccagttgtaataaggggtatccttccagacaatgtccgggcaacaataacaaagctatgtgcattcatgaacgcaatttcgcagaaggtcatcgatccggatagattagaagcccttcagaatgaagtggtgcaatgtctcgtcagttttgagttgatatttcaaccttcattttttaatataatgacgcatttgctatgtcaccttgtgaaagagatccgtattctcgggcctatgtacctacacaacatgtttcctttcgagaggtacatgggcgttctgaagaagtatgttcgtaaccgtgctcgtccagaggcaagcatcgccaagggttatggaacagaggaggtcatcgaattttgcgtagaatttatcgaagaccttcgcccaatcgggctacctgaatcacgccatgaagggagactacggggaaagggaactctcggaaggaaagcaataatgacggtagacaacaatttattccgtaaagcccatttcactgttctgcaacactcttcattggtagctccttacatcgaggagcacttggctctagttcgcgccaggaacatcggtaagtccgatgcatggattacacggcatcacattgatactttccccgcgtggctacgacaacatctcatgggtaacgagtcgatcaaccaacaacttgccttcctggcgaggggaccgtctgggtcgatcacgacattccagggatatgagatcaatgggtacacattctacacaagagcccaagacatgaagagcacgaaccaaaacagcgctgttcgtgtcgatgccatgggacacgatggaacaactgccacgtattacggtgccatcgaggacatatgggaacttgactacggtcctctcaaggttcctctgttccggtgccaatgggttaggttgactggtggaggcataatgattgatgacagtgggatgacaactgttgaacttaacaaggttggatactcggacgaaccttttgtccttgccaatgatgtaacgcaagtctttttcgtgaaggacatgtctagcaaaggaaagaagggcagagggcctgatgagcctaagcgtcaagtggttctcccaggcaaaagaaaaatcgtcggagttgaggacaagactgacgaggattacgatcagttggatgggcaaccccctttcacggtgacgattgaccctagcatcctcctatcaaatgaagacaccccttactcacgcagcgatcacaaggagggaacaatagtgaggagaaagtacgtgcggtcaaccgtcaccgccgatgtaatgccgtaattattgtgtacacgatgtaaactattttggatgcattgattatccatataaatcaattgatgtatggcatatgttaattacgcacgattattagaggtttcaacaaatttaaatcatgtatatgctagttatatgtgatacttacaatttttaaaagttttaaatcacacaggtggcaatttcatatgtatgttaattagagtttttaacatttaatttactagcattcatatgctaattataattgactagaggatttttaaaagttttaaatcacgcaagtggcaatttcatatgttaattagagtttttaacatttaatttactatcattcatatgcaaattataattgactggagaatttttaaaagtattaaatttaatatatttttaaaactatcattcatatattagagtttttcacaatttaatttactatctttcatatgctacttatatatgactattcgaatttttaaaacgtttaaatcatgcatgtggcatttacatatgttaattagagtttttagcatttaatttaatataattcctacgctaagtatatatgatgattacaatttttattaattttaaatcatgcagtatgtacatacatatcttaattagagtttttaccaatataataatatcattcatatatatgctaagtatatatatatattggaatttttattaattataagtcatatatttgcttattacgatttatccacttaatttattacagacaaaaataatttttcgaagtaattgtcatcaatctttgtactttaaataatgttaatgcattaacttctattttataaacacatatgtaagcgaaaatcatatgcagtgctataatctttagtcccggttcttaaccctaaccgggtttaaaaagaatttcgaaatagcgggaaaagatatttactcccggttggtgagaacaaccgggac

SEQ ID NO: 1778 - DNA, 5948 bp, Oryza sativa
tcaacaaccgggactaaagatatctttagtcccggttgttgagaacaaccgggagtaaagatccgggggtatatatattcccggtgcgccctcgtcttcttcaccaacacttagacgttttcggccgatcgatctctctcggcctctctccttcgccgccactgcctagggcaaatccccgcgccgacgccgccgtatctcgccgtcgtctcgagctcgtcgtcctcgccgccgcctccgcctcctccgctgccgccgcatctctggggtgagagccgccgccgccagatctcccttcatgcatctcgatctctccgatatcgatctctctccgtcgcgccgcccgccacgagacgccgcgccacgacgacgacgcgccacgccgccgccttcgccgccgccgcatgccaacgccacgccgccgccgccttcgccgccgcatatgcaatgccgccgccgccacgccacgccgccgccacggccccgcaacgccacgccgccgccgccgtcgccacgccgccgccgccgccgccacgccgccgcgcccaccgccgccccgatgccgccacaccgcccgttaacgaacgagaacgagaacgatcgaacgaacgagagcgagaacgaacacgtcaacgtacgttgccgcgagaacgtgaacgagaacgagaacgatcgaacgaacgagagcgagaacgagaacgatcgatcgaagacaagcgagaacgagggaacgaacgtgaatgagaacaagcgaacgaacgtgaatgagaacgagcgaaggaacgtgaacgagctagggaacgtgaacgagcgaacgaacgaggacgaacgttaacgtgaaatgcaatatatatatatatatatatatatatatatatatatatatatgttacttcgcatttatcctaatacatatttttgtatcttgcagaaaagacgtgttgtcggagtcgtccgtcaagcctgagtggaagagctagccctagaaggaattggagcaggcaagtgacgtaataatataaatgattgttatatttgtaatgcaattaattaagattattagacctgtaattggacttatcatataagattgtgtagtgttctaatattatttgagttttaatataagattactttatttgtaattagacttagtatgtataattattgactacggaattggtgcgacaagtagcaattgactattgtagtcttaattagacttagcatatacgcacgaaacacttagcatagatgactattttagtcttagcatgtaatattatttgagttttaatataagattactttatttgtaattagacttagtatgtaattattgactacggaattggtgcgacaagtagcaattgactattgtagtcttaattagacttagcatatacgcacgaaacacttagcatatacatgactattttagtcttagcatgtaatattatttgagttttaatataagattactttatttgtaattagacttagtatgtaattattgactacggaattggtgcgacaagtagcaattgactattgtagtcttaattagacttagcatatacgcacgaaacacttagcatatacatgactattgtagtcttagcatgtaatattatttgagttttaatataagattattttatttgtaattagacttagtatagggttgtataatatacgtcacctagacttagcttatatcacgatttataattagacttagcacgtaaggttgtgtagggttctaatgtacgacatttacacttagcatacatgacttagattgttaaaacataaatgtctcgtgacttagcagatgtttcttgtatcaacagatggctgaccgcgatgaggaacagatattgtacgatagaatcgcggagggaagcagccagtactggaatgaagaagaggggaacgaggatccaaaccagtacttgaacgaggaaggaaacgtggagagggatgcggaggggaaccagcaggggcacgtggaaagggatgtggaggggaaccaggaggaggaggctagtggtagtcaaccctccgttggacagaagagggcacgcgggcaacgaggtgcagcgaagaagcttgagggtcggcacatcataacggaagtgcaagaagatggacgtcctagtgccccggccgaagccgccaagaactatgtacgtcacagcggttgggttgtgcgggataacgtgcctgtcagtacggtgtactggcgaagaacaagggcacgcggagatcatgagagctttgtcccagattcggagaaagagatgctgtggaccacaatgctcgagacattcacccttcctgcgggtacagaggacaaagtgaaaaggtggactctgaagaaaatggcagaacagtttcagagcttcaagggagatctgtaccagaagtatatactgaaggggcagacaccgaacttcgacacattcccaaagctaagggatcactgggacgagttcgttgcatataagacaggtgaacaagggcaggcgatgatggaaagaaacaaagaaaatgccgtcaagaagaagtaccatcaccacttggggtcaggaggctatagcgtcgcgatgccgaagtgggagcagatggaggctagcttgattgagaggggtatcgaaccggcaacagccaattggccgaaacgatcgaagttctggtactatgctcacggtggaacgctcaacccagctgatggctcactggtcttcggcgatcagatatgagaggctgcgtgatgactaacagatgcagtggaagcctcctctcagggcacgttccgagcagacaaagatagggacgagctgacactcgccctgcagactccagagcatccaggacgaacacgagggaaaggggtgattccttggaagattgatttcaaggaggacatccacacgtataggagtcggatgaggagcaagagagataccgaggcgaagattgcagacctagagtttcgggtatcgagctacgaactcaacatgcaagaggaggtggcaaggaaggttgatgaacgcatggccgcacatcggtcccatgatccccagccgaccattcctcctacaatggtgagcccgtcaggaaaccgtagcagctgcgcctcaacggggcaggtaggatcacagagcatggacgccatgcaaacacaggacgaatcgacctgtcccgttgatgacatcactcagcggacaccatgtgagctgcatattcctttcaagaacttatcaataaaggtaagatttagccattccgctagttgctgcttatatatgttgattactaataaataatctctcacaacatgaaggtggcgtcgggcatggccatcccaacggacccttcaggtatttaccactgcaggccgattccagcaggatactcgaaggtcgaagttgagttggtcgaaggcgcgtacgaggacctcgagctggattaccctggaggagacggtgagacgcatctacgagacacaagccatgccattattctatggcgcaggcggtacatcatcctccctgggcgacaagcggcgtctcgtgcaccatctcctccggctccgccatctcctcctcaggatcctgcaccgtctcctcctcatgctccgccagcaccgtctccacctcaggctccagcatcgactcctcctgaggatcctgcaccgactcctcctcgtgctcttacacctactcccccgcaagctcctcttccggcaccttcaaagtcaagggcccccccagctccaccgcctgcccacacaagggcaacgaagaaggcgaaagttgacgccgccaagaacaaggacccggggtacgattgcacgcaagaggagcttgacgcttacgttgcatcagaagtcaagagacaattcaagcctcgaagtccagaaaagaagattcctatagaccccagtgtcaggaacttcttcaggggtatgtctgcacatgccaaggaggccattaagctatcggactatgagcgaacgctgaagaaagcatcttctggaaagtccaaaccagtccctcagcttggagagcaaccaaaccaggagatcgagccgttggtggccggtaaagaaatgacgatagaacaatttattactgacaccggtctaactacggatcaattgctaggagtcgcaccaatcgaaaaggcggaagtgaaatacatgtacgaactcggtaaaccgcttgtcaagcctgagctgctgcagtccctacccacacaaatgtacaagttccatcagctgtacatggagatgagcgccaccggtagagagatgatcggagcgaggatcagggacacggacttcttgcaaggagatgacattctctggatcaatttcaggggaatctacaaactataccagctggacgccctcgacgtctctattatgagttgctggattttgtaagtatatcgttcagttagatttcttactatacgtctcctttaattaattaggtccttgtatataagtagactatagaaaataatatactcccttttatcgttgtagaatggagattcaaagggcccgacggcggagggttttcgatactggattcatcgaccctcggaaagtaaacgtcgcaatgctcgaccaatatccacacgaaacagaggacaatctcgtccatctcctgaaggtgcagcattacaagacgttcatactgttgccatacaacacagagttagtttaattttactgtcttcctacataccaaatttcattcccgtacgaacttgctaagtgtttcatatgtaatgcatcccacgcacattgcagattccactgggtgcttttactcttcgacctggaggcttgcaccatcaacgtatatgactcaatggataaaaaagagtctacgtttgacaaggttttcgaacttatagacaggtaccgtcataagttcctttgttaattaagaaaatcttgttatgttaattgctactacgaatcatagctttaaactccatgtagggcttggtatcggttccgtcatttggtccgcggcaaatggagagaaagacttaggcggaagttcaaatttcctgtgagtacacatgctctacatttatatttctccgattcaaatacatacaagtgtatattaattagatctctcgttgtttgtcatttatttgtagtgcgcaaagcaaaagcagggaactaacttgtgcggctattacgtgtgcgagtattgccactgccttgcaaaccaaatcatcaccacaagagagctcgatgtacgtacaaataaattcaaaatttcattacgtagcgatttcttgtttaattactaatcaatttgatacattcatatagtttattcgcatgagggataacctgaccacacacaaggaatttatcacggcggttcaagaacaactcatgggattcatcaacgaagaaatccttgatcccaagggtgaattctactacgacagaaacacaattcaccggtccttagcttctgagctagcagcgagtactactacgtcgaaatcgtagctagctaggacatataatggattgtaattaatacatgactacatatgtttctatatgcatgtgtacacattttctataatgtaaatatattttggtcatatatatatctatatacatatgcatttgcataacatatatatgtataaatacatatatattatgcatgtatatacatataatataatataatataatataatatatatatatatatatatatatatatatatatatatatatatatatatatatatatacatatatatatatatatatatatatatacatatatatatgtatgcatatatatgtattgaaacatatatatgcatggtttatatatatatatatatatatatatatatatatatatatatatatatatatataaacc

SEQ ID NO: 1779 - DNA, 9235 bp, Oryza sativa
ataagagtagcaactagtatcaattaaggccgagtttagtttcaaactttttcttcaaacttccagtttttctatcacatcaaaacttttctacggctgtgtttagttcagcgcaaagtttagattttggttaaaattgaagatgatgtgactgaaaagttgtgtgtgtatgacaggttgatgtgatggaaaaggattgaagtttggatccaaactttggatctaaacacagcctacacacataaactttcaacttttccgtcacatcattccaatttcaatcaaacttttaattttagcgtgaactaaacacaccctaagatagtagagatggattctgatctagctttagttatcctagctcagcgaatccaaagataaaacagaaacagggaaaaggtaaagaaaatctaaaaatttgtgtgtacgtgtgtttttgtctgatgtgtgtcctgctttggccaagaggaaacacgcggctcacaatcatccaaatgttaagatcgatacacaaacaaaattaaaataagcagaaaaatgtatgcacatcaggagctcgtgaattgattgatcaataaatcaactaaaagatgaaagtacagacagttgtaaaaaatgacaggaggacaatgacatctatcactccaaaaatcattcaaacctgacatatacattgagaagaaaaaagaacagcatacaaatagtatcgacctaagatttttgtgaattgctatatgaatgctgtcaaacttttaaatactttttataactatttcgaacaacaggaacgtctcctaaagaatcaaaacagtttccccctaaaaacacgaggatatatactccctccgtttcacaatgtaagtcattctagcatttcccacattaacatcaatatggatatgggaaatgctagaatgacctataaattgtgaaacggaggaagtaacaactagttgtggcatacgttccttgtcttctcacgtactcccttcgtccaaaaaaacccaacctagtattaaatgggacattttctagtataacgaatcgggacaagcttctgtccagatttattttattagaaagcattccattcaatcttagattggttttttttaaggagggagtactcgcgagtgtgtccgctagcaatcaccatcaccactgcactaaaggcggcatacacatcacatctaaacacatcaataatttaattttattattccctaaaaaaaatgtgggcaaactgtgacacgtagagtaatgtaccaccacaccaccaaagcttccttcctagcttcccaggtgtatatcgtgtattgtattgtgatcaaaagtaaacacttaattaattatgtcagtttcaatttcatttgacactcatataagcagatagctaggtggttattcaagtgatcggcgttaattgtacacgttgatatcgatcttgatcgataatgattgttccacctaatcaattgattaaagtctcgatcgatagttttttttggctttaagtcgacgcgcgcgtcgctatttagcttcgtacatactactgcgtccgtttttggataaataacgacagttgatcttttgaagtatagttggttatttgttttattttttttctaaaaatatgtaattctaataatttgttgtgagttgttttattgaaaacgttaaggctgagttcgcactccctcttcccaacccaactctctcattttccacgcacacgctttccaaattactaaacgacatgtttttttaaaaaaatttctatacaaaagttgctttaaaaatcatattatccattttttaaaaaaattaactaatacttaattaatcacgtgttaaaaaacctctccgttttgcgtgcagaagggatgggttcccgtcctccactcccaaacacaccctaagtatgacttttgtgagcttatgtatttgaaaaaaatgataaaattaacgatgtcatctattacaaaatgcagaatactgcttgtcgacttttgatgtcgcgattccggtatttgcatagtatggggatcgttggtactaggatatatgcgagactgaggtaaaagagatggagacaaggatttttatacaggttcaggcccctgaattgtcaggtaataaccctacatcctgttggccgaagccggtcgttgctcttattcatcataatcacaccagtacaatatttggggtagcctagctaactgttgtcgacatgacaatctaaagttctgactcatagtcgacaatagggtagtcttcctcctcgggtctgtgcccggcgagatcagatatagcgctttcgtctctcctgacagtatccggagacaccataggggactagccgtgcttatccctgaagtcgatatccggcatcttcttgacgtatattggcttgtatgttgatcttctatctcgacctattgttccgtgtatgttgattgtgggtgtccttttcctcatagggggtcttgtatttatacccatagatgtccccttgtccaagtagaactagggaaactaatatggatacaatccgagtagtccttgtcgtttctatgtagaactctattcatccttccttatgcggaactcctcctatatccgaaggttgtttccgtataagacatgatatgtggtgggtcctgccgagatttagtcgactactattaggtatgtggtattcataaccctgacactgctaatagtacatgttgagaggtgggtttgaccagttctgcttcaattcgcgtgaactcatccaatctgcatgccggtttttgcatcttttgtatggagatgcaaatataaactgtggtggtgtttgaatctcatgaagattaagattaagtgttttacgcaaaacgaggtagtaataacgtgtgattaattgagttttaattattacaaacttaaaaaatggattaatctaatattttagaacaactttcatatagaaaattttcgcacgaaatgcaccgtttagcactttgaaaagcgtgctactttaatccaaaatttcatccactcttcactcttttaagtggattcaaacggggccatgtatctaggctgtttggattagggactaaaattttagttcctgtcagatcggatatttgaatactaattaaaagtattaaatatagactaatgataaagccattctaaaaccttagattaatttgcaagacgaatctactgagcataattaatttataattagcatatgtgataatatggaaaacatgtgctaattatagattaattaggctaaaaaaatatctcgtgagttatttatacaattaactttattattaatctatatttaatatttataattaatgtttaaacatccgatattacaggaacattcagactaataatactccatgctccctccgtcctacctcttggttcaacgaatctgtacacgatacgatacattcggacggtgagggaggcgagtggagtgcgtgtcgacgtgtcctactcatccacgccacgtaaccaattccatctccggccgccgccgatggcctcgcgctcccggtggtcggcgctggcggcgagcgcgctcatccagtgcttcgcggggagctcctactgcttcgccgtctactccccggcgctcaaggcctcccagtcctacgaccagtccgccctcgacaaggtcgccttcttcaaggacgtcggcgccaacgccggcatcctctccggcctcctcgccgcatgggcccccgccggccgccgccgcccctggctcgtcctcctcgccggcgccgccctctgcgccgtcggctacctccccatctggctcgccgtcacgggggtcgccccggcgccgctccctctcctctgcctctacatgctgctcgccgcgcaggcgcagaccttcctcaacaccgccgatgtcgtcaccgccgtcgagaatttccccgatcgacgaggcaccgtcatcggcatcatgaaggtcaattatccattcccctaatccatcctctctctctctctctctccagatacaacctctctcatcatttctttaattaattcggttctttctaattaggcttataataaaaaggatcaaaataaatgaatagtactccagtaggcaaaagccaaaagcatacagattattattgaacaggctgctaccagcctaccaacaaccaacccaactgtggctcttccttgtgagatactattactctgtcctcttctcgaacactcacttgtttaagatgggtccctatgaatttcgactacatacatagtactggatgtgttgctgccttgatgcctcaaagcaacaaccacattttttttatgtgtcctgatcctggatgttgttgactttaattttggagcagagcagagcaaatagaatatcatatgggtagatcacaggaacttatagtgaaaaaggagtgctccagtttttattatcatgatgaacagcacaccagatataaggagggaaaagaaagaagagaacatcaaagactgaaaaaaaaacatgtattgtccactgtgttaattgaatcttgtgtgttttgttctttctagatgacattccagagtattgtacatcaagataataagctctaccgtcttcaaagaaaaacaaaatctttaccttttcatcccaaataatttcccttccttcttaccagttggttagcaaagcatgcgggtaaatttcaaggaactttgactcattgttgtggggggtgtcccaaatcccttttatggtaagccaaactcttggagtagtacttccttcacatagctcagtggtgtactaggccccaaaatttcaggttctggagtctggagtctgcaccaggataaattaactccatgaatgagtaatcgcaagctttaacggtttactccatttacgtgaggattaccagtttaatctgtaaattaaggagtttgtgggatataggaaatttgtgtactgtgctcagaaattattgcttccaaaaagacagcatgactgatgttagagtgctacaaacgtgtaggtaactactcctatttcagaagaacgacatctggtccctgctgagccatcagttgcaatcatcccatgcctgtctttttgttggattcatccttttcaatatttcatgattcattgacatgcttcctgtggctagtaagcttgatttacctcctgtcactaatttcccaaatattaattaatggaaacgtctgaataaagcttgtttgcatcatatatcttttggtattgccttgaggttttatctaattttatcgcggaatacaattatgtgaacttctgcacgtgcattgctctattagcctaacttgccttttatttgcttgagaacatggaaatctgaagtctcatttatttgtgtataatattttaaacctgaatccctgtacagaaaatgatttaggcctgaaactcattttatgctataagcaccatgttctgttctgttgcacaagtgtagggagatcttaaattcattttttttctgtacttttcaaacagggctttctgggattaagtggagcaatactggtccaagtataccgcaccatccacattgctcccagcactttcatactgatgttggcgatattgcccactgccatcaccctgctgcttatgtattttgtcgatgtccaccgttctgatcatcaacggtacaacaagaagttcatggatgctttctccctcattgccattactgttgctggttatctaatgatcatcataatctgtgaccaagtattgaagataataagttcagctgtgcagactgtttgctttgtgatactcctactgttggtcctgtctccagtggctattgctgtgaaggcccagaagacagaatcaatgaagcaagaagaagaaaccagggatcaagctgaaagaatcggactactccaagagcaaattagtacaaatgccagctccagtagcgatgagcgatgtcaagaactgtcgacaggcaaagaaaacatgaatctggtgcaggcaatgtgcaagctgaacttctggctgctgttcctagcaatgtcctgtgggatgggatcagggcttgcaacggtgaacaacatcagccagatcggcggctccctcgggtactcgaccaaggagacgagcacactggtgtcactctggagcatctggaacttctcagggaggtttggtgccggctacatatccgaccacttcctccgttcgcggggagtcggtcgccctttcttcatcggcgtcacgctcctggtcatgagcttgggccacgccatcatcgcctccggcatcctggcgtcgctctacgtcgggtcggtgctcgtcggtctttgctatgggtgtcagtgggcactgatgccgagcatcacgtcggagatattcgggctgaaccatttcggcaccatcttcaacgtggtggcggtggcgagccccgtgggatcttacatcctctcggtgagggtggtgggttacatctacgacatggagtcgccgccgggagctcgtgcctgctccggtaaccattgcttcgttttgtcgttcgtcatcatggcgtgtgtctgcgtggttggctctgctgtcgccttcatgctcttcgtcaggacgaggaggttttataaacgggttgtgtacgccaggttgcaatcttttctatagagagagaaacgaaccgattcttttctagcaaatgcttacctatcttttacaagcaacaggatttgatctgtacctgtacgtcagagaatggtagaaagcagaggcacactactttctgctgccatttttttcttgttgaaaagacatcattggactggtcactggtgttatatactactagtacttgtatgtatgcgtagaagtaaaaggaaaataaaacaatgtacagggaagaagctacagaaaacaaacagcatttgcttcgtcagaaaattatagcagagctgacttaacacaaagaaatcagttcgtgcaaccagctggctggggtaattttttcaagggaataggcttggagagctctgccttttatgctgattcagaaagtagagaatagttcagttctaagcacatgaaagctacattgttacagagtggatttgtcagctgacaactgtatataccagctgctttgcccctcgccggatgcggtacaggaggaaaaggcccaggccacagcgagagaaaaggcccagctacaagtatgcaggtccaaaatgggctctgtaatatgggccaaggccgggaaagtgaattcatctaaatagtcatgtcacctaaatagtcatcaaaaaatatgaaaaaaattggcaacatagattaatatgaaatatatctcttcacaaatatgcaagttttaattcaacttctacaagttgtaacaaaaataacaaatatagttgcgaatgcgtgataactattttcagtttaatttgttatttttgttgcaacttatagaagttgaatttggtcttgcatgtttgtggagtgatatatttcatattaatctatgttgtcaattttttctaaattttttgataaccatttagatgacatgcaaacaacgagaggatgtccccttgagggatgaaaattcacatctgccaaggccctgtaatagagctaggctatctggggaggccaaatccggcgacggcggcggtgggactactgatgtctggaactaccgtcgacacccaaatttataacactacagtagaattaacacaaatttagagccgagcattatgacgtctctaaccatccatgtgagatcaaagttggataaacaagtgcaatatttcaagtgccatcttcagatttaacgggccgaaggaggatattaaccctgtttgagagagcttcagaatcaaaagctcccccaaacaattcagcttttgacctagattctgaaaagctgtagttgtaaaatacaaaaaaataaactagaagccagaagctggaaaacccagcttttatatattctcagaaactggataccaaccaactgcttcttagaattttaagctcctccaaatagaccttaaggtattttttttaattcccaagggggagagaggcaaattaggagctgaacattctgatgtctctaaccactcatgtcggataagagtcggatagacaattgtaatattttaagtgccgccttcaaattcatcgggccgaaggaggacattaagattaaggtattgttcgtttaatttctaagagggattgaggaaaaacaattctatatcataataattatggaataaattatctttaaattatcctcaatccccttattgccgtatgggagggattaaccgaacaacacctaacgaaaaattttccacagctttaacaaaaaaaaagtactaacttaattgtgtggttgatttagaaacaatgatcagagcggcggcatttacacttgaaggtgtatatgccttatgcccttattattacaaagatggggaaccttattaatagaaagaaactatgacaaaaatatataaggactcaaacaattaagacataggagaagactatatattagtgaagtgccatgtcatatgcatgaagaagactgaaaaccactcctcgctctgtcctgacatatatggtcccgtcgatcgtccaggacgaacaactcctcgtgctgaaataatataaacaaacaaaatcgcaatcagtcaagacttgtgcagtaggatcagtaataaacaactttcattagtggagtagtatttgtcaccttaattaattactagctagcttgttaataaattatatggtgccattcgacttgttgttgactgtttcatccaccttcgtccctgcagcttcgtcatccttctctttctctttcgccgctttggccttcgccggctctctttcctccttcgccttggccgccgccgcctcttcttcctctttcgccttggccgactccgccgcctccaccttggccttgttcaacgcctcgatcagacttgccaggcacgcgtcggggtccctcttcttcccttggacgccttgggcatcaggttctccgccacgtccgccggcgacatgtcgatctccttcagcagccgccgtatctcgacgaacatctcgtgctgctccacgcccaggtagttcttggccagcaccttgaacgcctcgaaccggcagtaggacatctcgatgtgcacg

SEQ ID NO: 1780 - DNA, 1035 bp, Oryza sativa
gtcggtcacctcctggtggtcgtccaccgtgatctgcaccgtcctggcgtccttgcccaggtccgccctcagcttgcgcgctcgccgggcgcaggcgtggctcaggtaagcctccacggcgaggaagaagtcgctgcggcggaagcgctggtggccgtactcggagatggtgacgtggaggtaggggctgaggtagaaggtgagcttgtccaccatggtgctcagccactgccggagccccgcggggacgtggttgttgacgacgggccagaagaggaggacgctcaccaacgccgaccacaacgtcgacaccgatcccagattctccatcatgcccatggccatttggcgccgccgccaccgctataaaaagagatgggcaagtgttggaaaccagtgcctgcagctcctgtaggtgatggccagtatatatagagagtgcgctggtattaaaacattttctatagacaacttaatatatggtatttcctccgtattttaatgtataacaccgttgacttttcgactaacgtttgaccattcgttttattaaaaaattttatgcaaatatgaaaatatttatgtcatgcttaaagaacatttaatgacaaatcaagtcatagtaaaataaatgataattacataatttttttttgaataagatgaatgatcaaacgtttgataaaaagtcaacggtgttatatattaaaatatagaagtagtagtatactacaaatctataacccgtttttctcctctcttcttcacataactataaatattatatttgacaaacttatacagtccgcttattatagcctattaagtttttgatgaatattcttagtaatttcgctgcttggttgtgtcgttggtgaggagtacgtgacatatcgatggacggagatcgaatttgcagttggtcgtaaatcatcaagcgttatctgcagagaccatcatatcgaccgtcaataaaaactacaagtggcaaggaggatggattctaatctctcgggtgaacgtccaccctgagtg

SEQ ID NO: 1781 - DNA, 5058 bp, Oryza sativa
tcaaattcgacttctacaagttgtaacaaaaataacaaatcaaactctaactagtatacgtatattcacagtcaaatttgttatttttgttacaacttgtagaatttgaatttgaacttgtatgtttgtgaagtgatatattacatattaacctatcatgtcattttttttgaaaatttttcataaccatttagatgacatgcaagaaacgggtggacgtccaccctgagtgtttaaaactgttttccagtggcaagtgctttcctcatgcgtcatctgtccatccttaagttgtgcctgcttcgtcaaccgccctttaatttggtcatgttaatttcgatcttgtgcgataccttttatacgtgtaaatataattaatgtacctttaggtagttgtaacataacggtgtatttaatgaaacttttagttttggtttagaaaaaactaaaatgcaacaggtaggcttatcaatatgaaatggatggatggagtaaaaaaagagagtagatgttctgtatagctgcaggaccaccaaccaatgaaagggggggggggataccgaatacaagcggcgactggcggccagttgttttaagttttatttataacaaggtgatttataatcaatcatcaattaaaaagagagcgaatgtgattaatcaaacgacaggaattagcttagggcccatcaatggctctcctgaagagtggccgatcgactgcgatcctgatctagccctaagctgcgatcggcatggtgatgggcggacaattaaggaggacggcgactgcatgcatgcgtgaagcagctggagtacgatttatacttgtatacgatacgacgaggcagcgactgtgcatggccgaggtggcgggatctagcaggagagagctagcgcgcgcgggagaagatgcataggcggcgcacgaggccgcttaattcctgtgcgatctcgatatatatatatatatgtatatgctcgccatccgcatgcatcatcctcgatctcctcctaccccgatcttcatcttgttgttgatgacgatgacgtactatgacgacgacgatgtgtgtttcccccatgttgatgacgatcttcttcttcttctgaatgcatcaacattataagagatcaaaacataatgataacactacattataattaaggattaattagatccatcccattaaaaatttagcggttttaaaatataccattactatttatatatttgtattgatgccactatttgaaatcttagtggtgtcactgagatatgtattttccatgtattaaaaaaaataccctcatcttctacctctctctttcccatcttctacccctctctctctcctcgctgcgtcgctcgctccgccgccatcccatccgccatgccgctcattccgtccccgccgctcctaatgctgctcgcgatgccgccgcttaccaccgctgcagctcgctgctgccaccgcgtcgctgctgctgctggcgccgccgctattcaccgcgccgccacgtcacggctgccaccgccactgacacgccgttgagaaggaagagaggaggaaggagaaagaggaagaaagaagaagaagagaaaaggtgcagtttggtataatttttctagaaatacattcaagggtaaatagtggtatcttttgaatatgtgtgaaattataatggcatatttccaaatacatgaatactagtggcacattttaaaaccggtaaatttttaatggcatatatccaattaacgctatatataataatatttaataatgaggttcatttgaaacctgttaggactaaagaagttactccttgattcatcgtaattacaatatactccctccatccctaaatatttgacgccattgacttttttaaacatgtttgaccgttcgtcttattcaaaaaatttaagtaattattaattcttttcctatcatgtgattctttgttaaatatacttttatatatacatatagttttacatatttcacaaaaaattttgaataagacgaatgattaaacacgtttaaaaaaatcaacggcgtcaggagggagcattacagttcgtatcaaagattatcaaccgtctaggccgacggcaacaacaagttgctccctcacctgtattgtatgctgagtctgaatctgacacctggaaaatacaactctaagttttttctttgcaaccggccggttttctatatatattggacacaaatacgtttggcagtactattccaactccgcatgcagtactatctcggcccatatgtatatataggaatatactaggacacaaaaacaacaatctacacacaaattgatcgatggagatgacggcagcaatggagggtgcagcagccggcggtagttcggcggcggggttcagcttgtcggcggtggcgagccttctcttcctcttctctatgcttcaagagcacatccccttccaactccaggactgcctcgccgcactggccgcccgcctccacgccctcctctccccctacgtcaccgttgttggagttaatttatttctagaacataccagcctactctctaactctctctactactcatgaaataaaagtcaaggagcaagtccttcctctgtgaaatttctagagtagtgtagacaataatatgttctttgtgagttctagtattttcatgcatgtaccagtactagttgtgttcaaaaaagttcctagccatcctataaataggcagctatgtcctagatgtgatgctgctgtccaacaatcaatgtaacgtgcaatacttgagcaaagcataaccagtttgtgaaacaaacacagagcttctctcctctgttctccttctctgttccattgctagcaaaataatcaacaacaacaactggtatcagagcgctcaggttcgagtagggcgtgacggagtagcacggcgtatcggtattgtcaattgaagctacaagtatggcttcaagttcgggcgccacaatggcgcagtctatggttcctgtatttgcaggagaaaattatgatatatggagcatcaagatgcggacgctgctgctatctcaaggattgtgggatattgttgagaatggctatcaagagtattccgctggagaaactcttacggcggaacagaaaaagtctttggcagaggatcggatgtcggacgccaaggccttgttcttgatccaacaaggagttgcggaaagtctatttccgcgtattattggcgccaagaaatccaaggaagcatgggacaagttgaaggaggagtttcaaggatctcagaaggtacttgcggtgaagcttcaaaccttgagaagacaatttcagaattttctaatgaaggagtgagagaaggtaaaagactatttctcaagagttattgagatcgttaatcagatgcgcctctatggtgaagatataaacgaccagaaggttgtggagaaaattttaatcagtctgcctgaaaaatacgagtacattgttgctgctattgaggagtcgaaagacatgttgactctcacaattcagcaactaatgagctcgttggaatctcacgaagaaagaaagcttcagcgcgaagggagctctattgaaaatgcatttcagtcaaagttgagcttcaggcctcaaaactcaaggtttcgcggaaattttcaaaaaaatgaatttccaatgcgagaccgtggttattttcagaaaaatggcttttcaaggcagaaggaagatggtcaagagagaagagaaaaaggtacgtccagttcaaatttgtggtgtgacatttgccaaaaatctagtcatactacagatatgtgctggaagaaaatgacctgcaacaagtgcaaaagaaagggccatattgcaaaatattgcagaactcgagaaattaatcgggctaatttttcacaagaaaaggaaaaatctgaagaaatggttttctcttgccatactgctcaagaagaaaaagatgatgtttgggttattgacagtggttgtacaaaccatatggccgctgatccaaatttatttcgagaaatggattcatcgtatcatgcaaagatccacatgggaaatggctctatagcccaaagtgaaggcaaaggtacggttgctgttcaaacagcagacggtccaaaatttataaaagatgttttgttggtacccgatttaaagcaaaatttgctaagtattgggcagcttctagaacacgggtacgcggtttattttgaagatttttcttgcaaaatattggaccgtaaaaataatcgtctggttgccaaaataaatatggagaagaacataaattttctattaaggatgaatcatccaactcaaatggctctcaggagtgaaattgatatttccgatttatggcacaaaagaatgggtcatcttaattacagagcattgaagctactcaggacaaaaggtatggttcaaggccttccatttattactctcaagtctgacccatgtgaaggatgtgtatttggaaaacaaattcgggcttcttttccccacagtggagcttggagagcaagtgcaccattggaactagtgcacactgatatagttggtaaagtgccaacaatttcagaaggaggaaattggtactttatcacatttatcgatgattatacaagaatgatctgggtatattttctaaaagaaaaatctgcagccttggagatattcaaaaaattcaaggccatggtggaaaatcagagtaatcgaaaaattaaagtattgcgcagcgatcaaggaggagaatatatctcaaaagaatttgagaaatattgtgaaaatgctggcatcagaagacagctaacggcaggctatagtgctcaacaaaatggagttgcagaacggaaaaatcggacgatcaatgatatggccaattctatgctccaagacaaaggtatgcctaaatctttctgggctgaagcagttaatactgcaatttatattttaaatagaagtcctaccaaggcagtaccaagcactacaccttttgaagcttgactattttata

SEQ ID NO: 1782 - DNA, 7642 bp, Oryza sativa
actggccgtcttagttatatcatgtttattcggagacgactcccggtcgatcgagcgcccgatcaggagggggtaaaatcaggcgcgacgtcagcgctcgattcatgtgcaaaactactttaaactgatttttctcttaaattacttatacaaatcatgatccgattgcaccattaaattcattgtaattaaatcttcaaaacaagaccatacatggatatattccgatgaaaaaaaatttagcttattatataattatttttaaatgttgcacgatgttccaccaggtatatcgaaattgtttcactaaggtggtgtttggttggagggactaaagtggggctaaactttagtccctctcacagaaacataagtccctaccatagggacttgtacttttgtgagagggactaaatttagtctctaattcccaaacaccccctaagtagattgaaaatgtttcactcatttaaatcgggtgttgtttcacttatataaaaacaatgtttcagcaaatagcgaaagaatgtttcagttcactgcaacattagatctatacatagtgaaacattgtgtgtacactaggtgaaacatttttcggtggatcaaaaaataaaccaaattcccttaataaggggtttccaaaatatgtgggttttttgttgcaatggaatgtttcgttcactgtaacattagatctatacatagtgaaacattgtgagtacactaggtgaaatatttttggtggaacaaaaaataaaccaaatttccttaatagagagttttcaaaatatgtgggttttttttgttgcaaaagagtattttaattcactgcaacattatatctataaatagtaaaacattgtaagtatactaggtgaaacatcttttatgaaaaaaaggagagagagaagtaggtgggcccaacagtacgcacgtggagggaggggcatgtaggggagctagcgcccgatccgcctccccccgcgccgggcgaccaaggtaaagtacttttgcgtttattcgtacgtgtaacatgaatatgcctactgaccatcagctattatatgtttgttaagacggtcagcaagcttataattacctataattatacattaaaatacggttgtactccttcagctactataggtaattacgtagtactcctttcgtattctaatatataacgccgttgatttttatcaacgtttgcccatacgaattataggtaattaagacccacacactattatgtccaccatataggcttctctttggaagagtacactgcaggccataaaaataaatttttaatttttacatttttattaaaatattttaaaattatatattttatttcgaaaatttataaacctagacgcctcacgcgtgctcactacgcgttctaggagtacgttttttaaaaatcaacaaacattaggggacctaaatatttcaataaaaaaaaagtaaaaataaaaaacacccgcaggagcagcatcgatgccggtgcggcaagagttgcagtcgtcgccgcaattgtatggatggtgaacgcgtaggttgtgggaagattaatggccgagctagcttgtcccgcgggtataatcattgaggctcactcagcttgctacattagctaaagtcatgcataatactgtttaggatctcggatgattcggttatataaattgaaaaacccgttatatctgatattttagttcaaggaagaatttgagacttggtctcctctcccctactacactagactcaaggaagaataacgaaaggagattccagcgaggaatacggagccgcatgagacgagagtctctcaaattaaggaacctaaagttaacttattactaccatcaacagtttgggtttcgctgcagcagatatacatgccggcccataaggctaagtaattcggatagtatttgggctgttttcgcaggcagatcaaattgtccccaacttcgtctcttctcgttcaagttcgctgtgcctgattaagcaaacaattgagcactaatggcagacacactcgaaattcatttttcttttctaaaaatgacaacgttttagagacctttaattcttcttggcctagcaattaaaagatgcagaaattatgttaatagtcagccatatttcaaggcccacccatgcatggatcatatagtaattaagctaaaggggtacgtatagcacatactacaaattagaagatgcacacaaaattatgtatacatgttcgagtacagatatatatccatggacgattattatcttattatttccacgtaacaagtatatattacacatgcatgcatacgtcacggacatatatatcaatatctatagcagccagctaatgcgtgcacgcatgctgcaatattagccatagatcatccatgaccatgatcaagttaatttaattaggtgagaagatctatgggcagaagacgacttggtagttgctgtttcccctgcacgcgtgcgtcttgctgttgtcgctggggaacaggtaagcgtcggggcatctgctgtccctgcaggtcagccccacgccggagctgcaggagaagctcatggcgacgttgtacccgtcgatcaccgacaggtcgtagaagtcctggctgccgccgagggtgaactccgccagcgtcatcggcggccgcccggagaggctgcacgacagcgcgccgccgcagtcgccggtggcgcagccgcccctgccggcgccgtcgaagttgcagcctgtccggccccacaccctgccggagctggtcccggcgggcacgttgatggtccacgtctgccccgggctcagctgcgtgccgccgcccaccggcgtcgccgccggccacaccgtgaacgagcaccggttggtgatggtgaaggtcgccgcgttggcgccgccggcggcgagggtcgccaccaggaccacgacgacgagcactgcgggagaggcggccggagctgacgccattgttgaatatatcgatctctcgaagtcgtagctagctagcttaaactgcctcttaggatatatcgatcgatgtgtgtggattgactaggaaggggcatgcgtatttatagataagatgcaaaatggcacatgccatgctgctgaaaaagtctagattatttcttaataactgttgagaaatctagatgaagagagaatatactggaacttcatacatgaatagcattgcagcagtaactaatattatttttacatttgaaagagttgctatacggattcagtaagctagatgcacacaactaaattgaataatgtactattatttagctcagcttcccctgaataatcagattgggtgcatgaaagacaaatataactaaaaattaatataagatatcctttatttcaagtaaaatcaacatttgaaaatttcaactagtaattgaactaaaagtactttagtatatttagtatatcatgcacatgtgattattagatttctatatatttgaaagtatttttatatgatattgattttatagtcatttataatatattataaaacaaattaatgtttaaagtatatgtaaaataatacttatcttattttaggatgaagggaatatactttatatgcacgagtgtttgaccttgaaaagtacgtatacacataatattgaccaagtttcagaaatataatgcaaatgttctgatgaccaaaaagatcagtagaacagatttgaccgagttatgttttcgtttggtgtgcccaactacatatatttttaatgtgctgcagaaatataatgcaatataactaggaaggaagcccgcgcagatgcgcgggcatcttatttattgttttatgatttatgaaataatgctaaaagatgtcatgtctcatcttttttatgctgtaagataaactgattttaatatacttagtaaatgataagaatgtctccaagattaaaagaaaatcagtctgtcccgattacttataaattctcctatcgtcaccagaacttattattactattttaaaagttgtgtatctataaatagataaaactggatatgtaccaataaaataagcctaatacatcattgatacactaaaatatctacttatctaagtgttcatgtttcacttattccgaatccatatataaatattttaaaaataccacttataccaattaatgaaataacaccgttaaagataaacatgaatgccctctaacgggtgaagccgatcatagccaccaagactttttttctctgttgagttgaaagatgagtccctcgtcgattttagtctaatttactatcacaacctcatggagaattgtattcgtatattggggtcacctcaactcagccattttagtgggaggtatgctcaaaggagagtgttgtagcatttgcatttttggcagttaagtttgataccctactatacttatgacattgtagcaaactctattgttaatgcttgataccctttagaaaaggacacataaagtgaaggtgatcaaaataatagttgtttttaagctttgaatagatgtgtggcacacgatagacacaattttatggtgttaatcatcactaaaattttcatagtatacatagagtactctattttgaaaaaaaaatgatgaggttcattattcgatgctactatactaaaaaaaggtataccaccacaacaatctctatatcaccatattattggttatattgataaatatctatagtttagcacctgatttattttcaataactattaagaatgtatttattttttcaaaattctttacaataactaataatttgtgggagtatacttatagtcacgtggtgggggtgtttgacatacatacatcaattatacctaacatgttgaaattccttggaaatatatcatgtgtagttcactgcgcatgacacttgattgttcatttgttgttaaaactatttggtaaaggaaaaaacatacatatatgactgatttatgatggatgaaggggttatattatagcaaagatcattggtaggaaatatttttatttttatcacatctatgtatcgtatgttgatcatcacttaaataccaatcaagcggttctaaaaaattgaaaataaaatttttgataaattaatccaaaaattaaaattaaatcggatttacttaaaaaaatagactaaattgttttttttatcattttttacatttgtagatttaaattggtgttgtatatttatcaagtgatattagaaatcctaaaatataatgtgaaactatttaaaaattaccacaacattaataattatatgttggtcccatgtgtcatgatgtatttaggaccataatataccttttataagacataaatatttcatttaattaaagcatgaaactaatcacaaattgaatataaatataaattaaaaagatgaatgtttaaagacattgatttgatatttatattatagatctagttctatttgcttatatttgtgaagtaatatattttattttatattatagaaacatctgttttaaaaaccgttgatacttttcccattggtactacgtacgtttttttttgcctttatcttttttatcccaagtacgtgcgtatatttttcttagtaagctctaacttttttttgaatcatacttacactacttatcttttttgcaacagttaagtatgtacatgtagatttgatctaatgtcctaagataacaggcctaccaatttaaataaaaattaatgatgagattagacaaagtcacatggtggcctacaagagttggtagaaatggcacataagatataatatgacatagtagtaaaaatatagctaatatagctctggaattggtgatttaattaaaaaaatctgcagctgctaaagtgtatgcgtagatcgtatataaaaataattgtttatttacaacaccagatcacttctattgtaaattcctagcgtttgcgcattcacactcagattactctctatgaaaaactgtgataataaattatgatgtacatgtatcatgtaatttggaaaaaagaaaaaaaaaggagaattaggatctggatggcatctatcgagctcgccgaggcagatcagtctccatgaaaatgataacaaatgcacatgtattgtgtaattagaaaaaaagaagagagggagaatccagagttggatggcatcgagctaacagaagcataagtacgtacgtatgtacttgtgggttcggagagaaagggtgagaagagatttagttttgatctaacggttaatattattgggtccaccattttaaatgaaaacttacggtcagatatttttctttttctcagaattttatttaaattattagagggccatgtggcgacttaggagcgatgtggcgacttaggagcgtttataggagtctcacgtggtggcttgagagcgtttgtggaagtttaatggacttttagtatataacaataatagaatagaatagatagatagatgagagaacaattagacagaaatttattacagctagttgttttagtgaaaatttggtttttatctaatttattagaacgtcacgtggcgttataggaacatttatatatgcgtcgcatggtatttagtgatgtttataggaaatttgatgtactttttactgtataatagatatataatagatagattggatgtcgtggatataatttagtgacacctgtttgtagaattatttaaagtaaaataatatatgctgttaacttttttatagttaaaaagtatttccttgttatatttggttgccatataaagcatatggcgcatagaatagcatagatcttaaattacttatttagttaaaaataaaataacaataaaaaataagatatgtggcttaaattggagattaggaaaggaaaaaagagatgaggggagaaggagttacgtacgtgatgaggggagaagtagttacgtacgtacgtagcaacaggaggggagatcggtatatgtggagaggggaattttgtttttttattagatctaattgctgataatattggacccaccaatttaaagtaaaatcaacgattagattttgtagtgccacttggcggtttaggagcgattgtaggagcgacacatggcggcttagaagcgtttgtaggaagttttatggacttttagtatataataatagatagatgttgaaatcaaacttttataactttgactatcgataactttaaaaatatttagtttgacaacacatataaatttatcttaccaagtattataataaaagtaaaaatatatttatttattatatatattaaaataaataaatatagtcaaaaatataatttagagtaaaaaaacattaagaattatagacccgtcgggagtatgcatatttctatgacgaacaaaatagtctttaatttcgacctgtccgcgtctatcgatcttaattttgaagtcttgtgccataagttgccgcaggatgtgatcggtcggtcgtcggaggaggaacttgagatcaattgatctagaattctagctacacttttctaatggaaagaataaaatggtccatatatatgtgctacagat

SEQ ID NO: 1783 - DNA, 531 bp, Oryza sativa
agtggacattctactcatggtaccactagtttaattttaggtagatgcttcgcaatttaattaggtaacattaggtggtttttcaactatagactttgggaaatattcatatcacctggatactttagaatggtttggttcttgtggaattggcttcacaccgctccttctattcaaaatccccaaaatggttttaggctgggctcggggtgcatggttttgatagtagcacctcggccatataaggaccggtcttcgggtctctgttgcaaagcactaccgtacttccacatgtctagtgggtaaggcttagtttgtggctcagtctggttataaacaaaagtacacggattggggatggatgaagtcgggggtcgatggacattctccagggcaaatgaaggctacacgagctgcggcccggtagtcgagatgtcgtggcagagggttggtgccctgctgcttggggctcagtcctgcctgcctgtcccggaggttccggccgaggcgggattgggtcggtactcttgt

SEQ ID NO: 1784 - DNA, 730 bp, Oryza sativa
ttttccaataataacatagctaatacaacaacgtttgccttctttacatgcagtgactgaaatacatggtcgcacttttggggtctggacacttttgacctgtactctgtgctttctgtgtgcattcaacctggaaaacagacctctctatctggccactttcctgtccttcatctatgctcttggtcatttcctcaccgagtacctgatataccatactatggctgtggcaaatctgagcactgttggcttcttcgcaggtaatgaatttagttttgactgtgttgtttgctcagttcagccttctacttagttatcatgcaactataatgtcaactgatgatatcagctcaaacattcaatagtcaataataacagtcaaacaccatgcttgtacatacaccaaataggttgatgtctctggtgcttaagtagtggaagatttgttcagtacagctagcggtttcttgtgcatgcttactctttaaaatcacttagcattcacctttataacagttatcttgccatctcttcagttttatcttgtaatactcaaatgacatgcttgaagctcattggactacataaggaggttgaaaattatttcgtttcatgcaccaagtagttcgcctatatgatttatcatgttactcctgctgagctaagctgatctgtggagcaacagaaaaaaaaaacaattatgatttatgttacttcggttagaaataga

SEQ ID NO: 1785 - DNA, 576 bp, Oryza sativa
aattccaaatcactgttcatagctgaggctgcatacttaactttttcaggacaatggcagctacatcatgcaaacagtaggggagccaaggcaagaactgttcaatcaagtggtgctcaataattacatgtgctctttccagtagggaggagagggtgagagacaaaaggctaggagaagggaccctacattgacaataggtaatgtagcaaaacgttaagtggaagtccttttgctatcttcagttcaggattgtgtaatctaacatcattatgaaaaaaaaatagtagtaccatgtaagatacacacttagatactcaaatttcataagactgcagcttgagttccaaaattgctcaggtttgtgtaatctaacatcattatgacaaaatcaatgccatgtgaaatacaatgttgggatactcaaatttcacgagactgcatattatttagaaaacggataacaatccggcctttgcttcaaagaagatacaaccacctagttacgatgtttcagtccagacaactccaactgcatatgacaatcttgagtttcaagttcaagattagtagtag

SEQ ID NO: 1786 - DNA, 635 bp, Oryza sativa
cgcggtggtgttttatctagaccagtggatcccccattcttgacctaacccttggaaaagctctacttttacaagagcagccaacttcaccatcagatggaagttccagatgttttgatcgtagttcacttgaaaggatttctcccagggactctctttctcttgccagcacaagtgcacgtatagatgaattggatgattgtgtcgagggattgtcattgcttcatctagcatgccgtgttgcagatgtgggtatggtcgaacttctcttgcaatatggtgccaacgtaaattctgcagactctagaggtcgaacgcctcttcatcacagcatcttgaaaggacgacatatgtttgcaaagttgttgctatccaggtatgcaaaaatcaacaatactatgtaatttggattttgttgtatgcttaggttttgaaagttatcattctgggtttaatattgatgtaaagggaatgtgtcaatattatcaaattaggaattgtacctggagagatgatcagtggtagttggttcctacaatgtggttcttggtaagcataggaccttaggcctttgggtacagtacccatgcttgcttcctgaagcagatttgaacacatatttccataaacaagca

SEQ ID NO: 1787 - DNA, 692 bp, Oryza sativa
catcagtgaaacttgagagattaaattagctattcacccaaaaaagtatacttaattctgatgaatcccctaatgatttttatcaaaatcattaagttaaggtagatacacatcttgtcatatgatcaaatggtttcgccaaaaatcaataatcagacaacaaaatgtgcgaactcgatattttacacgactctctttaccaattctgccccgaattacacttaaaacgactcaacagcttaacgttggcttgccacgccttacttgactgtaaaactctcactcttaccgaacttggccgtaacctgccaaccaaagcgagaacaaaacataacatcaaacgaatcgaccgattgttaggtaatcgtcacctccacaaagagcgactcgctgtataccgttggcatgctagctttatctgttcgggcaatacgatgcccattgtacttgttgactggtctgatatccgtgagcaaaaacggcttatggtattgcgagcttcagtcgcactacacggtcgttctgttactctttatgagaaagcgttcccgctttcagagcaatgttcaaagaaagctcatgaccaatttctagccgaccttgcgagcattctaccgagtaacaccacaccgctcattgtcagtgatgctggctttaaagtgccatggtataaatccgttgagaagctgggt

SEQ ID NO: 1788 - DNA, 691 bp, Oryza sativa
attgcttttagtcagcctcttatagcctaaagtctttgagtgactagatgacatatcatgtaagttgctgataggtttccagttttccgctcctaggtctgcatattgtacttttcctcttactcgacttaaccagtaccaacccagcttctcaacggatttataccatggcactttaaagccagcatcactgacaatgagcggtgtggtgttactcggtagaatgctcgcaaggtcggctagaaattggtcatgagctttctttgaacattgctctgaaagcgggaacgctttctcataaagagtaacagaacgaccgtgtagtgcgactgaagctcgcaataccataagccgtttttgctcacggatatcagaccagtcaacaagtacaatgggcatcgtattgcccgaacagataaagctagcatgccaacggtatacagcgagtcgctctttgtggaggtgacgattacctaacaatcggtcgattcgtttgatgttatgttttgttctcgctttggttggcaggttacggccaagttcggtaagagtgagagttttacagtcaagtaaggcgtggcaagccaacgttaagctgttgagtcgttttaagtgtaattcgggcagaattggtaaagagagtcgtgtaaaatatcgagttcccacattttattgtctgattattgatttt

SEQ ID NO: 1789 - DNA, 2151 bp, Oryza sativa
cacttcacacttccagattaaatcccacatcttcctggacttgtcatctgacgagctggagctttcatccatattggccagagacattgccaatttataagcacttctgacagagaaacgtcccatcttgtccggatgccaagctaaaaaatcctcatcctgcctcattgaagtccgaatcctcagtatttcttcagcaccacagggaaggaaaacccgattatctttctgaacgtcccacacaccgtcaagtcccaagagctcggacacccatttcatcctgcaattacctttccttgttattggccgtcgagaatggtcccttggaatccagggatcacgccatatgcaaactgactgaccatttccaactctccatatacaacccttcttaatcaattccaaaccgtattcgattgctctccagccaggtgaagcattcccactaaagcaagtatcaactagagttccatttggaaagtactttgctttcagcactctcgcacacaaactatccgggttcacaataaggcgccaggcttgtctagctagcagtgcttgattgaacaatttaaaatccttgaatcccaagcctccatactgtttggccttcgtcaaatacttccatgccctccaatgtgttttcctttttccctgttccgcaccccatcagaaattccgagccaacttgtttaaatcttcacaagtcgagtccggtaacttgaagatactcataacatacactgggatagcttgtatgactgcttttagcatgatttctttgcctcaactagagagatagttttctccccacataattattctcttccaaatcttctcctgaagactttggaacttgcctttgttcattctcccctccggggttggaaaacccaaatatttatcttcaaaaccattgccgacgatttggagtgtacttctgatttcaacttggacactagcgggagtaatatcatcaatcagcatggagcactttgctggattaataaactggctagttcctacagcatagtcgtcaaggacttctcggatcacattagcctggccattatcagccttgaaaaagagtagagtatcatccacaaacagaaggtgggagattccaggcgcccgccgacaaacttgcaccggggtgattgccccttgaagtaccttttcatccagcaggagtgatagcccatcagcaacaaaaagaaacaagaacggagaaagcggatcaccctggtgaaggccgcgagaaggagcaaatgtactcagtaaggttccattgagtttgactgaatatctcatcgaggtcaagcacgtcattatccaactgacccaccgatgagtgaaacctaacttatacattgcttgctccaaaaacgaccagtcaacccgatcatacgctttagagagatcaagcttgtaggcacaagcagcttttccagggctcttgttcctttggatggaatgaaagcattcaaaagctaatagggcattgtctgtaatcatccttcctggcacgaaagcactttgattctgagaaatcaaatcatccaggataggcctaagcctatttactaagcatttggagacaatcttgtaaatcacgttacataggcttataggcctgaactctttcaactccattggttgattaaccttcggaataagcacaattgcagtcgcattgataccatctggcatgatcccagtgtggaagaattccttgacagccctaaccacatcactcttgatcaggccccaatttcgttggtagaagcgagccggaaaaccatctggcccaggcgccttaagtggaccaatctgaaacaaagcatctgcgatttcttcatcagagaaattcctgcagagggaatcattcatttcggcagttactttctactggaacagccttgtgactctagaatgatcaacagtagggtctgctgtgaacatatccttgaaataatccgtggaaagattctcaaggtcttttgtcgcactataaacagtgccatccgggcctcttaacttggagattttatttttcttcgctctccatcttgctctgttatgaaaaaagcgagtattccaatcaccctctttcagccagctaattcgcaagcgttgtaaccaaagcatctc

SEQ ID NO: 1790 - DNA, 604 bp, Oryza sativa
gaagagctcgtcgatcggccatgatctcgagacggtccacggttccaacatcgtcgggggcctcgggaagccggaggcgtcatgacggcctctacgggacgcaggacgctcgaatcaacatcgagcgacgccgagacgagcgccgagctgcccgtatgggggaaggcgcctcctcatctggagcgccatgctcttcttcacgaggcggccctcctcccacactcacccctgggaggacgggttgtagggcctttgtggcgagtctccggaatgtccggtggcccccgaagtttcgccccaaccttacggagaagtatgatggtagcatcaatccctccgagttcctccagatctacaccacggttatcgtggcggcagggggtgacgaccgggtcatggcgaattacattcccatggcactcaagggtcaggcgcgtcgctggttgatgacccagccccccggctccattcactcctgggaggatctgtgccagcagttcattacgaacttccagggcacatatccctgcccgggggaagaggcggacctacacgctgtacggcgggaggatgatgagtccctccgctcatacgggctgcagga

SEQ ID NO: 1791 - DNA, 601 bp, Oryza sativa
ttttagaaaatataaaaaaatcctccaagcctcatttgactttcatctttgcacattttaattgttggaggctttcacattgaattttaattattcttttgcacaatttcgaggatagattttagagtcgatttgggacgcgacaaacctaccccccttaaacggaatctcgaccccgagattcggaagaactgggaagagatcaggatgggctgccttcagctcgtcttcgcgctcccaagtagcttcttcttcggcgtggttgctccactggaccttgcaaaaacggattactcggttcctggtcctgcgctccatggtgtccaggattttcactggcctctccacataggtcaggtcttcgcggacttcaatttgctctgagttggcctgctcggatggcactcggagacatttcttgagttgcgacacatggaacacatcatgcacgttgcccaaggaggcgggcaactccagctggtaagcaacttctccgcgtcgagcgatgatacggaagggacccacataccgaggtgcgagcttccctttcgtctgaaacctgtgcacgcctcgcaatggcgtgacccgaagggggtgcagg

SEQ ID NO: 1792 - DNA, 5924 bp, Oryza sativa
tgtcgaatggtctgtacctgaaataagtactcactttaaaatatgacatgaatttccatgctgaaatgtgagcctgagcgtagacataagcaagagtattaacttccaggacaaccagaatgtgctaccttgccctttgaagctgattgcatcaccgcctcaatcattttgtgtgaacttctaccaattgcttgtattccatcaccattagggggaatcggtttatggccatttggtgaccaacgactttcccgatcaatttgccttttaaactcttgcatcctctctacaagagcagcttggctcattagttaggaccggtgtcccttggattgctgtgcataagcaagaacctgaaaaaggagaatccataatgtgttacaaaaaaccgcaaatgagggtatagaaacatgcatgcacatacagaaaacaattggtctttagaaatgaagtgaatgttgcatacacatccaacacttaaattacaggtattactaggccttagcagagcatgtcattttgaaggaaatgagcagaaatttatgttttatataaagtgcaagaatgactaatggcccatcggtgacataaaatattggtgtatccaataataagcaaatgtgcattggcctcaattaagtcaagaactagcatgaaacattcaggtataggaatacagcacaagaaacattatgagaagaatggtcatggttaaagacttatacttgattgatatatggctccatctgatggagtagctcatatccctgaaagaaacagcaacagtggaaccttgaaccacattcatatattactaaggatgtcaaaatgcaaattatgacaatagattacttgtttgaaatagcgcagatgtgcatccattgtcccactgacagcctctaaaaattcaaatcttttcttggcctcgatatttgaaagtgcagtcacctgaaaattaaatagataagacaaagccacggtacatacaactacagaaatcagaacagttatacagggaaacagtgcatgtaccaggttgaaacgagcttgctcaaatgaggatctggcactatggagctcctggttgtgtgacatataaattagtaaggatgcagtgatccaactttctaaatacaaatatgaagacaaatgatagaaggaacatacatcctccaccgcagttgctacatctgtccgtgtgcctttcttcaaggataaatacctctcacgagcctgagtgagtagacaaacaactagaagtcagtgatagataaactcttcctaaaagatagccatcaacttttaactttttgttaaacatgcagcaccaagtacaagtgaacatggcaataccagtgcttaactgcagtgattctccttatcctaaaatagtttgggtatttttgtgcaattccttcattatcaattagctacacctacgtataattggctaatggaaccttcaaggttccagcacaagttgattatcatattggagagcgagatgatagaaacattattatgtcacctggtcatagagaaggctagccttgtcaaaacgcttcctggcatcctaaacaaacaatatcaaagttaaaacattgtatgcagatccaaatatttatccaatgttaatagaagattatgccagtaccttcacatcatgcaaatcaatgtccacaaattgcagcaacttgtcatttagcatattctcaacctaaaaaaagagtatattattagtaataccactaagtggaagtatggttacagcttctaataaaactggggttgtttccattcttggtaatgaaagcctggaacttgaactatgatacaataacatgaattatttcaaccatactattcccaaatgactagtaaatccagaatctcacattaaagtagataagtcatacaactggctgacaatatctgaaagagtgacaacttagaaaagaacattcagaatttcagattttccagaagagagaatgcatgtatagtaatgtatatatgaatgtttacctgtgagcgcaatacttccttgtaagttccaatttctctcagggcaattgtaaatttggtcatgacgggtcctggaaaaaagtgaatgccacacttactaaaggatcactaattttgaaggcaacaagctggggaatgaaatttactgaatcctaggatcactattttgaaggcaataagctggagaatgaaatctactgaaacctattttgtagttctcaacgattcgtgccaattgtccagtttggaaataacaaaaggattcctcgatcccatgttataaaaacttgaataaatatatctgaataagaactgcattactaacctccaaaagcaacactgattggatcattatgcccccctccaaatgcttccagtgaacttgcaaatgcaatatctccatcatatgcttcccctagtccttcactgtaataagcaaacatatatgtttttaatgctagatagcaaagcataagcaaaacgaggagagaagaatatagagagcccaatggttcttgagttaagagtccagaccatattttccaacagaatttgcaaataaatgagcaaacaaacttttggtttttgtaagtctaaaactgcagactaagttaccacttacgtgtatttgcggcaacctttatgaaacctcaaacatctctctctcagcaattcagaaccttcttcaagggattgtatctacatattgcaaggataaccatttaaacagtgttcatgaaccaaaaactttagaagacatgattcaaatcaatacaccacatttgcccaaactgcaaacgtttataatatattccccataacccttgaataaaagagtccctccattttctctatgaatcacgataattataaaccacttgttcacaatcagcgaaagaatcaaagaacccaaataatgtatgattcagttttagggtgcaggattatctcctgatggaattgaacaatgcccctgtcattctggaatttcaaacaggacccataccaatataacattattcgccaaaattcacacagaaataacctaaggtcccctttgcatcaggaattcaggataataatcgagtgccgaacacacacatgagaaaagaagatattctaacagaatgcaaaatctactgcagttgtgaggaacccaagccaaaaataacgcttacaggagatactttactcacacgctcatacgaaaaatacagaactaatgacgctaaattcttccatctaggaatgaaaccgtcagaacagcaacaaaaaaattttaagaaacctacgatacgagcagctccatttcaatttcaaatccacaaattagacccccccgagatagagggagatcacactttctccagccattcccatcgtcacagcccaaaaaacattcgatagatccaacccgccactctcagcgcaacccagaagccaccagcggcaagcattacaccaaaagctgcatccctttttttcttcttcccctacgcttccactcgcctgacaccaacctcccaaccacggcgcacgagcgcccccaaaccgccacgaaccgagatctccactcactcacctgcttcctgaacatgggcgagtcatccagcctggtgaaaaacatctccgccgccgcccgccgccgcgaccaccacactgctttgcctccctaccaccacaacctcatcaacgccctctcctcgcaccaccaccacccacctcgtcggcgacgcactcctctctctctccaccaccaccaccaccacctcctccgccctcctcctcctacacctccccgcagtcagagcagctcctccagggcggcgtggggaaggcggcgcagtgccggggggagggcgacggtggcggagcgcgggcgaaaccctaggaggcggccggaattgggcgtaatggcggcgattcggcggaggaatcgaatggctcggcgaggcgagaggagagaggagagaggtaaagcggaaaggagaacggggggaaatgaaataacggtgcgcttttctattaattatttttttcctcttcgagttttaatttatttactattattgggctaattaagcgtgggggagtgggggattaagcgctaatcgtgtggggccacacgtggtgggcgtggtgcacggtggggttgtggggtggtggggcccggtgtcagtgagagcctgagaggggcgttggtggactcggtgtatggaagtgtggggtgggggtttggactcggaggaggctgctcacctgccggtgagtgtattggtggcttgccctaaccacaattttctctctttttgccttttggatttattttttttctatagctttcagtttgttcttttggtttagctttgtgtttgatgacaaatttgcagtgtgtggtgactgctaaagtttgatgtttgatggtacgtcttttaaatacccgcaaaaaaaactaaaggaagtttacggtggcgtgcgaaatcgtcgagcctaggcgacgacaaagaatgtttgctagcatcgtaaaaatgttgtgcgtgtgttctcaacgaaagtaaagtggaatgaaaatgctagtgggggaacttggtggccatctgaccagtccgagaggtggttccgccactgaaagttggagctgcttagaagatactatctaaatcgaggaaaaaaagagagtaattctagcctcaatggtcaaaaagaagaaaactaagtaaaaaaaccggcgacttcttaaaattcaaaacaggagttggtttgatattattagtaacagaattcaaaatataagtacataaaacaaaattccaggcttggtatgtccaattgtgcacgacataaatccgtacatgaaacatgtactacttcgtgctgtttgttgtacagctgcgtcctctcccatctgtgatgaacagcgtcctctcccatctgtgttaaacacaaatctttcgtcatattaattgcattattattgctgggttactttaactgtttgctcctgaccaggatgttggtcaatggctgtagtacgatgcataggtaattgatcctgaactaaattacaatggtcaaacataggcattcgctaacgaccacaagtattggaagataactaaatcccattggttaaaagttgctactattactggctaattaatgtgctccaattgatgttaattactgtacattttgatctgaactgctatctctgggccctgtttggttccatgggctaatgtttagccctcaccttttagcctcaaattagccctcacctttgagcctcaaattagccctcgaaacattagcccctccaaggggtgctaatggggctaattttgtgtggggaccatcaaaaagcagaactctctctctctccttctctcctctctctttctactctctctccacattttagccttgaattagtccatagatccaaacatgtcaccctaggctaatgtttagcctaccaattcatgactaaacattagctctcaaaattagccctggtcacaatacaagtaagtatttgttctattactagcagttaatagtataaaacttaaaaaaatatagcaaagttataatattttgaaatattttttaagattactataacattttcaaaagttgaattgaaatatttaaaaataaattaatgatgaaagttaaaaacacagccttaaaaagtctcgtgcgacatccgtcctttgaaaaatcaacttctcactaggatttatacatagcgtgtgtgtgtgtatatatatatatatttaaagctcgaagtttttctttaaggaggaataatgctttatcggagggagtatagtaggtgaaaggttgaaaatgatatattttaacttgaacatgttgatatgagttctacatattat

SEQ ID NO: 1793 - DNA, 28687 bp, Oryza sativa
atgatcgtttgattggaccacaggaaaaatacaggaaccagatgagagagatagactcaaaagatttttaccaagaggttggagctcttgctaagtttcctccaaaacctatatgcaacaagccattccataggaattttataggatttgaaaaacttcaatccttcgaatcaaagggctacataggaaaatttcctataggatttcaatcctatgaaattccttcataattcctttgattcaaaggggcccttagtattttgataagtgtgattatgataaacgaggaagttgtaacctgtaaaagccaaacacctaccgacttagcccatttggagtactcactccgtcaaaaataaaatagatgtgacatatcttaggcctgtttagatcctccaaaatagcaagagttctgctattttggagcattttttgctattttgaatctaaacactagtagcaaaagttggcaatttgtcatttgccatttgctagtccatagtagcaaattgtaccaaaaagtgctttgggaccatacactctctctccccaccaaaaagtgctagaatggcaaaaaaaaatttaggatgtatctaaacaccagctagtatttttgcaatgccaaaacttttgacatttaccatttgccatttcaaatggatctaaacatgcccttagtacaacgaacctggatagacttatgtcgcattcagttttagttttagttttaattttagtttttttttacacggagggaataggtcttgacacaacctatgggctaatgctaatgcactaatctttggtaggaaatgtgtgtggacagaactaatgacagattgcaatggggacatacatcattgtgctcaaggcagtctccggtctccaggcttccctcctcgttttgagtggggttggcgcccacttctgatgagagttcggtgttcttcacggtcagcttacctctgtctactcagcttttgcattcacacaaaactgagataatttggtgtttcagtaataattgagctgagagatttgttgcatgattaaagttttttatctttggaaagatatgcttttggacttatgagaggaggtgtcggcatgtatagttttatgtgagacaaggggatgttgctctctctgtctcttacctttgtctcatctgttttttccttgttctattagctccaatttcgaggactggaggagacacacggttcttttcccatgtaaatttgtttcaacatagcagaaatatgtttcttgcaaagttcttccaacatagcaaaaactagtgttaggaattattttcataaacttaatccaacatatacttgatcacctaaattgcttatgcggaattggtgattgaccagtggtactgacaggtgcttgacgaagacaaagaaaaacgtcattagtcttattagcaatatatgtagatgtagtgctaacgaaaacggggtagcgaagcaactgtaaggatcagcgtaggcgtcaggctgtgtatgcaatcccatgtttctaagccctctccctcgttttccacgcgcacgcttttcaagctactaaatgatacaatttttaaaaaaagtttatatacaaaagttgcttaaaatattaaattaatctatttttttaaaaaaattagctaatacttaattaatcatgcactaatgaaccgctctgtttttcgtgcaggagggattgttttccatcccttgattaggctgtgcagtaacatgacaccagagagaatcagagttattggagctcgtccttcggtctccctctagcgcctcacttaaaatcggttttggggttttgaggaacatatgtgatgatcaccaccgtacatgagttaggcttctcagttcttgtagcgttagagagtcagctgggacaagtccatcaagaatgaggcgtgtaatcccatcatttcgcgccttgtgatcagctcggtggccaaaaatcaattaacaataagctctgatctgcactttggttttctttctttcagatatgaatgtcgatgctttctgattcctgctagttataaggaattctctccgtttcatattataaatcgcttgacattttttttaagttaaaattctttatgtttgatcaagtctatagaaaaaaaagaacttgtataacagtaaattagtttcattaaatttaacatctaatatatttgttttgtattaaaaatgttactatattgttacaaacttaaagaaatctctactattataaaaattgaagatgtttttgccggtattttggtacgtcatccgtatataagtcggtttttaactttgtttgtttttggaaatgcatatccgtatttgagtcgttttttgagatcatttacttttggtaatacagaaggaatcatataagaaatatgtttaaaaaactcgcattctaatttaagacgatcggactcctaactgcagctcatgattttctaaaaatatatatatatccaagtgaattcccacagtgaattttatcttaactaaaccatataacaataataagattgaaatagactttacccgttacgtacgggcatttttttctagtttaattaaaaaatcaaaccacttataaattataaagcgaagggaatattacttctacttggttaatctatccgaaatcagcgtgtaaaactagccacttaactagtgtccctctgtctgttgccacatgagcagagacagcccgtaaagatgccacctttctggggacggcaatgatgctcgcacggtgccgccccggcggtcggcgcggcgatcgtccggtcaccgccggtgaccggagcggaagcgccggcaagaaggcttttccggcaacgtattcccagatcgatcggtccaagcgcggtccttattttcttcctaagatgtagatttttatcccaaattttattagcatgttttttaaacgattaagtggtacatttctatagagaagttgttctaaaatatctgataaatttatttcttaaatttataataattaaaactaaattaacttatttgctaatagtttttttcttttgttatccgtatccttacttaatattttcttcattagtttcgaacactaccgtagaccgcagcaagcaagcaatagccccgtgacctccgctagtttgcttcccagcttacaatcgcaacgaacattaaattttaaaattaatttttatattttatattagattttaagtcgttaataatatatgtatttttatatatgttttatcaataaaaatatttttcagtcgataatgaacaatactgcttatataatcagctatagctatgtgaaagcaacccatgtcgttgcgagtgatcgacgagatatttaactatttatcatttttataagtggtagttaagaatttattagtagacccacatttcaaatacataagagcttatgtatgatagtctgcaagtgacaaatttttaattaccacgtgtttacttaaatactccgcgatcgacagcatgccaagcaggtctgtgggggcccatctagctgccaatcaaaagttggtgaacattgaagtctctgctaatggcttctcacattttcacatcagttggaaaggaatgcctttaatccaaggaatctgtccgattaataccaactttctttaaatttcttgtcgctgctgctgctgctgctgcttttctttgtgtttggtcatccacagatccactccaacctggagaagcttcacgctaacgttatggaggagtactagggcctcctgtggcgaagctttcgacggttgtatcttctctcagggtgagtttgaggataaggtgatcgaggagattgggaagatacgtaaaatgaggtgagccattagcttataattaattgagtattaattattttaaattttaaaaatggattaatatgattttttaaagcaacttttctataggaaatttttacaaaaaacacaccgtttagtagtttggaaaacgtgcgcgcggaaaacgaggtgttatctccctcaatgttacccgaacgaacacaaccttagtttagtcaaatagtttagtttttaatgtagatcttaagaattaagagctataaaattcaataaataaactaaaagacataaactaaaaaaaatgcctatttcatattttcaccggctgcttcttataaaaggaactatgagtgtgttctcaagtacacttttccaacttctattttctttctccacgcacactttttctatacttataagcaataattcttttgaaaaataattatagaaattttgttttaaaataaacatattaatctattttcaagttttgtttgctaataattaattgatgagctattactttcttttttgcgcgggagaaagctttagagcttttcttgtcaaacattcattcaaacacagccttatatcttcagctggacctcgagtcctcggttagtttgtttagctgggttgatgaggtgtgttctcatgtttggtgatcctctctagatatagtggtatcagtgagtgtgtcaatgcatgtgccatgctcatgcttcaacagaaaccatggtttgtttagctgacgcaacagtctaggaaagatttcttctttttttttcttttttgaaagcaataagcaggctatgacgctatgtatgagaatctgaacatgtagtagagatggaaaagtttcagataagtctccgaagatttggaaaaggcaagagcgacttgtgcgttggattctaacacccggcagtaagaatttttgctaaaatttgattaaattctgatcgaatttactgtttaaatttgagttctgaaaattattcgaaattttacttggaatatcaatatgcttccgtcccccatcaaattaactactccatccgttccataatataaaggattttgagtttttgcttgcgttgtttcaccactcgtcttattcaaaaaattttggaattattattattgttttttgacttactttattatccaaaatactttaagcatattttttgttttttatatttgcataatttttttaataagacgagtggtctaacagtaaaaaaaaacttaaaattgatttataggacggagggagtacttgtctgaccggggtgatcgattagacgcaggaggttgactggtagcgagagcagagagactacaatgagcccatacacgccaacaaaaaccgtggtgtttgctaacagcaaaatagtcttttttttttcaaacggccggtcataattgactggcgttatatcgatagaaggagaaaaagtacaaatagccaaagggctaagaaagagaaaaactgtacatgacgacatgcaaacaagcttgcatgtagcctccctagctcctcatggcaacattctcccaatgtgtttagcgccggccatactccaccaacctaattcctcttggatacgactaatcatctggtgtactgtcgcctcctttgctctaaagattcttgcatttcgttccttccagatttcccaagcaatgagcaagaagagagttctgagtcctttctgttttgttgcttccaggtcgcttgttccttgtgtccaccaatctaagaggtttctacttgtgttccattttgggatgatgtgcccttggtgcagccatgtgagaatcccaaaccaaatttgctttgagaccaggcattcaaacagaagatggtcgattgtttcgaggtttcgaaagcatagctggtagaaataattatttggccatcccctgatctgtaaccggtcagctgtccacacccggttttgaagaaccaaccaactgaagattttgcactttaccggagcccatgcctcccaagacaactttgttgatggcaagagtaccattccattgaattggaattggtacgcggattttgcactatattccccattagttgtccattgccaaacaatcgagtcttgtaccccctctgttagttgtggggtgttacgggctaaaatttcccaaacatggaagaattcatcaagaaggggaatggtgaggctgtggaggatgtcgttaatccatcttccttgttgcagggcgtcttggacggtgcgggttttcctcttcgaatgcctataaagattcggtgcttgactttttagtctttggccaccaatccaatttgattcccaaaagctcgccttttgtccgtcaccaatctggactctcgttgatgccgcgaaaagatccttatccaattcatcacagggtgtttcagtccctatccaaggcttctctggcgtcctccattcgaatcataaccatctcagtcgaagagctctggcaaacttttctaagttcggaacccccaaaccaccgtaccggacaggtgagcaaactttaagccaattgaccttgcattttccgccatgcatattctcgttacctgcccacaggaaccgccttcttgctttgtcaatttcttgaagagattgtttcggcggtttcagcaccgtgagggtgtaagttgggatggcacttagaactgagttcaccataattcggcgcccccccatgtacaacaatgatggcttccatcccgagagccgacctttgatcttatcctggagaggctggaaatgcaccttacgtaggcggccaggagtgagtggtagccctaggtaagtcagtgggaagctggctcttgcccccgaaaaactacacaagacgtcgtccagatctacttcctggcatcgaattggtgccaccagactttttccaagattgacgtgcagccctgttgccttgccaaagtccctaagcatggtaataagaacatccacctcgctttgtacagggttgagaaaaacagctgcatcatctgcataaagcgaagtcctcaatctagcatggcgacttccgatgttggttagttgcccaccttcggtcgccagatgtagaagcctttgtagggggtcgatagccaggataaagagatagggggatatggggtccccttgcctcaagccacgtctgtgtgcaatgcattccccctggtctccatttaggactaccttggaagtggcggtggaaaagagcaaacagatccaatttctccaccgggggccaaaacccatgttttgcatcagttcaagtaaatattcccaggagaccgaatcaaaagctctagcaatgtctagcttgaaaaaaagtgttggctttttgctggcatttaggttcctgagcatgttccgaacatacaggaagttgtcttgaatgcatctttttttgatgaaggcgctctgtgcaaccgagatcaggccatccatctgcctggcaagccttattgctagaactttggatatcagcttggcgacggagtgaatgaggctgattggcctaaaatcggtcaccaaggtaggggcgttcctctttggaagcaaggtaattgctgctctgttgagtactccaaagtttcctcctgacaggttatacaaacactggaaaacatccatgatatcctatttaattagttgccagcatttcttgtagaaggtaccattaaagccatctggacctggggccttttctgcttgcatttgctttaaagcggcccaaacttcctcctctgtaaaaggttcatctagttcatcggggttaacctgtggtagatcgatcgcgttccaatttaaggtgcaatttcgcgcctccttgttgcctaggattgagttgaaatggttgaaaagcgcctcacttttttcctcatgttctgtcaggatagcacttgttgtatggagttggtgaatgtggtttttccttctcctcgagtttgcgtgaatgtggaaaaactttgtgttggcatccccttcttttagccatgtcaatcgcgatctctgccttttcttcgactttgccactgctgccagccccaaaattcttagcttgaggtctttcctgagctggtgttcatcagcagtaaggatcctatcttcctgggccaaatccaatcggagaatcacctcctgagccacgtgaaattgcattttgatctctccaaacagacttctactccacttcctgagagctttagcggtggctgtcaatttgtggctgagttttgtaaatggatgtccaccaaaagtgtgagatgaccaggcttgttgcactacctccatgaatcccggcacccagacccagaaattttcaaagcggaagactacccttttgggtgggcttacagtgaaagcaagaagcaaagggcaatggtctgaacaggatgaggagagggcttgcagtgtgtggttggagaacaggatgtcaccatcaatattacaaaaaactttgtcaattctttccagagtaggcgcttcctgctcattgctccatgtgaatttcctattttggagcttgaactccttgagacaacatctatttagagtgctcctaaattgccccatccttctcctatctaaattcagattatttttatcacttgcttcacaaatcaagttaaagtctcccaaaacaacccagggcagcaatggctgcggcactaacgattctagttctgcaaggaagtctgatttatgttcatcctccgaaggcccacatacggaggtgagaataaaagggacatttcctcctatcacttgggccctaattgaaacggaaaaggtatgaatttgtgtgttgtcgacctgcacctttgtgtcatcccagaaaattgctacaccacctcttacaccatcagcagggagaaattcaaaacgcctcagtcgggaaccacctatttcccgccctaaaaactggtctatgttagctaatttagtttcctggatgcaaagtatgctcgcatctgcattattcgcaacctcacagatagcctctctccttgccgggttgttcaaccctctgacattccaattcagaattttgaggccttcaatcattcttgaaccataagtaactcctagagatgtgcactagtgcgatcaacatgctccaatggcaatacattgctccaacagcccacttacatagtacacaaatggagaagtagttcatttccaactgaccaaaacaactactcctatgattggccaaccaccaggtaacacagatcaacagagcactaaaacctagcttaaggctaggtgccattggcaacgctaatagtctaaatgacaacaaccgaacatatagtaacagcgctaatcgctgacgaagggtctgaaggaccactacacaagttaaagaacagagatacatgattcatcaacgacactacgacaacactcatcacaagccagagctcagacccattccggcgtggcaccatcagcctcctctgtcacatccggcggcagaggcttgccgctgtccaacccagtaagcgcgcgaatcccttgcaccacgaccgtcggcaaggggtcctggaagcgcttgatgtactcagccactgcctcatcacctaccggttctcccggcttaaggaccctcatctctttcataatgcgaacctgagctcgcatcgagattagaaccggagatggccgtgcctcgagacgcttgctatgacgactgggaagcagaactttcttgcgtggcctcccgcgacgacgcactggcggtgttgccacaagcggcggtggcagaggagcaaaaaacggctcaactcctccttgcatgggctgggtcgccgtgccttccatttgctcccccaccagctcgagaagcccaagcccaggagaagctatcaagccaggggacgcagctgacccatccggcccaagaggcgccaccggcccaggagaaactggcccaataggcgccaccggcccaagaggagccgctgacccaataggaaccgacgccccagcttctagggtagatgcgttcgctgacttctccgcgtggaacgctgccgccaccgccagctcgagaaacatcgggtcctccccctcccgtgtcgcccccaccacctggccgtggacagagcagcagagggcgggatcgacgagaagaggagcatgggcagcagaagagtgcgctggtggtgttggcgctgcgccgctgggtggcctgcccgaggcaggagaggcgagcctgctgctcgtcttgtcgttgtcgtttcctccgccaccttgggaagcgcacccgcgaagacagcgactctccgagaccgcacgacgccccttgcttggcgagcgcgaccggcaagagcgccggcggcgagaaggcggcctggatgggcgcctggctggggagcgacccacccgatggccggcgaagtggcgattgccgccacggggggtgcggctgcggtaccggccgtcgtttccgccttggggctcccttgagcggccacgacggaagagaacatcagtccaagaacggcctaccagagcgcgtccgttgccgccgccaaagttttcgtcgtcgtcttcttccctctccaggcgaggcgccagcgggacacgacagccgccctactgacctcgctgcgacagccggttacgcaagtcaatgccccgctgttccggtcgcccgcgctcctcgtgaagtctccgtacaggcagtggcggctgcggaggctgcagcggcggcggcgaaacaccgtcctcatagcccaaatgccagtcaaagcggtgcacgcgccgcctcggtggatcatcggagtctgtggagccgctggagtttgaggacctcgccggcaatggcctccagtcctccaccatgtcaagatgaatgagcagatggcggacacgacccagaggtgccgaggcgacctcctggctgggcgtgggcatgccacccgtctccagcacctgccctaccccggccgggaaaagagtgaagaccgacacccgaggaaggagattggggttctgcatccacacccagcaggcgaaggcagcagtgttgactctgttcttggtgtcctcttcgatacggtcgacgatgcagacatcttcgagcaccttctgacgtcgtagttgggagttcccacttgctgctgcaacgcctgcgccatctccttggcgctgacgtcgtagttgggcagccgggccttgatgacggccccatggttgtacaaccgcatagcttcgtgctccattgcagcgtcagcgacaaccaccgcataaccacaagcaggatggttctccggcaacccaggtatgtaatccattttggggccaagcctttcgcgcactggtgctttgtggccagtcagtggagggaaggcaaggggattggggatttcttgcttggagggtggtgctggatgagtggagtagatacaggaaaatattgagggtttgttcttgtattttgaagggcaaccagaagatatgtggccactgcgcttgcaaatgtagcatctgggagggtctctgcagtctgcaattttgtggtcttgagcgaggcaacgcaagcaacggcctaaagttgctggattgaagggacgccaggctggaattactccggtggttgggcgcctggacgccgtggccggaagaggtgccctgccctggcgccaccaaaatctcggtttcacctcttgccagattgatgaaggagctccaggttcgcctttactcaatcgattaaacacacttaactttctcgtctccggaacaacaatagctgattttagtcttgcttgcttccttgggctttccccccacaggaaacagacaccgagcagaagcaggagtaatggcggaggagatggcttttcttccaccttctccgctgtcttccttccttgaggttgaagcagtaaatggggcactaactacgctctgccggggtgcagctagaggcgtagcctcatgggcagcggacgcctggccggccatctggcgcgcgggcgacggcggcgactcgacgacctcgtcatcgtcgctgaaatcccagtcgaccttctcctggctacccgaagaggagccagaggaacactgagcggatgtggctgctggactggacgcccctgccggagcggccggaggcgggctgttgaggtcgccatggccagagtggccggtggcgggcggggagagctcccctggctctagctccatagctagcttcttatgctgtgtggtaggctgctccgagatcgcaacagcaaaatagtcgttgtgttatgtgtgattacacctatatgttgaattttcttgttagggtatgagattaatgttcggtatcgccggcgtcgctatcgccgtccttagcacgccgccatcacctataccggccggcttgtgctccgtcgcggccattggcaaaggtggtagcaagcctttgccaatctaaaatgaaaaagctaaatctaaaatttaaattttcaaacttaattttaaagttgattttaaaatattttcaacgtagttttcttccttattagcttttaaatttctaagaacaattatataaaaatatttagactcaaattacttttttatcgccaataagccgttacagctacataataaatcgattaaatttataataagtcttttacaacggataagacacgaagaaaggggatctaggaggaagggaaaagacgcggtgaggaggaaggaggcagtgtcatgtcagcagccatgacagagggagcggaactccggcacacggccggcgcgcgaccacgaggcggtggttgcgttcttttgacactggtagatgtgtcctaaccttcgcgagaccatttataagtgggctcgtgttttttcaagaaaaggaaaaagtacactgaaggtccctcaacttatcagcaagatacaaaaacgtccttaaaccgtaaaatcagatatatggggtcctttaactatacaaaaccgttcacccgaggtccctgggcagtattgacgccagatttgtcctacatggctggctgagtcagcgtgggtcccatgtgccagatgccacatcatctctcttttctcccttcctctctctctcattggattggccgggccggtggattgacgccgccaccgcacaccgccgcggaggcggatgcggacgtcaccagctcgtcgcaccacggggagggcctcctcgatgaccatcggcggaatcaccctaaactcgtcggcggagctggagcgcggacgacgacgtcgacgacgacttccaggctgccgccgagccaccgacaagcgagcgagcgagacacggcggaagagcgcgagggggagacggcggtccgtgggaggaggacacgcattccggtggccgggctgctcgagcacttcaagctcatcggctgcttcgacgacggcagcgtggagttcatgaccgtcgctgcacgtggcatgggtaaatgatgttaatttatgctcaacgtggatggaaattgatcaaaaccatttacagttgatggattacagaaacacacaactgccacccttttggaactcacaaaccaagatttgcgagacagcaagagctatatagcttaagaatattaacgcaagaggaactactaaaacagcaaacaataaaaccagggcctccttttgtttcaacgcaagaccttttgtttcgacaacacgggaatatgaaaataagcagttcaatacgcaccttgatttttgcttgcaatttggttgttgctcctggttccttcttagcatttggactctccaggttttccttcccagaatttatgttctcagattgtccgccacttaccagcacctcacgggcttctgccaaagcagcagcagtctgcacatttatctgcttcacaaatcctagcgcattgtaggttctatcagctgggctgacgaagtatgaaccctgggaggaacatatggccacaagaaagttcagcagagaaaacaacagcaagcaatgcccccagtgcgtgacaatatcattgattaatgaaaaaaaatactctcaggcatgactcaataataacaaattagaaatatatttctatccgcttagattcagccatagtccaccaatttaaatgcttgttccgaacacttgacaacttgagctctgcatctcaaattcataaattttacaaagtgctaaatgtacctgaaattgcatatctacgaaccaaggggacttccatgctgaaggagattctagtcctcttttgatgcatggggtatcagccaatctaacaagagcaaggcttcagaattcagaatggcatattaaaaggaacaaggatcaagtaatctcttcatacttcagtagcaggaaacaagcggggtttaattccctaatgtagtatcttaaatgcattcatcagtaggattctagtgtttcttcaacgttctcgtcgtcagcgccgagatcgtcaccgtcgggcgtcggctggtacagcggcaaggaccagagaaagctcctcctctactgctacttccgcaccggctaatgagcccgacacgagtcgccgctgcacggcgccgacgcctcctgctcccgcatcgccgcgccgccatgtcctcctcccgcggaccgccgtctccccctcgcgctcttccgccgtgtctcgctcgctcgcttgtcggggtctgcctctgcggcggtgtgcggtgggggcgtcaatccaccggcccggccaatccaatgagagggagggagggagagaagaggggaaagagagagatgatgtggcatctgacatgtgggtcccacgctgactcagccgccacgtgggacaattccagcgtcaatactgtgttgggaccttgggtgaccggttttgtatagttaagggaccccgtatatctggttttgcggtttgaggacgtttttatatcttgctgacaagttgagggacctttggtgtactttttcctcaagaaaaaagtactttagtccgactgtagaatgggccgcatgtacgagacctcccgttctggcccaaaaagaatcccatccagcacaaacataacgggccgcacggacgcccagcccgttccggcccaacctgaacggactgcacgagatctctgtccggaacatcacaagtcactctgtttaactggcaaaatagttgatagcaaatactccctccgtcccaaaaaaaattaaactttagagataaatctggatacatatgtgtctacattcatacctagagtttgattatttttgggatagaggagtaatttatttagagagagattgataaaaaatattgaatgatgaataatgtgcaactttaatcacagcccatgtattattacagaggcagacattgtctcatcagctcacggccatggcgatcaatggcggccgccgacctcgccgtgagctgcaagagctgtataatctccgatccccttgcaccatcatcgctaggaaaagaaagaaatcaaaaaaatttctggcctagcggttcggagaataaaattctgaaccccttggaagttcagtctcatttgcatatcgatcaggacaagtagaaattcagtcaatgtgtagttggttacagggagattggctgaatttgcatgctcaaccgaaatgactgggattcagaagctcgactgaagatttgatatatttgtgaatgcatgtagaggcccaactcaaaactgcttacgggtgacttcgtttttttctttttttcttttaaaaaaagggcatgaattcttgatgcttgcaccaatggcaaagaagatagtggtactggaggagacaggagagagctatgggccttgccgtcgcttaaatccaagctagctagtgttcggagattaaactctcgccttgcttgaaaaatgaaaatatatatatagagaggggaattccggtgcccgagcccctgcctagttgacccaatcccgtttcggagcagcaatgctgtgccacgccggcatccgtgaatcctgagcaccactgcggcctcttatatagtatacttggtcaagctcgcgagcctaaccgagtttgagccgagcctgtttaaaagctcaaaggtggactaggtttggctcgagctcaagcttgagcctagacaaacaaacttgctcgagctcggcttgttgacagccctactaacgaggaggccttgatgtctcgccgtcatggtgatcgacggcgggcggaggcgacatgtaccagctaggtgagctcgacgtctcgtgcaccttcaatttcaccattggacctttctcaaatgccatttacatttatcccaaatcctccttcacagttcatctagaattgccatgaactcgatcagccacaaccgcacagtgcaatgtgttacaaacaaccttcatctgaatttctgcattaccaatcagatcatatcgatccactataggccctgtttggtagagcttcaaactccaactctaatgggagatagctcttatagtagctgaggtgggtgtgaaagtgtttggctagactggttagctccacaccatcacatcccttgtcgccatttcgtcaaacacttggttggcatcgccttgccgttgccgccgctgccgccgtcgccaccggtccgcccatgtgccgctggtgatcaccccgtgcgctgcagccgcgccacccacccgccaccaattgccactgccgtcgatgccgtccaatccatgcgctgtcacccatcatcctgatacactcgcgtgccatccgcagccgcgccacctgcccgccgccgctgacgccgcccgccaccgccgcagcagccaggccgccagtcgctaccggaggaagatggggaggactgaggagagagaatgggaggagagggggtgtgaagggggtagtttaatggtatttttgtgtaaatacattaacaaattaaagggtagtgggtcttttggcaggaatatagtagaactgtggagcagcaagaacctagctccacccccgtggtacaattttgcagagcaactctgctaactctgctccagaaaatagagagtttataccgtttggcacaactccagctctaggtatgttggagttgggagctagagctgtgccaaactcaactgtgatattgaaggccttcagtactgctgagagtactgctggttctctctcagcaatgctcggtttcaacttgtgattctttttcttgagctcaggctgattcattttttacggctagactactgtcattctattttgacggcaaaacagttggcagatgtatatgcaactttgatctcattccatgtaatactattacagaggcaaatactagacagagtttccaataaaaagagcagcctgtcactctatcctagtataacataattcttgaaagtacgcagctaaaaacggtgtgtataaatctaaagagacaatatagaagccacctggatttacacaaaagcattcgatgaatgattatgatgaacgaggcaactattattctgcatcctggtgacaaggggcaagttcagcactccaacatgcacatacagtagtacagtgcacagagaaacgcagttactacatgatgcacgcaaagaaaaacatgagtgttgtgttactgcatttcatttccgctgttactttcgagtttcgacagtaaaaggttccataacatggcaacggctgcaaggctcaaccacatttagtctaaccgtggagggaacttttccctcgatgtatgttctgatagcgaagagtgctttagaggcttccatgagatcatcctttggcattcgcgagcatctaccaagtttgccgggagaacatctgaaagactcaaaactggtgtccaatgtaagacattcgactgatgtattctcgaggatatgatatgttagctccaacaagctcttcacggagcggaatccagtgatcttcacattccggaggttgtcatggcgttgctctggcaactgccttagatgtgaggggttctcgaaaattgaatcgttctctgggtgttttgcggatacctgaaaatgacaagtccattatagttgaattaattggttccagaaagtagtaactagacaagtttacagggtgaaggtgtggcttacatccacgatgaaagtgtccaaggaagggcaggcatcgagaaaggaaaccagagacaaataatcatatgatggagagagagttactgcagaaagagtaatacacaagtacttgagatggaggaatgtgttaggcaccattggtgtactgaccatctgcagaaagatgcttcagattgactaaataccatgttcaaatgtgtgaacataaatataaaaaaaaagtttaagagccaccgagaaagcatacctcacccaatgagcgtatggtaagagtttcgaggtttggaaaaatatatggtagctccgcgcaagcatgattgagaacagaggaatacccaatacttaggttcttcaccagagatgactctccaaaggagagttgtatagggtgataagcttgataaaaaatgtgcaaactgtgaaggtttggagctttgttctctattactcgcagcctggagcatccacgcacttccacataggtcagccgctgtagcacacaaggcaacttcatgtattttatatgacggcaaagccggagtttcaaccactccaaagcaaacgaagcggaaaaaacgcaccccaattcatcccccgtgattctcacatactccagatgcagcctcgtcaagctttgaaagcaaccaatctccgcagtggggtgaaaggtacagcagtaaagatcaagaagccgaatcgagcttccactcccatcagatagaagtgagcaaggaaagtcataatatgcttttcccttggacatcgagaggctgagctcttcgatccttggtgtaacagcaatttgaagccatctttcgaggtaactgcgtgctttggtactgaagagaccattgaactcaatcgtaagagccttcacaccaatgcctgagtgtttttccataacgcgatcaatttttctgatgaaatccgttgtaccttcaacgatacccatcgtttcagtactaaaggagagtttgggacggtttctccatgagtatagaaaggcagaagacaagcaggcagcacgggcagcgtctttcattggcataagggaatgtatatgctgccacatttcctgcatgcacaagcatgagtgaaccattacattggaaacttgaaggctaaaacaactggattgtaactgcggtagttaaattgagcattgtgtagagaagggctattagttattactagcttgtatacattttactgctatggatggtattgcaagacacagccaaaaaccttaaaaacattatgttggagggggccaatagtgttaatttttttcaaaatttgctaaagctacagtaaaaaatactgtgaaatttgaatgcatgggggaggccaagccactgctcgcctccccctgtttcctcccctgattgcaagttgcaacatgacttaggcaacatacttgacaaatgattgtggtcctaaaataatatgtggatcaatcctatccaccacttgtataagaattaggaaggataacatgaaatcaatgttctaatagaaagtgtgaaccaagtaaacatgtgcggaggaagcactgatacgtttttccataaagttcaacagtgtaatagttatcctaagataccaaaacaaaccagtgtaatacagcagtctgaatttgtgtgcttcccatgactctgatttaaatcatacggtcatacccctattccaaacaagttactatttggtgacaatataatgataggtttattttccagcattaagtacccatggaaggagattctgcaggtagaatgggccagatacaagacatttgttttagtcaaggttatcagcaggtaagcatgatgtcatctgcaattaccgcagtcgaacaagacatacttggtacatctatgagtctatgacgagtacaaaaataaacaaagtgaaatatgtacgcaaatttctgttttagttggaatagttacaccaacttttacgcactatttgcactgtaactctgttagtcttccactaccaggactgtgtgtcatacctcaggaaggtatggacctgaatatctcatctttttgccactgcgaggactgtcatcttgttgataacatgagccctttcgtttctctggtgaggcaatagactcatctgcaacaactaaaggttaagaatatagtacatgcgtcaacaggagaaacaagaaattaagcattatgatgcaaacaatacatgcttggtctagtgtttgagtggatgctgattcctactctcaaaacctttagtagataagcatcattatttggtcttcttaattacaatctcttttatgaacagatgcagactgggggtaaacgggagctcatgtgctcaaccggagaacttacctgctcaaacataaaaatgtattcgcaaaaagatcatatggtcgaaactaacaatctaaaggaatctcaaacataaagaggtacttgcaaaaagatcatacggattgaaactaacaattgaactaacaatctaaacgaatcagtttcacctactcgcaaaagagagaggaaactacaaaatcgaaatccgagtcttgctgcacaatgctgaagtacattctctgagcaagcaatagatgagaaaccccattgtttagcttattcatatgcttatccgaatcgcttattagcaaataaaaaatcatttgtgaataaaacttttatattcgtgtccttagcaactcaaaagcaaatgttgtcaaataaactaagatgaaaaaaaaatcaacattaaaattaagtcctaaattcaatttttggcttataagcataagcataacaatgaggccggcatgaataatttgcattgtcacatgaatggcagaactcattgcatcctcacatgaatagcagagcagacaagctgagacaggaaaaggcgacttaccgggaactagggcatgtcgactacgacgacgacgacgacgctctcgctgcaagcgcttcagcagcacataccccaatcccatgaccacgaacccacgattgctcgtccgtccacgaatcgaggaaaccggcgtcgacttccgttttagtctcctacttatttgctctcggaatctgtatcttgtgaaggaaaacgagggagagagaccacataggcgccgccgagcgagattatttctcagcaatgggcctcccaatttagggagaaatcggaattaggattcctgaattcgcggttgaatatctgagtctccagcgccaagctccatggagaccatggcgattcgcgagcacctgggcgggctccatggaaacccgcgtcgagcttgccgaccgtaggggagaaccggagaatgacgcgggcggacgccgcgaggttctgcggcctgcgaccgccgccgcgtgcacgcgggtagcgcgcgctcgctctcgcccctcgcggcgccgctctgcgccgggtgggtgagacgagcggagcgccccgcggcggtgtgtgtgtcgctggaggcgggtgctgcggcggcggcgggcggcggggcggggacgccagccaggttcctctccgaccggatgcatgcgtcgatggcggccgcgccctacgccgccgcagcagccatccagggtgcccgttgaggggtttcccactttccctcgatgcaggcggcggccgatgagatcgccgcgtcgtggaatggcgggggatgacgccgacgacccgcttctctgggctcgattactccatccatgcggccccgtgacccaccggagcggaggccgacggcggctcaaagtcgaggcgctaatgctaccagctcgtcggagtcgccggtggattggagaggatcacggcgaagtggggacctctcggattctggaaggagatgggtgggtccacctcgtctatctgaacttcctactgacaagtgggtccgcttatttctaaccgttggatcaacttaagcgataaggattgaattcgcgttcgcgggccaaaccgttacggcccaacaaaataatctctgctaccctcggtttcttcgcgttctgagcatctccaacagtctacccaaatcacactcttcaaatacctatatagccaactcttcaattgatttagcaagttaaacctgttgctcactccaacagcgtctccatccaccctctctattttaagtgtatgacactgggacccgtatgtcagtctctcactccttcctcctccactttcctcccaactacatcaccgatggcaggccacgaggagggaaaagccggcagggggcaccgccggcgaaggggcgacgccggcgaagtcgtggcggcgtcgtaggcgcgggcggcggcctcggcggagtcgcggtggcgtccctcgtaggcgcgggcggcggagtcatggcggcgacgtacgcgcgggcggcggcctccgcggagtcgtggcggcgtcgcaggtgcgggcggcggcctcggcgtagtcgcggcggcgtccctcgtaggcgcgggcggcagcctctcgtcggagtcgcggcggcgtcccttgtaggcgcggcagcggtctcatcggagtcgcggcggcgtccctcgtaggcgcgggcggcggctacctccccttcccccgaccccagcccaccgccatcacctcgaggtcggcggcgcggagtgcgcggatggcgacggcagggccggctcgtcgtcgtcgtcgccgttgccgtcgccgccccgctccagatcccgaatggtcgaggggaagacgaagtgcggcggagccggaaggacgacggcgggggtggtgccgggagaacgacggcaccgggaagacggcagcggcggcgccgggaggacgacggcggtggcactgggcggaataggcggcgggcaagaaggtagccgggatgggatagggaaagggggagagagagagagaggggtgggacctacaccagatggccagccgtcctggctggacaactttggctagtgaggtggggaatttagccactcgaatggcttggagagtcatttagctagtctattggagtagatttttttgttcaagttagccaaattttggcttggagagccatttagctagtctcttggagatgctcttataagggcatccacaatatgataaaatactaggtagtaagcattaaattttctcttgttacctaccataaacattgtgagtcagtggcgtagttagctaggtggcattgtggtccatggaccacataaaaatttgattgagattaaaactatagtatatgtgctagttaatataataaaaattgtatattggaccacctatttaattggcccattacatatagatggaccatattttctttaaatcctagctacgccactttgtgagagcgatgaataactactactcagtcatatggctactaccgggcaacaaggaataagttatgttatttgtacaacgctaatgagcatcaacgaattgttttcttgcgggaaggaggtacaacaactgaggattggtgagtttttagagtgagccccacgttataccctaccatcctgcacaaacaatgtggcgttagtatcctgctactaccgcctggcgtgcggacccacgttactaccgaactcagtcataaacattgggcatgccctaatgtcatgactcatgaccaacgcccgtcatctcaccccttccgagaggactattcgcgctagctttgtcaggatcgtacctttcaaagcgtcgcgaccctcagcagagggtatcatagtttcatcagctttttagtgaggtatggacgagaagccgcgttggggagatgcctcgtcccgagttgtcgcctcgcgccgtggtagaagacggtgaggtggtggaccgaatagaagggtctacccgcgaagctccaccggtgaccgacgacccaatatgccactccgagaatttgtgttgttagttgatgctgttgaggttgagttagttcatgaatcatgccgaactagcgtagtagtagtcgcatgatgttgaggtgaattagtgtccgagtcgtactgttcactggtccagtagctgatgctggcatagtctactcggatgcgtccattcaatgtaaatccatgtgattcactgctcaaaatcatatgatatacgagaaccataaaatgatttctggctaatttgtttcatttgtagctgttgatttgactgtaaacccctttttaagtaagattcactctaggccaacttctaacaaacattttcattttaaaatcggataaatttacagctgggacactttaacgctctcaactattttatccatacgcactagttatcgataggtaaaaaccaatgttatcaacaaccgtttgtatgtttgagaagagagttaagtggtctacagtgaaacaaaacaaaatgtaagatttcctgattcaaacatgaatcaatgggtagttcaaaagtgaaacaactagaatattcaacttacatgtgaaatttatttattgtaggcctcatgttctctctccccgccctcctcatcggcgcctgtgccttcgcggcggcggcggttgcggcgtccggcgacggttgccgcgccggctgctcgctggccatcgccgcctactacttctccgagggttcaaacctcaccttcatcgccaccatcttcgccatcggcggcggcggctaccaagcgctgctcccctacaacccggccatcaccaacccggactacgtcgtcaccggcgaccgcgtgctcgttcccttcccctgctcctgcctcgggctccccgccgcgcccgcctccaccttcctcgcaggcgccatcccctacccgctccccctcccccgcggcggcggcgacacctacgacgccgtcgccgccaactacgccgacctcaccaccgccgcgtggctggaggccaccaacgcgtacccgccggggaggatccccggcggcgatgggagggtcaacgtcaccatcaactgctcatgcggcgacgagagggtctcgccgcggtacgggctgttcctcacctacccgctctgggacggggagacgctcgaatcggtggccgcgcagtacgggttctcgtcgccggcggagatggagctgatcaggaggtacaaccccgggatgggaggggtctccgggaaggggattgtgttcatcccggtgaaaggtgagtgctactggtttctcagtttgattttgactgttttagcttgtaactgtgagttgcgagaggttttggatgataattgagcatgtgaaaaatgtgaaatgtgaagtgcggtttggattacagtggtttttgcaggtagtttgtgaaaggaagtttggttactgcttgaatgttcttagcatatttatcaatgattggaacttctgagctatgtgcttcttcttttttgctctgctgtccaattttgcttggttgtatttgtgattgatttaaagcaatgcagtaactgagttttggttatacaaagtttaacccctgtcgtatgctatttcacatacacagatcgactttgtgccatggtatgcagtagttttcatgtttcgggagtggtaatctatttgatcctgcatcatggttgtttgaggcatcatgaactcatgtctatgctacatagttggtacaatggtaccggagagagtatcatgcaagtcgaattgccacccttttttttactgatacttgataattagttagttagcataaccagataattaacacaactaactgcaatcattcttcagaaaagctcaccactgtcatttgcttaatctcttctcttaaaaaacagctgttgtcaacaattaatcttctaggtgtcaatctataattctatatatgctaacatcctttactctgttatttatttccagatccaaatggaagttaccaccctctgaaatcagggtaagcattcttcgactgtcaggtgaaattacaactgtgatttcctttattattttctgatatgtatttcttgtgcagtgtaggcattgttcttctcttctgtgagctcttgtgtatctatgctaaggttatcaagaactaaagtgggtattgtcatgaaacactgatgttcaactcacattcttctaggtggaatggggaatagcctttctggaggagcgatagcaggaattgtgatagcttgcattgctattttcattgtggccatatggttgattatcatgttctataggtggcaaaagttcaggaaggccacatcgcgtccatctccagaagaaaccagccaccttggtaatgataaacctcctttcttggctgtaacactcctctagatcaactatgccaaactgttgaacatattacatgctttgtaaagtgcttctgttgtgattttggtatatcagctgctattatttgtgtggtaagtagcttagctagtcttctttttatcattgtacaaactgtatgatttctctgcaaatgctacaactcaaaattaatatgccttgtcaattacagatgatgcttcccaagctgaaggcattaaggttgagagatccatagaattctcatatgaagagatttttaatgcaacacagggattttctatggaacataaaattgggcaaggtggttttggttcagtgtattatgctgagcttagaggcgaggttggttcaacatttttctcatcatggacaacctatcagagtgcattcacacataaatcaataaggaggacacaacattttgatgtgcattcttctatcaatttgaaatgacttctctgctgccttcagaaaactgccataaagaaaatgggcatgcaagcaactcaagaattccttgctgaactgaaggtcttgacacatgttcaccacttgaatctggtgggtggtcttatgattttctgtaataatataacagaaataatctcaactaccaactgaactttacattttgctatgcttacttacagaacgagaagataaactttgattagagtttagtaaagaccataatacctttcaatagggcacggcatcatatttttcatgttggaatagtactctcgagtctctgtactcgagtctctgggtgtactttgatatcgcctaattgttcgtcatgcaggtgcgcctgattggttattgtgttgagaattgcttatttcttgtctatgaatttattgacaatggaaacctaagtcagcatctccaaaggactggtaattgtttgtttgaatgcactctaagtacaatgagattatatcctaatgatttctgtgaattattcagcacgtgcatttgtctataggttatgcgcctctctcatgggctaccagagtgcaaattgccctagactcagcacgtggtcttgagtaccttcatgaacatgttgttccagtatatgttcatagggatatcaagtctgcaaatatcctattagacaaggacttccgggcaaaggttagaattgttcatgaaactctatgttggcctcttatcttcaatactcaatttcttgtttgaagaaagggtgaagggcatcacctctttcatttataggagatgcatgaaatacagaaacgcaagtttgttgttatcctgagaatatatgtaggaagaactacttatcttttatttaagaaaaactaaaacaagggtgtttctcctctatgattaaaagaatgatctcctctaagttaatttttttctccttggaaaattcttcagttctgagctttccatatcttccaactaggctggatcaccaacctgttgaaaccatgccagtctcccctttggacaaatctgggggctgtttaacacctcattggttcttgatgttgtatagctggcatgtttagggaatctctgagctttgaccacacctgcaatatatagggacacattttagcgatgtttgttgctgtttcctccacacccccataaagtttttaccatgcagattgctgattttggactagcaaaacttacagaagttggaagtatgtcgcagtcactgtcaacacgagttgctggtacatttggttacatgcctccagagtaagtgcttgtagtctctctttatttttttctgtgtactaactgacgcatataataggccatacatcatatatcatttataggcttatagcactatctgctatactgatacctatttgcaactagtacagtttagcaccaaagttgtatatggtttacttcccttttttttttttgaacgaactggctaaaaaaagtatagaaattaattatgagctccttgtgtttaagggtccacattgctgactcttccttgatttttgcaaatagagtgatcacttatagctccttgtgttggaaaattctgacaatatttttcagagctcgatatggtgaggtttctcctaaggtggatgtctatgcttttggtgtcgtcctttatgaacttctttcagccaaacaagctattgtgagatcaagtgaatctgttagcgaatcaaaaggactggttttcctggtaatatttttcctgctatcaaattgctgtttttcctgttgtcacttgtaaatgttaaccagaattcatgccatgtgctacaattaaatactcagatcaataaatttaccatccttcttccaatagaaaagtaatttcgttatcagtgtatgtaactacgccgatttgattcattaccaaatgttgtgaat

SEQ ID NO: 1794 - DNA, 2177 bp, Oryza sativa
ttaatagtactccagaacatttgtttgagttgtttctgacctgagagtggtcactgaaagcatcactgtctatgccaaacccatacagcacagggctcagagatgcaatcctcatggaaaggaactgtgtcacaatcagaggtagaatatgttatagctaagcaaaaactcttgtacctttaattttttttttgtattctagtcatgttaattacctcaacttggttctgtaaggactgcacatagttgatgatctcatccaaaatgagagcctttccagtgacctacacagataaatgattttttttcactttcaaagatagtatcaaacatattaacatatacaaaaaaaaattgtcactgcaaataccactagtttagttagtagttaactagtgatctaaccttgtcacaaccagggaccagagcctgcagcatcctcatcctctcactgatcctttctctcctcacctgaagaaaatgccagagcagatagcaaaaaatgagtcccaaacaaccaaagctaatagctgcacaaaccacaagcaaaagatcaaagttgaggaagaaatttaccctctctgcaaggctgtggctatctgttgcttgccctctccttgccctgacatggatgaacccctgaggtgcctcctcctccatctgatccctgctgtgtttcttccctcccctcttcctgccattctcctttgcctcctgattgttcaacacaacatcatatgatgaaacaaagaaacatgagccaagaaattcatcttggaaagttatctgaagctgtattcttgaaaggaaaaaaaaagagattcagaaactgttttttcactgtcatgctcatgtgcttttctaccttggagtgagcagagttgaggctggcagtgtcttcttccctgggcttcctcttcttgtcctgtggagaggtgtcaagaaccacagatgaggtctccattgaggcatcttcagggatggctggagctgtggtggttgctgctcctccatggctgccatggcagaagaggaagccattgttggtgatgaggccatgctccatctgctgtgggaggtgtgagaagcctgccattgccaatgcccttggtgtcctagatgctactacctagctagagctagagatacctatatggtggtggagttgcttcttgttcttggtgtctgaactgaaagatgaagctctctagattgcaacaagttggctccttggtgaccctgctattggtttatataaaagttggggagaggggggattgataagaccaaatcattataaatcaattaattgatggataggttggcaatgggcagtgttaggaaagggcccctgtgtccctttgctgtaggatgaaattgtaactgaagaaaatgcccatcattttattttgtatatactgataggtaggttggctcctctttcttttcttctctttactaggagtatttgctagtcaattagttgtctcattgtgtgtgtaagcaccttttttaaaaaaaaatggcagcagctaattatgtaataagaacacacattcaatttcgtgtgttgaccatatataaattataaaatggtacattgaattattatttgctccacgtctctaaaaatacattttctcaagaaactttattttactgtgttgcttagatcacttattctaagttatttgttaagtttatttttaaatatatttaatttatctctataatcaagtagatatataatctggtaaataatctatttaagcagttgcaattgcttgagttaattgaaaatatcatacttcctggtgtttgcaggagaaaaatagctcaagatatccaacaagacttctttacttaagttcatagctttcaacagaattttgtatacattttctgctaggatataatatgcagagatccttcatttcctgtacatgttgcaaatcttcagtctgtgaaggagaaagctttcagatgtgcagacctaacaaaaacataaagcctgtgaatcattaactgcaaattgaatcctcctagcagtaaacattaactatgctggagtgttggagtaaccgatttcctgatagcagtcaaaggaggctgctttcttctgggtggtgaactgcaaaaacgcagtcctacgatacagtgccagttcgggccccgtt

SEQ ID NO: 1795 - DNA, 761 bp, Oryza sativa
cgactccaaccatctcaaacttcttaatttgtatcactgctatgctattgccattcttcttcttctttagctttggataataaatactcctactatgcaataacaaatactactagcagagtctatcttgttaagccgtgagataattaatccccaaatgggacacttgccaacacatttggctaccaaattggatataattaaaaatgtttatattttggagcaaagagagtagtacaatctaaaagggagtcacaaaaggattggtttctttggaatatttttcatgtggctttgtttgtaacaaaagagattgcatctaaagttctcaaggaaagttgagaatttttgtacttcaatggaaataaacagtgagattatccagaacagagattttcttctatttgattgatttgattgttgtctcccttttctctattcttaagtttcctgttacttttccaaacagagacaccatatataaaaaaaaattaagctgaagttttactaaattttagtgataacaaaaagagaaaaaaaagtctttatgcagagaaaaaggagaacaacctaacaagttcttatctgtaaagttctctcttgaaagttgctatttatgttatgtataaggtgaagaaaatattattttaatctttttaatccttttttctgcaatttttttgctttccttttttttgcgcttttttattacttttttaatcttcacgcatgtttttcaaatgttttgtattgaaagtttt

SEQ ID NO: 1796 - DNA, 502 bp, Oryza sativa
accctcggctacacccaggagcagctcaacaccgtcgggttctgcaaggacgtcggcgccaacatcggcatccacgccggcctcatcgccgaggtcacgccgccatggttcgtcctcgccatcggcgccgcatgaatctcgggggacctcatgctctacctctccgtcaccggccgcgtcggcgccaggaccccgctctggctcgtctgcctctacatcgccgtcggcgccaactcgcaggccttcgccaacaccggcgcgctcgtcacctgcgtcaagaacttccccgagagccgcggcgtcatgctcggcttgctcaaggggttcgtcggcctcagcggcgccatcttcacgcagctctacctctccttctacggcggcggcggcagcaacaccaagccgctcatcctgctcgtcggctggctcccggccgccatctccgtcgcttcctcggcaccatccggatcatacgcgcaccgcgctcgccgaccgcggcgcgccg

SEQ ID NO: 1797 - DNA, 607 bp, Oryza sativa
cgaataatgtggtacaaaattaatcgtgacctcgatcgtgtgtgtagtactgtagccgaccgtcgagcgatcgacgatgaagatgatgacgaggatatcgtatatatggatctcctgcagcccaatctcaataatatgcagaagatgagagtacgatggatgcaatgtcaatctcatctcatcaatggtgtcgctattacagcacgtggttttaataataatccacggtacgtacggtgtctagctgctacttgcactgtgcccctcctctacttaaacgcgccatcgtctggatagctagctacgtactgagctcgagcttaattagctctagctagctgcagcaatggccatgggggctcgcctctgcagcagcagcattattgttgtggtggtcgtcctgattgtggcgacggcggcggaggcgatgcggtgtccggggacgacgagcgtgtaccggcggccgaagaaaaggcggcggacatggtggacatgccactggacgccgacgtgttcgcggagccggcggggaggaacgcgccgcagcaggtgcacataacgctgggcgaccacacggggacggccatgacggtgtcgtgggtgacca

SEQ ID NO: 1798 - DNA, 1343 bp, Oryza sativa
tacccaaagtaatgatgacaatatgagtatgttaaatttccaaatgctgaaatacaagttgtctgataaaactaaaagttctgaaactaatgagtttgtaacattgttgtcgaaactagcttttctagccatcacttgtttgattttgtcgtggtttgctccagccattcaacataacagagttgattgttcctcctgtacaaatgtatggacatatagttacaagtcgtatttaaagtaaagaaagtcaccatgtaaaatgcagagctattttatctagttttctgctagcatgtatagttaccaaaacttcataatttcttcaaataaaggacattgccagagtctgcagtgcaactaattttagtatctaacatgattaaattgagttagaagtcatatgccataactatcatgccactgtatggacatgtgtgttctttggattgatggaaacataaacaaatgtgattaggctcactatatctgacattttttaagccatgcccctgttatttactgacttgtgagacccactgaaatatatatgctttgttacatatgtggtggctatatatagtactgtgttgctaatcatttatatggcatgcatgcttatcttagttagctcagataaacaaaacaaaggcctatggggcagtaacagaagcttatatgccccatatactaataaactaaacaggcaactgtttttgtcagcaaaggggacgtgccaaatactaatacaatccaatgagttaagtagcaaaagtaccagatcatacctggatgctacaccaaaccccgagctgatttagatatttctttcattcattcttccattttctcctctggcctgttacaggatttggccatacacaataagaaattattttttttacaaacagaccatgagcaggaaaacatattgtaaaattttttgcaaaagatcatttcaacatagcagcttgctgaagatttgtaattacctgatcagttcgggaccgtacaaaatttctagcaacattcctaagatgttgtgaagaaatattttgccgggtagtacttgttgttccttgcaaattagcgctgttaaaaagtgctttcacaactgtgttgttctgaatgcttcgagccttctttgttgtgtcatgtggttctctattctcagttggacaatctattgccagatcagacttcacaccataaaacaagaaatatatatattatgattccacatttgacatatataagatatcaaatattggtgaatgtgaacattttggcaatcattacctgttgttccgatgctacgctttgcgtagtaatcattttgagaatat

SEQ ID NO: 1799 - DNA, 647 bp, Oryza sativa
gacccagaagtacaggcaactgggcttttcatacttgttaccaaggttgacgatatgactggagaagacatagcagcatcccctgttttgggtaccttcgaaaatgggaaggtatatgttgcttcagaggcatacgaagatgaaatcactgacttctcgaaaacccaagtacagggtacagatccttcccctataatagctggtgaacagttggtaacaggtatctccaagccaccgtgaataatcggtgacaccatatttgtgttggtgacagctgattcaggtgatccagtagacaaactcagctgaagatccaatttatgagagtttgtcaatggtgaattctcagcaccaacaggggatttcttttgacaatgtaccatatcattgccaaggcaaagctcaaaattcaggccaagatcagctgatgactcctcatcagcctctttcaatgaagatggagacattgcataagctgtggcagaactaactttgctattgtcagatgaacttggtgagtgccctaaacccaaagtaagtaatgggtttccagtaccttctggtcctgccatagcacttcgcttcctttttagtgtttttgagcttgcaatagaaaaactggaatacgttgaatagtcaattgtagt

SEQ ID NO: 1800 - DNA, 1702 bp, Oryza sativa
aaaaaatatataaaaggtttttttatagacaatatggctcaccaaaaaaaccttcaaaatgattattttcttgttttagttcaattcaattcttccatgaacaaaagaaagaggaatccaaattactcatgaagcatcaaggttaactaagctctggggagctttggtgctttaattttttttcccaagagaaaaactactgtcaaacatttgacatgctcaaaagtttcaaggatgggattaaacttgtgttagtggaaattactaaacacatgtaattggaaggtgaaaaacaagaaactgttcaattattgaagatttgtgaaacttgtccgattttttttaataaaacgaatgaccgaacatatgtcaaaaatgttaactgtcttatataaaaaaatatagtttatataaaaaaatgaagacagtataaaggagtataacacagataatgtttcggatgaaatcggttatattaaaacctactgggaattggcgagctgagagcgattcggagcggcgtgttcgtacgcagaggcatccacgtcgcccgcgagcgctgggaggcgggcggaatccgcgccctctcgtgcgtccgcgccgtgcagctcccagccgttcgattcgtcgcagcgacggctaagatcgatcatcgtcaagagtgtggtggcaatttttcaaaaaaaaaaccctccgttgcattgttaatgtgtttagaacccagaaatacggtgcgacgttgtggtcttttacgtataagccctccataaccaagaaaatcttacatgaagaagagagaaatctaaaaataggaccgcgctctgaaaaacgagcatcaaagggcttttttgaaaaacaatatatacctataccccttcccccaaaaccctagaatcattgctttccttcccctctccgccccattgacgccccgcgccgccgctcattctccagcaccaatcctcgcccctgtcggcatcgaaaacgagggaagtgcgcgtgctgatgtttaatcatgcgatgccaatgatgtaagcgcccgacactgccgcgccctgctgcccgtcctccattacctctctctctctctccttgccgttggttcctctgagctcaagctcgatggtgagaggctgtctccgtccgtcggcgacgagtcagtctatctggctttcaatcgggttaggtcttcgtcctctgcatcacctcgtcgtcgatttacctgtctccacaatccaagcccattctgccttcagatctggtgacggctgccttgcagtagccggatttggcgagctcggggggagggggaggagcccacgacgatggtggagctgaagcggatgacagccaccgtggtggtgtagactgattggcccaggaggcggacgcctcgagcttgcgagaagatggcgtcggcacggtgttctccaaggtgggggtccccctcgcgcctttctctcgcctgctttagacaatcacgagccgcctcgcatcgcctaccgccgccgctgcatcctccgtcctcccctcgctgcttcatctggtgccgcctcccataatccagaggagggctccatatggtggtgcagcgcttgatccggagcagctctgatgttggacacgatggcaagccaagggattttaccaccagcatctcctggccaccctcatcacccccctgctgcctcctctaccatct

SEQ ID NO: 1801 - DNA, 1532 bp, Oryza sativa
agtctacttcccctccatcttccttttcttttccaaaagggtttaattaaatcctttttcctttagaccaaaaatctaataatcttagaaattcaatatcttcccaaccgtaagtccgtttgactctgttcaacttccaaaattcctcgaatctcgagatctatctaatggcacgctgagaggtcattaatagggccttattttcgccgtttgttgagttgtcccgtttcgcgtgtagtttcggagcccgaagacccgcagtgcgaggatttcgaggatcaagctcaagatctcgagcaaggcaagccacctttgaacatcttgagcctataattgaacttaattatgttgcttgaaaaatattatgcattgataggatcacacttaatctgctgtcccgtctgcaaggcagattggcggacctacctattttgttgcattgatccttcctctgttaattgctatatcatgttcccttgtaaccacatagtcgtgcctcggtaatcgtgcactctgcacgagtatcgacggtcgccttcaaacttaaaatctgaaaaacatattgggtaaaacttgggttttacaaaagacttggaaaacccgacacctgggtcggtgcttgcgaactaaatgaatttccaaaaccgcggaccggggaacgtaccgggtgtacggtttcccgctcttgcacttaaggatcgtttccttggaatttcatccgaacataagacaagtacgaccacatgggtggaatgggacacccctggctgagtaactagcttatcaggggagccttgatgccgagagacatgtggattcaccggggtggtgtcggggaggacccccgggcttcctggcacagtatggtctgggacctaacctgttgttggtctgggacccctctcgtcggcatatggtaaacctgtgtcggctttcgaaaatgccttgtcatgaaagcttggaggtctcccgacgtggctgatccccacgggctgggtgatccaggttagtaatgtcgtgtgggtaaagtgtacccccctctgcagaggttaacaaactattcgaatagccgtacccacggtcatgggcggatgtgaggtgattcctagcgtagttttgttttactactgcttgtgaaattgctgttgtggaaaggggatcgatgtttggaaaatctgcagctgatgggatcagctaggctcgggtggccgtttgaaagttgtaggcccgggtggccgtttgaaagttgttggccgggtgccaatcttgaacaattcaaaagactgatacattgcacatactccgaccggacgagacgcactgtctcatccgtgtcgtttgagaagcactcacttagttgatttcagaaaagagttcaaataaaatcaattgcaaaaacaacagcctttccttgaagcctgcattaaacacttatttctcatggcttgctgagtactcccgtactcacccttgctctatataaataatcccccccagttgctggagaagatgaagcggatcccgctgacgag

SEQ ID NO: 1802 - DNA, 654 bp, Oryza sativa
gtcatcctccctccgccctgtcgccgatttggccgctagccggagcgccagctcgctggcttgaccgtccaaagtcggttcccctctcccaaaccgacattgccatcctataaagcccaggcgccctccctctcttctcctctcgttgtcccatcgcctccactccattgtcgccgcctcccgtgctctgttcgccgtcaccgtttgtcgtcgcgcgtgtcggaggagccgacacgagcgaggacgcggaaggggactccgggcgcgccctcttcttcctcttccttggcccgaggccgaaacgatcacgtttcgcgccgtcggctctcgtcactgcgcccgcccgcacggtagtgcatccctccgttctccctcctcgttccatctcctccccttagactcgggtagtagcacgagtagcctcttcgtagctagccagcgccgccccgacctttgccgtcgctcgccgtgtgctcgccgctgtcgccgcccgagctcggaaacgcctctcgtcgccggccttcctcgatgcgtttcctcctaatccggcgcaagggacggattcccgtagccgcgtagatgctctcgccgccgggaatcggcccctcgtgacctcgtcgccgttttccccttttctctccgctggtggccgcc

SEQ ID NO: 1803 - DNA, 4343 bp, Oryza sativa
  unsure (1)..(4343): unsure at all n locations
cgtgatatgaatcgatagaacctcgcacacnaacacacgaaacattgctgacagataggttagtataaaggtttcccgcaaatagaagggaatccttgggtttaataacctattaacctcacctcagatcacatgataatgcagtgggatcctatgctcgtaaacacataatactactacataagagtacttaacaagcaagagaaagtatcagagattccattgggggagagaaaaatgtgatctgaaaagttgggatatcctgaaaattcaacctctccttttttttttcctacctgatatatactcctttccacaaagatgaaaggttgcaacaaaaaagacaggatggaattgaaggagtgaccactgcagcacatgagctggtaaaagttctttggaaaagattggcaagatatgattgcttcagcaatagtaaccggtgcttacctggtggatccaataggactcagaatgattcagtataccaatgaccatactggtgatgcattagcttttgaaagacacatatagttgcaaggacattttactttatacagatcccatcaagggattacaatcatccatccatcagcacagcttaacaaataggagatgcaatgaaactacattatggatgataacatttagccatgcactttctctagttgacatcgcaatattaatatcatatgtacatgttgatttcaaggtgttctgtagctactacattcaaggtctatggtgaggataccctagatagatgtgcacacatttctccagcactccagcttagtgacatatagagctttcagctgtggaagcagatgccttgagtgcaacgtgtgatatgtccaagatacactacttacccagtaagaaacaacaacaatatgttgatcctgtcatcctgacagtttgtatgtacagcatttcttaagttaaacaataagcataattctagccctctaacatgccaagctggagcttaaactttacggctagaaattaaatcttcagaagtttatatagtacataattgtatttcacagttactatcctggcatggcattttaactgctaaaacaaaacacatatatggtaaaaagttaatatgcttttcctaacaacagagtaatagatttccacaagtaattcacggcatgaagagaagttaagaactggtgcgaagggagctattatttcatctttcattgtaaaattcccaatcacattgttctaacacttaacctcggttgtatgttcaatacagatgtgctattctgtaatcaagtcactaaggctaagaaaatgaaaacagataaaataactgtagccgaatagtgtacaatccaacccccagcttgaattttctgcagatagaaatgacatcaagtcagattaccttttgcagtaactaatgctctggtatcagaaaccaaacataagcaagaaagagatagcactatttcatgggaataagttgaaaacacaaattagaagttttgtatcgctaccaggggtaattttattacaaattgtccaaaaccaaagtgattccaatgcaacccattgccaattattacttaagggtaaagtatatgaagccagaattgattattgaaatagaccaaagatctttgaaaagttcttcgataagggtctcaaaaaaaggcggggaaaaggctagagcattcagaatatgaacattaaagatcaccaccactctcaatagtttaatacaacaatcttactgataatttaacctagaatccggattataaaaggttatccataatgtgtgtcctagtgatctattaaaggagttaattggcccatcacaactggaagacgtattagcatttaagtaatgataaactcagacaggtatctcattattgtcaacattattctgaactggaaactccatgcaattttatttgaaaaaaccgaaaataagaacaaatatagggaagaagtgaaagcatacaaaccacaatgaatgctcacacaaggatattagtcaagcacagaagtatcatctaaaaatctagaccaacatgatccattgtgcaactttctagtttctaataccaaaattcgtttgatactttgatgaggatttaagaaaccaaaattaggattaaaacctatcatacgttttcctgcaaaataacactggatgattaaaggcccagcaaaatggttgggacatgatgttgcctggaaacatgcaataaaatcagagtattcaatagttctatgttgtatgaaatgaccgtttttaacaattgagtagacatatcctcattttaacacaaggcaagaatgatttaacaagaaaatacagaaaaggtgtagacaaaacaaaagattaaaaatgcagtccttaccctaagagacaagaagtacgagggtgcagatgaaggtaatagaccctcataaccaatatcatatgcaatccttccatcagcattaaacagcccatagtgcctctccgagctaggtccaggcttcgaattctcattaaacaacgcaaagatgtatgctttgactggtctctttggcttgagaggagttcctttcctcagaaagagcctctttcggaggttgaaattgtaagtccttgcattctcaactgaagctcctgcctcagtttgatctccactagaagcccagccagtctccgctactcggacctccatgtctctatacccagcggcctgcagagcagcataagctgcatctatctgagcatcgaacatgttatcataatgcagactagtattcgggtcaacaattccaggattgggcttgaagagagcgtaattaatgtcaatatgttctggatcacttatgtaggccaaaaagggatatgcgttgacatagaaaggtgagccaatttgttgaaagaagtccagcagtggtttcatatacaccatgacatcttccttgaaaacacatgcagaaggtggatatgaagtagcaaaaacagcttctgagtgtggtgtgaatagctcaattttgtcttgcaagtgaaatttcttgagtccattatagacattcttcacagcttgaacgaggggctcggccaagcttgtatcttgacctcccagcacctcatttcccacagtgatcccaactatgcgtgtctgaggaagatagggctgcacattctcattcagccagtcgatcgacctgctctcattcgccgcaaaatccttcacgagctcattggggatggcgataaccagattgagcccagatcccttgaatgcatcaagaacgctgtgatcggaatcgtatatcttgacattccttatctttgaagctctcaggagttgtactactttatccggagaagggatgttgtttgctattctcccgtagtttatcccatagcccccgggaaacgcttccacggctctaggaccttgtcacaacaaataccaacaatcaaatttcatatcattaataccaaatcaaggaattatttttttttctaggcatcgcaatcgaaagcatgaaaggctcaataactggtcaagaaagagaattggcaagagaattgagttgaattggatggaaagatgggaaaaaaaatttcagtaccatgtgaagggaaggcgaggaggaggcagaagagcagcagcatccagtgagcacgcccgctccgactccgactccgacaactcatcatcatcaacgtcgccttcatagcagggacaccacaatccgcttcacagccagaagtggtggtggtggtagcctcagttccagggcggggcatggcgccgcggcggcaagttccatagacggaccaccgctccgccacggccgagcacctccgagcaatcttggcccgccgccttctccacggattcaccaagaacggtaaagaatccgcaagaaccggatccctcccgccgccgaccaatcaaccaacgcaccaccaccaccaccaacaacaacaacaccaacacgaaggaatctcgattcccgctcgttatagtccacaactcctcctcctcctcctcctcccagtggtaagcacacacctagtcacaactccactcttctcgcggactactaaatataaccaaccaaccaagcgaagcagcagcagcgaagcaagcaagaagggtggggttaaggaaggattaggggggtttgcttagcggggaggagattggggggggggttctatttggatggattgaagaggaacactcgcatggcttcaaataatatcttttgtgatgatgactatgaaagccatgccattccaggtggtgaggccacctcacgatttcaatgggtttatttggggctacaactgcccg

SEQ ID NO: 1804 - DNA, 8208 bp, Oryza sativa
  unsure (1)..(8208): unsure at all n locations
atgacgccgcttgtagtcnnnnnnnnnnnnnnnnnnnnnnnnnnnnnnnnnnnnnnnnnnnnnnnnnnnnnntctgctagaaacttgtggtatttatatatttttaagctcagatggaatggatagtgtttgtacaattacacatcagtaggtagcatttaatctcgattacatcaaaaaaatgacatggtttgatgcccaaccaactgcattggccattaatggctgggcctaaaatgcaaagctactgtgacaagagagccttgtggcagctgcagcaccggctccccggcgccacggcggcgccgccgtcgacggtgttcttgccgtccaggtacctgccggcgagcatgtcgaagaggaagccggcgccgacgccgacggcgaagtcgatggtgtagtggcccctgcaggcgaacagcctgacgccctggagcaagttgagcgcgtcgtanaagcgcgccatgccgcggcgccccgcgcggcgcatgttctttgcggcgatcaccgcgccggcgacgtggccggagaagaagaggaagaaagagacgttgtcgacggggaaattcatgccggagcccaggaactcggtcggcagcggaagctgcgtggcgcagccgagcgcgccgcgggaggtgaacatcatcatcgcccccacgggggcgcgcgggcggccctcgccgaggatcgcccccaggatgtacgccgcctgcatcgccacgaacacctgcatcgcatcgcatgcatgcagacattggcggcattgtttagttccaaactttttcttcaaatttccaaattttctatcatataaaaattttcttatacacataaacttccaacttttccatcacatcatttcaattttaaccaaacttctaattttggcgtgaactaaacgcacccaggtcaggtcacgtcacgtcacattcatcccagattctgctgctactaccagtcgtggccaaggggaccaggttgccagctagagagatgcagaatcttatcacgaaatccatggatatcgtgaacgcgtgatgcagccattggaagcctttatcgcaaaaacattgggcttttctccaacgattggtttttcccctaccagatttgcctttttcttctgggaaaagtttgagattttcatcagactgtttcttcttcattcaaagattgggtttttcttctgggaaaagattgtggttttcatcaaagattgtttctttttttccttcaaagattgtgttcttctcctgggaaaagattgtggttttcatcaaagattgtttcttttctcctacaaagacttggtttttcttctgggaaaacattgtgattttcgtcaaagattgttcttttctccttcacaaagattgggtttttcttctgggaaaaggctggggttgtgctggtgtgtggattttggtggcgttggtgcagcggcgccatcagtttcgcgtgtgctcgtcgctgtccaccagcttcgtcctgctacgtgcctaactggtcctaaaaacttgtggagtacaagaactacggatatgacgagaacggtgcatagccagctttgatttcttctcaaggattggcagtttctaataaggtggtaattaacctagcaaaattcttttaaggtctattcggatttgaggaatttcacgggaattttggaggaactcaagtgtaccctatgaaaatcatataaaactctcgcgttttgaaggaacctctactgaatagaagaatgcatgatgctttggagtttgttggtacaaaccagtatcctgcttgggccaggtaaatgtatgacaaacctagctaatgtacctttctacatgacagaataattatgttaactgtaaatattactactagtcacatttgcctagtttgtgttttctgaaaccatactgctagagacaaaatttttggttggacgacaaactttgccatagccaaccaatccaagcatcgtatgccacacaaaatgcaaactaataagtgtagcaaagtttggctagaaaccgactttagcacaagtactgcataatttcaagggcctcattaaatacagcttgccaaacagtatcacccaactaactgattagcccctgtattttttttcagctccttcacctgattattatggtaggttttttcttcagctcctttaaaattatgtttttcctcaaaacctacatttgcttacatccttgttttaatctatttgtgctaagttttgtatcaaaatgattaatctgtatgtataactgtgcagattactcactatacttaacctgatcaaataataatctatttctaaccggcctaattaatcggcttaataaaccattggtactgtctaaagtttggcgtgtcaaattgaccgtagctttacggcattgcgcgtaatgacagctattagtgctggcaaggacagatccaagtgaaaaacaaaaaaaaaaagaaataaaagaaaagaaaagaaaatttactgcaatgtgcagaggagcagcaggttcattgaatctggattggtactcaccgtgttgagcgcggcgaggagcgagttgagccatgggcgggcggcgatccccgcgtggagcgcggcggtggcggcaaaaccgaggtcgaccggcggcgcggcgggcggcaccatggggatggtgtactccacggccatgaacagcagcagcccgcacccgaacgccgccgccgccgggtgccgccgaaggacccccgccacccccgccgccgagcaccactccggcctcctccacccacccacctggccgccgcggcggacgccgccgccttccctttccatcgcgccaccagctgctctgtccggcatcggcgccgggtggacgaccttgtcggcgcgccgccgcgcgccgccgttcgcgggcagcaccacgacggcctcggcgttgcccatggaggatgcggtgttgcccgtgaggctggacggcgncggcggcggcatgggcgggggtgggcgagtggctgggcgcgcagcgagcaggtggaggtggcgccggtggacgcggggggcggtcggtggtggcgcacggcttggcggggcgggtgatgcgggggatttttttttttctggtgattttgacgggttttttgtttggttttataagtgaattttttttggtggtggggacgcggcggagatctcaagggtaggaaaggagaggaaagaaaggaggcggcggtggagttaatgttgtacggaaggcggtcatctgctagggttaacggggaaaaagaatatgtgatggaaactattcatgtaaaaagtctgaaaactaccgctaaataaaaaaaataaaaaagatgtataaaatttgtccgtgttattgtaagtaaaatatttactcacagatttacttataagtaataattttactcatgatgacgtggacgaatatcaaaaatttaaatttttgatccaacggtagttttcgagttttcattatataaggtttgcattacttttttttttgctaactgttaggttggcaaataaaagtacttcctcccttcattgttttaggaggatcaaatcttatcctcagattgtaacatcttgtaatagagatagtacagtaccttggccctaaaataacttatagagtctaatcatttaaattcaaattagcatgaggaaaacaaattattcattattaacaagaaagtttgattggttggtggataaataaaagatgttaaagataatatttatataaccatcgttttacgaaagatatttgaaagatgaatccgttgctaatgccctgtttagatcccatcaaaaaaactttacaccctgtcacatggaacgtttaaacacttttataaagtattaaatataggctaaaaaataactaattgcatagattgagactaatttacgagacgaatcttttaaacctaattgctacaatatttgataatgtggtgctacagtaaactcttactaatgatagattaattaggcttaataaattcatctcgcagtttattaacggattcagtaattatttttttattagtacccgaacactccatgcgatgccttatataatacccgatgtgacacgcgcgaaactttacacccctgatctaaacaccccctaaattaataaatatgcttacagttctgactaattgtcaatcaaaatctacaaagtttgacttttcaaaatattatacatcctataatatcatttttttaagaacatagggggtactgtaattggtttatgtttgtccgggagtaactaattgaactccctaatcccattatcaatgacctgtcgattaaaagttaggagaacgaggagaagacgtcgtgaccactgaccatcaccgcggacagtagtgtgtaccgcgtgcgctggtctggcacgcacaagcgaaatctggtgtccccattgcatctctgctactatctcgcgccgaccatccaaacaccggcagtttcccacttttgctgtacaaatccaggtgaaatttccagcacaatgttaccactttcttgctcagttggccgtcggccctacagtatgcctgattctaaatttggattttttttttgtttgcagtttttcaagcttttaaacggcactaaatccagctgtatgtttcagaaaatattttactctgttcgtcctaaaacatagtattagcttttgtcgagatacatatatacctaaaattttgttatatttgagactaacagagtatataaaagttttctttagttttctaaagcaactttttattagttaatttattcacctataccctcatatagcttttttaaaaaatagataatccataaatttttcatatatctcaaacaagactatagctgagggaacaaatgcaatgtttttttttatgcactaaagagacttgtgatgatttgggtgtgttttatgttacatgttttcaactcgtaatatctcgttttccatgcgcacacttatcaaattgttaaatgatatatttatttttttaataaaatatataagaaagtttctttaaaaatcatattatttataagataatttataggtaatactcaattaataatgcgcaaatgagccactcgttttacgtgcgagagagaagttcccaaccttctctgttgaacacactctacaagtgtccgtgaaaattactaggagtgcttaatagtgtaattgctaggagtgtgtcgtttgaatcccaaggtttcatttatatatttttttctgattattatttgataaccatgttccttcttggttgtaaaataagtactaattatggccagctgctggtaggataggtcggtttgtttcagtttgaggtcgatcagggcgacgccgacgtgatatccagatggtccaagcaaatgcttggtcgcaacgggggaaaaccgaacggctgtggcactccactccactcacttgagcacgaaatggcgccacgcttggggcgtgtctctcacgcagtcacgccttctgccgcctgtcgatcaaaggaagggtgtctaacacacaaatcatgcccaagattggcaatcatcagggcagctaattagtaagtaaaagttggtgtcttctgttaattaattgattgatttgatagcataggtgaacatctaaatgttgcagttgggggtgatggcaaaggtcattgtaaaatttcagttgggagggaacaatgatgctaatatgctgggtttaaaattccagaacagtcctatcgaaccttccttccgatatgataatatttcggtcaaatttttttaaaaaatattattttgtgaatttggcatattttgtttaaatttgacctatttttgttcaaaaatcaaataatttcgcattaaaatttccgaaatttcggtatatcggtaccctccgatacaaataccgaaagcgaaagattaaaccctgctaatatgtgcaaaattttacctaaagcctagtggttgttttctgattacatgaaaaacatatacgcccgttactgatacaaatccacaggcttaagaaaatcgagactagcagtaaatccctgaccttatcagtaattcttgccacgtcaatttggtcctcgtggagaaattaatcaggtacagttgagtagttgacacgccattatgtgagaagattaaccaaattgttcgggtcactaatactctcacgatgggaagaagcagcaaatataatccaaatttatttgaggaagtttatggggatggagtgtttatcactgatgatgactccgtcagcaaacgcgcgcttgaatcgaatgaatttttaagatgactttgtgagcttagctgtagattgtagtgatagtctgagcagatagcacggcctatcaagcctgaccaggaatggatccatgttggccaattgacttggaacatctggacttctggagtagtaacattaattaattgactaataacaacttctaagaagtttatttttctactcatgtttatcccaaaaataagtttatttttaaataactattgcatcagagtttgtgaaaaaaatgtattgtgaatagataaggagagaaataattgccttggatttaaaaaaaatgagggtgttgtaatattttgttttattaatatgtgtgtgatgattgaaacataaacttattttgggatatagaggttacgcatagcaccccactgcatttctttcaatatttggacatggagcatgctagctagaccactggcaaagggtattgtccataatataataatatattttttctacttcctccctctatttttggagtttttcatgaagattaaaaaaatgtgaaattgaatgagatatgattataattattaagatgagaaagcacaaactaaataaaatatggttgtaattggttaagatgatggagtaggcaggaaagtttgctatatcctagaataaatctggaattctagaatttgttatatttcagaatagagggatgatttttatgctaagataaaataaaaaaacagtttttatcattggttatttataaaacttgtaatcttatttcccctttttatagttcctctcgttataaatatttagttaaataaacttttaatattttgaccatcaattttatatataataagtttataaaacctaatatatttttatcataacatggtattactttttaagacaagtatacacgtgccatgttttaatcttttttataaaaaaagcactgttattgatggtaaaaattttaaaagttaacagaagaaacttgggaccctttgatttataggattggcaaaggattttcatagaattcaaattcctatgtattttttcctaaatgttcctttgattcataggtaagaaaggaaactcatagtattgtatttatatgcttcacatttcatacaaaaaaaatagtgactgagttcgtttcttacagttcccaactcaccttctttgttttcggcatgcacgcttttcaaacggttaaaccatgcattttttttaaaaaaaattctataggaaagttgtttaaaaaaatcatattaatcaatttctcaagttttgtaagctaatactccctccgtcccataatataagggattttgagtttttgccngccacgccagtgggcttcttttttcccatttacagctccatgcatgcgtaaaccagttaaagtgcacccaatagttttatgtacaaagacacaaaatttgcatgtatccaactcccaaatttaactgcagctggttctggaaaaaatatgcgttccttctgctcaaatatatatcttcctagctcattagcatatagcacttcaaaccaactccgttccttttggggtgccactgataccagctttagctccatataatgtagaggcggagctagagctggagctttgccaaacaggccctactttcacacattcacatatagtcatgaatggctttgcattggccaaaactttggctaacttaattactctaggtagccagattcatggctggttcctatagttgctcccagctgttaactttcatagaaggatcacgtctggggaacagctgcttcggaatttctatttacttcgaatattacgaagcctgttgggtcatttattggctcccaatttgaactacgccattgttcctttatggagtaa

SEQ ID NO: 1805 - DNA, 6363 bp, Oryza sativa
  unsure (1)..(6363): unsure at all n locations
catgctgnntttgtaaaatcanagtcatctgccacaanacnananggtgcatgtaagatccccttgaggtataaaaagatgaccttgcccacttaaaggagggattttttttgttttttattagaagggatcnacaaggatcagggagggaaagagtgagagctctgtggttctccagctattttgtatcttcttcatacatagatccaccaaaacacaggagtagggtattacgcttctcagcggcccgaacctgtatacatcgcccgtgtcttgtgtgtttccattctcgcgaaccttccacacacacctagagcttagaatctcacccagggcccccggccgaaccgacaaaggggggcctgcacggtctcccggtgaggagccccacgctccgtcagagtagtaacaaaccatgtcaatttatcgtatcctcagtttagttactagtccagctttcacatcctaggtacacggaacaatttagtcgttggtacttaccatcaatgatcagtcccactgttaatcagatgatttgatgctgcaatcataccaggatagcaataatactagcacggacgagattcccctttcttcaggcctcaagacacaagcaatgcaacgacggcgaggttgtctccaccctcatcgtctttagtccctcttttctccgacgccggcatcaccaccggcggaaaggctacaagtggatcaactcataaaccaatagccgttgacgataagattataattagatcaatccataaacctatcgacaatatgaacataagtggatcaatctataaacccatgaacagaccaaataaacggataaccctgccgccttagccggcgaacaacaccgtgtcatggcagcatcagtcaagcaattgtttggccccaatcagattcagaagcaggcagagatttctttctgcaaaactggtcgctttcatttcatgagtcagagtctactcctgcctttatcaaaccagatcatcctccctgctgcttttttggtattcaaatcagatcgtgctggcttacgtcgcaacacgcgagaaaaggcagggtttttcaaaagattagatcatcagtaccctggaccaaaaagttcagatacgaaaaacaattaacgtatggagtagatcaaattagctgatgactgaagattcacagccataagcgaaaaccacatctgaaagaaacctgtcaatgcgacaggtaaaaagttcagaatatactaataatcgcgaccaaattttcaatttgtaggtcaaatacagtgtgtcccaatggcgttgtccgcagcaatcgccaaacaaatagcaagcatgactggcttttgaatgagctgagatgcatatatcaaaagcaaactgcatctttgccagcaacatcaaaagacagctcacgcttcgtatcagacccgaatttgaaggttggggctgcttcttctgcactgtgggaactgctcggcaagtcaaaggagaaaacaagtttaccggtagtgcttgatgaaccaaaggtaaacttgggtatatctgcaccgtcagctgacgggatacttggtggctgtgacagagtcggagtaggtggtggctcaggaagagacattgaggtttttggaacaggaaatgtgaaggccaaaccattgcctgtgcttttatccaagacctgagcagctgatgtggttgccgagtcagattctgaagtatgttgtgaagagggcattgacttggtcccactattctctatctttggactagattccacagcattggagctgcttggaggagccagaaccttaacaaaagtaattagatcaaggtgattaaagaattccacatttaatgctatatgcatctgctaagtaatttgtttaatcagaaacaaacataaatatggaatcacagaagaatatataatgagaattgaaaacatgtttggcattgcactagttttccagtaattcaatcttagttcacataaccaagactttgtgttcaattaaatatatagtaaccattggcaacagtaaactaaggatctcctatttcaaactcaatatatgtattttaacaaataggacctgagcagaatatactagagaagaaagagataaatataccttatttgcatctgaaatttcctgttgagcactaccactatcgttgatgctgctatgtctatgactatcagtagcaggcccattatgctggatgttggtgacaacagaggaagtagttctctttgctgaagtccaccttagctctagtggctttgctgtaggagaaggaatagttctctctagatgctggagtattttgtgagctgttttgcttgacttgggatgaacagataaagccgcagatttggaatggggcatattgtctaccattgaaacaaacccgagcgatgaaccactttcagtggtgccttcgccatgatgtccttgaagggcggatccatcattcttcttagaagcagaacatttctttgcaaataagggagtagttgcaccaacagtatctccatatgcttctttggaatatgttgttgacggttgcgccccaagaacagcaccaagaggtgctgttttatcctcaaatattgcctacattttgaacagggggatgagggcaggagaaactgtgtattatacgattgcaggttgtgatagaaaaaaaggttcatttactgacacctcagaagtcaggtaatcaccacatgaccacaacagttgtaagatatagcaaacaattacgtatcttactctcagttgtaactagcaaatcacagttcaaatctcagttgcatgaactacaggcatgtattttatatcaaaatctacggatatttaaacctttggaaggaaggatggtgtcactaatccacattaggagataagttgaatagcaacaatcaatgtgctcacaacagtttcaacatgaaatgcagctatctgggcttcattctgctgaggctactaaatagtttggatgttcggtctgagtggaccagtatgagttcatcttaacccaactcggcagtgtgaactaaaaccttctacttcggtttgaggaatggaatgagtatgtatatcaacaccccactccatatggctacaatggaaggtttgaaacaatttcgtgtcaacaacagaaaatatagatggttggcaaaaggaagcatatgtgaggttatgcttcaaagaacactatgaaataaacatatatatcatggtgatagtgaagaaacattaacttgaatgacaataccttacttccaacagggaaaggagatgaaaattgtggctttccagatgagttattataggcatcacgggatcctgtgtactgtaaacagataataaatgaacggtaaatgtatagccctcgaatatgagatttcaatgtttctttctagttgcagtgttacagtgaagctcatgagacatgcagatatcacacacaaaataaaatacaatcataagaaagttgtgtataccttgttagatcttgggaaaactgagccaatataagttgtgcgagaggaagttggaggcagagttcttcctttattgctctgtggtgtaagataattcggatagtttcggacaacagatcctggccagcatacaggagaatctgtagctattttagggaaaacctttgaggatgaattctctacctcaactccatgactcaaagctctgaatttcctcttttgagactcttgtacagatgctgaggtctgtgcttccatataggcttttgcaagttcaattggtgatgaggcaacatcaagcacctaacatgccattaaaagaaagtgatcaaatcagccataagtctatagatcaggcaagggaggaaagaaattggtatttcttaaacattgtgaataatttttgctcatgcgtgttcttaccagtatttaattacacaattaagagtaaataacaactgcagaataattcaggaaacatggatgcgtataatcaaatttctaaaccatccaaaccataattcacatcccatagaaataacaaggaaaaatagcctccacaaatgcttgagaacattgtttgtacagaaacaaaaagatgttgaaattgcacagatatgaatgtcttacatttgatggtacaaagacttcagtcccacaaggtgatcgaacatcaatctcttttgcaggagtggaccatctgtctgaaaacggaatggcttcgaaacctttagtggaagaccttggaactctctgatattcattaaaatgatcaggagtccttgagcgcataatctctataaggcgttctgtttcatccctgtaagagcaacatgatgcacatttaactatatttcaaatttcaattatcaaaagcaaaaaaattaagtgcttccagccaataagatttaggtcaaacacaagataacaaattgtcatcttactttgcaaacgattttcaagcagttcagcaaactatgttataaattttaaataaaatcagaacaaagctttagaggtgtaaaagaacctgcctagaaaaatgtttctgtttgatgatattctcaatttcagcgagaccgctgccatcgttttgatttctacaatcaccttcctggagcaggctggctttattatccagggctgtagaattggtgttccattctatagaatgcctatgtgtctgcatttttggatcaaagagaaagatatcaaaagctgccaacagataataatttatgttgtaaacatgctaacagaaacagactaagggaggagtaaatgtagtattgcccttgcaaactaaagttccgacaatttgaacaaaagcttctggcagttctcaacaaatacactaagctcaaaagagaaatatgttcatcatcatttagccacaacagtatatggacttgaaaggattagttcactaaaccaatgagcagatgagggaagtgggaaatggactctcctcaaatggctggtgagacagcggaaatatataagagcatcatgttccttaactgtgctcttaactgaaaagcagtttaaacttaggtgtgatgttacattttctactatactactgaagtactgatactgatacagcaggtcattttgtaaatcactaatatttaacacgatctacattctccttgctgctgcagcatttcttggattatctcattatatgacaaataagctctatatgcagtacacctgtaagtttacagtacgagccagaaagcaatcaatgcgtttaagattcaagaaaaaggaactgcacttacttcattggttacttccagcgattcacgccaggccatttgattatcgtctgcagacattagaaacacacaaaagggtaatccacgtcaaaacatggacatggtttgcactttgcacagacaaaaaataacgaactggatcacaatgtggatgaaacaaacagaaatagcttcttctatatctataccaaagtagaaaaacaaacaacttggctggtgtacaggagaaacagaagtacatatgagctaacaataatacccattggcgatgattctcaaaagctactccacttgattcatgcccaactacgcaatgccaaccttgtaacagaggatctggatccccgagacaccaaccattatgcccattccatagagcaaaaacatcccaaaccacataagatgattcacacaccaacaaattagttaccgaagctgcacgtcctctcaataagttgcatcatagacttctgctgtgcctgtggcacacacggcactaaaccctagattaatgcatcggcaagaggcaatctcgagcaagttcccattcactacccaaccgcaccgatcttaaaccctaacaagccccaactcaaaaacgcgagccagtggcaatcgcatccgcctcccctccccctcacccccccacccttgattcctctctagtcctaggaatggcacggctggcccaatcgcatccgcgaaacaaccacggagcagaaggagatgtgggttgggggattaccggaggcggcggcggcctntattttgttagacctgtgaccaggaggggactattcctttattcgacaaaaagccgggtgtatcaacccgcatggagaatgccgacccggaaggggatgcggggatttaattatcgacagagagacatgacttgagggttaccttcctgatgacgacgcgcgtgtccagatcgtattattaaataacctctttctccaaaccccgtctccaaaagaaaatatatttaccacaataacctcctcccaccatgaactatttcctccttccgcgtacaatcgcgttgaaccatccgcagtgtctattt

SEQ ID NO: 1806 - DNA, 2397 bp, Oryza sativa
gaaggtacagatatcttaagctagttattgttttcaatttgttcccttattaatactacacttttcatatatgtaggatctgctgttgaattaggatgtgttgattaacctgcaattttgttcatagatttaatcggatgcagctattcctttgcttttatgtgtgtaatagtttttttttacattggcttttgaagttctgatactccatattcttgaacaatacatttctgatggataaaataaggtgtgtgtgtatatatatatatatatatatatatatatatatatctttgttacactgaaaaaggttatgtggccttgaccagttttgaactttacttgattcgaattattcaggagaatgatatcatatgacttgacattgctattttgaaactcttcactaggaagatgtttatggaagtaaggtgttgcctactgtaggagtaagatgtattagtgattagtggatggtatctatgtaaagtagataacacatgtaccaaccatttcaagtttttaatacttcccgtcagtccttttatttttccagggcatcccagtatttgccattggtgttggacagagtacatatgacaaagcttcggtaattgctcatatacttcttattgctttctgccctgtagttaatgaaatacagacttatgagttcctatagcttgtcagatttcatccttgaaatgtctttctagtgaattgataagtagatcgcacctcatacctttctctctaagtacattattaatgatcacgcgttcatttacaggttcattactatgtgcaatctcatattcaaatcaatgagtaccgtgaccgtattgttttggtgagtgcactactaatatttcttgctcaattaatagattgtttatatgagttttcttcacacgtatatttgctttcttatgttccatctagcctatggcatcaaagaagtttgggcggcctattagcacctgtataaaggttctagatatgactggattgaaattgtcagcactcaaccaaatgaaggtactgcatacatggacgtggcatattcaaatgtttaatttctgtataagatctgcatatcatgaacaattatccattatttgtgctgctagtgattagataccattgatggatgacagattttgactgcaatatctactgttgacgatctgaattaccctgaaaaggcagagacctattatatagttaatgctccatatatattctcggcatgttggaaggtacagtacctaatattattttccctagtttttcattagttctttattttgaaacataaaacagttcatttggtttcgctactaggttgtgaagcctctcttgcaagagaggacacggaagaaggttcacgttttgcatggttgtgggagagatgagcttctaaaggtaagattgcttgcaattactaatattcttttcaaattgctatagttatgtttactctggtaattcattgctgggcattatattatcgcattcctatttaaaagtcactcacttaggagaaccttttgttccatggaacttgatcataatattcctatcattttattcttttgcattcgcaatactatgatgatcaacgcacgcatttctgtcaaaactacgcagattatggaccactcctcccttccccatttctgtcagcgggaaggctcaggatcatctaaaaattcgtcgaacgacgtcaacaattgcttctctctcgatcatcctttccaccaagagctctaccactacattgacgagcaggcattgaaccaggagctcatcaagcagggctccctgcatgtgaatatccctgaccaagatcctgaggatgccaagatcgtcgaggtcatcgaagccgagttccataagctcggcgagcagaacggttctgtcaatggcgaacacaaagaatgaacaggtggtcgttgaagatgatcagctgccatagcttacctacaacacctttggtggtttgcttctgacgattcttttctgtgtcgctgtgttggcatggccacccctgttgttttcctgggctataggtgttacagatttacaatagcacattcctgcagttgtccatgatgcaaactgaggaaagaacttggtcacggtataccagttgaaatagtcagacataatcacctgtaaacttgcaatgcactatccaatatctctatatatgtatgctaatcttatctgataccagggaaatcatatctgaattctgaaatcatcttcagagaaaatgtagtactgagtcggtaacaaacgatacattaccagttcactatcaatctgtcacctaaattctcatatgattttgtctggttctctgctagaaacttgtggtatttatatattttt

SEQ ID NO: 1807 - DNA, 531 bp, Oryza sativa
acagcagaacgcccttgcatggcttcaagagaccacctttgaagaaatcaggtcgttgaagaggaagcatgacaagctcgtgaaggcattctttgatatcagccagtgctccaatgtcatcaaatgtcactcctatttcattggctggtataaccgttggtcggatcttcttttcatactcattgtctggaacgacctgtaagttaagaatagcaaaattttaaacatgtaattaaactaggaaaattacttaattataacttattgtagttgaaacaatgtattaccatctctgtctcatcctttgcttccactgtatctttcccaaggtcgttgctctcttggaatatgcgtaatccatgggataagctgtgaaagtgccatgttagcaaaagcgagataaagcaacaatggaccacctcaaactcaaagtaaatttagctaacctctccgaagatatgacaagattcccgtttctgtatttagggttcttgttattcatcagatggtaagagacagatggggttataa

SEQ ID NO: 1808 - DNA, 606 bp, Oryza sativa
ccatgagccttgcagaaatcggtgctcccctgcgcactcttcgcgcagccctcaaacttgcacctcttgccacctccatggcgcacgcagtactctgtacgccctctagcactcttggtgcaaccagaaatagcacacctcttcccaccaccatgagcaacacagtattgagttccgccatgcacgctcttcgggcacacaccaccaccctgaaataagcatcgcttgcctccaccgtggcccttgcaaaagagagtgctgccttcagctcctttgttgcaacccgagaatgtgcatcgctttcctccaccatgcgccttgcagaactttgtgcttccctgtgcacccttcgtgcattctggaaattggcaacgcctcccacccccatgagagatgcagaagcctgaatgaccttcggcgctcctgatacagttctccttctgacatcttttgccacctccatgcctgatgcacaagccagatttgccacgtgcagcccgggaacaaccatcatgactgcagcggcgaccaccaccatgagctatacagtggtctgtgcgcccttcggcactctttgtgcatccaagaaattggcatctccttcct

SEQ ID NO: 1809 - DNA, 584 bp, Oryza sativa
tgcctgcaggtcgactctagaggatcccctacctcacgcggcgtactcgttgtcgatgatccatagtcttcgagcaggtgcaagactgatggttcgtggggatctatgtcgattaccccaacgaatcgatctgaaatcagcgtcgctccttgttccttgtgttcatccctgatggggatgcgtgactgctggaccttagaaggtggcgtcttcatggcgctgagaaagaccttgcagctcgagaggttgtgattctttgtcttgtgaattggacaatagacatcacgagttggagaggtacgctgaattccacgctctttgcaggcacgaatttcagcatggacgttgagaaagacccaacaggcttgcagggtgtgtttcctggttttgtggataggacaccaggaccttgtcacctcggaagtaatcctcgtcggctcgtgattcctgtcggaaagacaaggcttggccgcactaggatccttctcgggctcggatgttgtcgacgttcctatctccgcttcggcgggaggatccttcgacatggagtcgcctgggttgtagccactgcattctcgtttccg

SEQ ID NO: 1810 - DNA, 587 bp, Oryza sativa
ttctcgatgaggagccccttctgcaagctgtagctgcctagctccacctccgacctcaccgtcaccgccttgccgcgcaccgtcgcgtagaagcggacgtacgtcgcctgcccctccgcgagcaccatctccggccgctcgtcgtcgtcgacgtacacggcgccctcggcctccgcctcggtggcgccgaacgggaacgcgaccaccagcgtgaacggcgtcgcgcgggcctccttggagatcgtcccgccgcgctgcatcgggaggatcgtgttctggaacacgtgcacgttgatctcgttgagcggcgcgtccagcttcacggcgccctcgcccctggacaccaccaccttggtcgtgtcgaacaggttgtaccagctccccggcgggaacatggcgctcaccgaggtggcgccctgctcgagcaccggcgacaccatgacgctcgcgccgagcaggtactgcgtgctcagcccgtagcacggcgtgaagtccgggaacgagaagaacaccggccgcgccaccggagcgccggtgagatgcgcctggtagttgagcgtgtacaggtaagggagcacgctgtaccg

SEQ ID NO: 1811 - DNA, 897 bp, Oryza sativa
tacagcagctagctgaaagactgaatcactgaaacaagaggctttacctaacattgaaagacaccagtcaatgcactgttcattgaatcgttgactgactagaaggtggggccgtctcaattaaagacagaaagaaaaaggaaaggatgagaagaagaagccaataaagataagtattggtgcatctcccctcctatagtcctagggagtctatgttgctagttggatcctacaataacatgcatttctgatcatttcaaagatcaactcagaaaggggaggcaaccatggatgcacactctgctttcatgtttctcctcactttgatccatcttcttttgcagatatcagctcgtgatttcctctcacctggttcctctctctcagtagagcgcagttctgatgtgctctactcaccagatggtactttcgcctgcgggttctacaacatctcccccaattcctccatcttcgcagtttggttctccaactcagctgaaaagacagttgtgtggagtgcaaatcttggtcgtcctgtgtacacctggggatccaagatcaagttaaacatcgacggaaatatggttttacaagactacggtggtcagattgtgtggacaaacaatgtgagctcttcaaatgtccaagaggctcggttattggagagaggaaacctcatcgtgaaaggccaaggtgatacaattctatggcaaagctttgcttctccaactgatactttgctacccaatcagattattaatggtactataaaactggtatctagtactagtagtaatagattacttgttcctggccactacagctttcattttgatgatcaacatttgcttacattgtttgatgacgagaaggatatctcttttatctattggccaa

SEQ ID NO: 1812 - DNA, 704 bp, Oryza sativa
tgtacccattacagatgcaaatactattatgccctgaaaataacaggttattcagttagctccaatagttgtcatgaagcaataagaagcaggtaatctgaaatctgaaaactctggaattttgtctagatcattttagtatctctagcataaagcacagcttaagttcggagtaatgcaaaactgataaaagagaacagattttaattaaccgagtcattaccactggctgcattcgtctcttcccaattggatagctatacttgttgggctttttcatagcatgtgcagtaaaccagagtatgaaacctgacaaaagatccagtagggagtccagtgtcgatgctattactgccatcgataaactttcaactgatgcaagaactttcccaatgaaaagaatcagattgatgatattcgacaggttgatggccaatcgttcgccctttgccatttgcctcaactcttcctaacaaaacaacatgaagatatacttcatatcactatgtgtatagaagacaaaaaaaaaaagaaatatacagcatccaatttatagttacaaatctggcaattgcatattgcattgaggaaatgtgttctcttaacaagattttacctcagtaggagcattctgatctaaggaaccaatctcattcatggtttccatctcgctgaaatccttcaggagattttcctgcttcttg

SEQ ID NO: 1813 - DNA, 657 bp, Oryza sativa
cgtccagatctggagggttcttggtgggtttttgtggggtttttgattgatgggtttgtttctcgtctgtgattttgcagggacgggttcggggtcaagtattccgggttcctccacataaggccgtgtggtttctgtcgaggagatgacggattcgatcgattcgtgttcgtctccgtcaaatttttgcacaagagaaaaaaaaagtttcccccttttagagtttttccccttcagttttgtcagttttggtgaggaattttagagttcttttccggcaagagttagaagaagagagaaatggccccttccaagcagcagcagatgctcctcaagaaggtgatggcgaagaagcccaagacgaagaggctatccgggtttggccttaaaccctctgctgctttctccaggccccatgtgccgtcggcggcggcctccctgcagccaagccgtcgcgtccgcgtcgtgttcgaggaccctgacgcgacggactccgactctgacgacgacgaggacgccggcgccgcctcaaagaagcgctactttgagctcttcattggcaagccagcttcgtcgacgaagcaggcctctccggcgtccaccgtcgctgcctacgccaacatcggcaaggttgggagcacctgctaccgtggtgtg

SEQ ID NO: 1814 - DNA, 693 bp, Oryza sativa
ctattaaacatagtggattataggttacatttagatatttttctataattaagtcttttttgtctattcagttaaccgagaagactaaccgaattgatgaccgaatcttttagtcttagtctattcggttccgtctttttctaacccctgcaaattgtgtcctcgaaccgattctgagttgcgatgtcgacgtcaagtacgtactcctcgtcctcgtgctaatcgagtcggcaggcgaaggttatctcaagtctggaaggttatctcactgcaaattgctgtggccgctctgctccttgtccgtgctccgcgccggacgacacccgaaagcgacgcgcggctcccgtcacgtcaggtcacgtcccccccactcgtgagccgcgcggcgccaaatcacgccacgccgcgccgaggcccgatgaggagtcggccgccatgcagctgcagccgcgccgcgcgcgggcagagcacaagttgccgaacggcacaccacgcgacgccgaaccagccaaccaaccggaccccaaaacacagagcgggcgccgcgccgttgtcaggtcaggccagttgcattgcagccgcagcgcgcggtcgcggtccgcaaaactccgcaccgcacctttcgtgccgctcgaggcgctgacccgcgactgacgacgacacacgaccccattgccgcgcgacgaaacccac

SEQ ID NO: 1815 - DNA, 21449 bp, Oryza sativa
taggggtattttggtcatttcgacaaatttgtacagtactaacggagactaaccggacggcgatggtaaattgtagaagttaagcaaaagtcgatggcatattgtagaacatgacaaagtcagtggcaaatcgtagacgtgcgacaaagtcagtggcatataatggattatctctaaaaaaattttatggtgagttggaactgaatcaaaatccaatatataaaacttcagtgtaccaccttatactctgtttggataatgggttaagaggggtgagattgtgatagggatataagtggagggttgagagaaatgagatatgaagaataaacggctaggattaaaagttatccttttagaaggtaggataagatttccccattccattatccaaatatagtattagggttaaaaaaaagaacaatgcatacaaatgaccatttaataccgtagaaaaacaaaagtcacatgtgtcaacgtttatttttaggattggatttattttgggatagagagtaccaaatatgttgatattctttaataatattaaataatataatgatcatttgagaatggagggagtactaattaattaccagttgggatatctgttcgtttaatagtttaggtgcacgattaatccagatctgttgtctgcctaaccaaccacacatctctcagctatactgcatcaacttcacctggcttatcaacggcagaatcgtccgtattagtattccgtgtagaatggtcatgttgatgagttatcccttcgttctaaattaatctacatatagttgttttgaggttatttctaaatgatctacatttttatgtttatttgttaagtgtattcgttatttgcgcattagagtaaatggacattgatacatgcatccatgtacataagtatttataacccacgtgcaatatcttgatttgctattggctaggaaatagtggaaatagtgcatgcatcaagtttgttgttagagtaaatataatatgatagagttattagatttttttttttgtcttggtgtatctagtatatcaatttggaatggatgagtactttggtgtttactccgtacctatcaacagcaactggacaattaatccttaaaaaaacagcaacttgacattttcttatctgcttcctttcacgagagttcggaaaatgtgtgggcccagttgcacgaatagatgacaaatggacggtagatcttggttgttgtctctagtttaatcatgcttagaaattcgagccgtcaaatgcagaattcttggatcatctgagagtgattggcatgtgctacttcgtgctgctccactcgtttgttttgagattctaccacgaggtaagaccgtaggaaaattcagtaatgtgttgttttgtactcctctttttgtccatagattcatggcactattcaaaagcatgcggtgtgaatagttttcactgaatcctgtcaactgcacatgcattaaaatacaacttgtttttttcatgtcgttatttgcaaattatactaatcaaaacaaacggataaacttttagattgaaccatatttgaacgagatgataaggtgggatattcattctcatatgtattagtgctgcagaatcacctttatacgaaatgcataaaacaaacacaaaatacttgaaattcttttcaataaaaggttatcaaaacttataagtgtcatacgaatttttggctgtgttcgtttgggcatgttcccaacccatctccctcgttttccgcgcgcacacttttcaaactactaaacggtgcgattttttttttcaaaaagttgctatacaaaagttgcttaaaaaatcaaattaatccatttttttaaaaaatagctaatgtttaattagtcacgtgttaattaactactccgtttttcgtgcgaaggagatgggttcccaaccctaactaccgaacacccctgggacctcagatataattcaatatcataactttaacaacttcactaagatgagacattatcaaaccgataataatactaattctcttgaactatgattcaaacatggcacgaccgaatttgtcacgaaatagacgattattgctctccaacacgtcgatcctcaaacatggcgtttatccccctgtttgcattttcgattttgattaaaattttggtgatttcaattgtactaaaatttacgatttttttgtgattttaggtatttttggaccgttctttttttgaaattttaactgaatttaaataaactttgatcaaatttaacaaacattcgagaaaatccaaaaattctaatcccacagaacagaacagaatgtcacgtttgattcgatgaaattgccgggttccaaaccgctccggggtaggacagaagaacacacgagaggcaactgggaacgtcgtccacagcagagcagagaccaccctgacgcccgagcccgaggaccatcgcttccgctggccgaaagctgagagcaagtttaatagtacagcttccaaatcatatatagctaatataatagtcaatttatataatactaattgtttagtatattattaatacatgatcctacctgtaatatacatattacgtcttttaagtccgtgctgtagctagctacagatctatagcctgctactattttcttttcctttatttttttaaaattttctgtagctgacttatagcctgattgatgcgctgccgcgcgacgtgtgccgttgtacggatctcggggggcgagacgagacgagacgaccagtgaggagtcgccacggccgcggcctcaggcatggacagaaattctccgtatttcttctccttttcctttgtgatttgatctgtcccctcttctaggtccttctttctcgttgggttttggttgttcttctagcatcaggttctgctggtggtaccacgcatccttgcaacaactttcgcgcacggtcaaccgactgcaggatgagtcgccgggcgagctgcctgatttttttcttcacattttgatctttttaaattttattctataaatagaccttaaaaaatacttatcacaagactagattagttttcttgacgctaaaatcattggcaccattgttcaatatctcaccgtcgagacatcgacacactatcaccgtacgtagtagctaagttacacatgtgaaggggtcagtatcaaaagagattgacattgagaacttatttgtaaaaaaataaaaagggttgcaatgtaaatattttattacaaataggtctttatgtgtattttttggtgaggatctatttgtaataaaaatatttacattttaatcatttttgaattttttatatagatctttgtcttcagactctttgacactgacccctacatatcacgatggctagggtggtgagggtatcgggggcaacgttgttagcgccgaaacattggaccttagcgtcaaggtcactattaccgagaaaggggttcatttctataataagattttcaaaatctatttataaaataagttttcaaaagtgcgaaaacataaaatccaggtgacttgctccttgagctttgctggctaaagaaattgctgagcacacgtatagtcttgtctccacgttcgcaaaattaaaatttaatttataattcataattaattgtttttttctattttccagccttaccctataatctttttcgttgcatggagtccatattgtcctcaactatcgcgtttctaaaagaaagattcaaattaacgtttgaaaccatttattgaccgccaggcgggttcacaaaactgatcagcattttaaaaaccgttgatggttaatttgtcaaaaccggtcggttttagctagttttaatacgatgttatccgaaagtcatcggttttcggcaactctgtgagtatgttttttctagaacaaaaaagtaaaccctgctgccaggtcgtcatacttcaataataaaaatgttattaaaaaatcaggacccacttaccatatctccccttcttataagattcaatggtatgtaaacagttttggtggtaaaaccagtgaggtggtgcctatagtttgctgtttgcttttgacgtgccaatagtttgatgtttgctttggacgtaacgaaacgcgtccgtaggtgcaacttcggagttccccgagcaccataaccgtatcactgatctttagttaattgctggatcactgtccggacagtcggcgtgtggtgtaagcaaaagtgcgatttggtcactgattgcctctcgccccttgctcctgccgatcgtggatcgccgatgcagacgacgcgtgtgccgcttacaataatggagtggagtggggcaaagcttttttttctttttctgaaaagagacaaaaaaatattttttagaaaaaaaaagtagcaaagcaatttattactgtggatttatgatacacgtcatctactgtaataacactatcattataaatatgatgtgtgaaatgataaaaaataaaatccatatatcaatggttgtagtggtagtaccattactacgacagaggatcttcatccggttttagctaatgatgattcagcagcaattgttgtggtgtcaatccttgccggtgaacatgtgtaatgcacgacaacgcggtggttctgcagcgcacaaaagttgcttaactgccattacttcattcaccgttggaaaaatgatcttggctgggtcgactgttttccacaataattccagttctaataagaaccaggactgaagattgtttttagtcccggttataaaaattttgatctttaatcccgattggtactaaagatcatttttttgtcccggttcatggcctatcagagacatctcaggaggtcgaggatctttagttccggttgataagatctttagtcccggttgggagtaaagattatttagatctttaatcctggttgataataccaaccggactaaaaatctatcttcttggttggactccaaccgggagtaaatatttctctcccatatctgattggttaagtcccatacgagacttcctcctcaccaagatatttagataagatcggatcatcccctctcctcttactctttagatctccttcctccttcttccctcccctctcctcgccttcctccccttcctccttctcccctctcctcctcacatccggcgctcggcgtcggcgggcaggctgcgggcggcggggccgcgcacggggcggcaggcgccggccgtggcgagcggcagccacagcggttctctccggctttttttttgataatttgtgattgagagatgtataatttctttcttttagaatttgtgattcattgcatggatctgagatgtataaacgatctgtgatgtatttgatttgtgtgtaatttttttaagatttgtgatgtatttaatttgtgtgtaagtaacttaggatttgtgatgtgaatgatttgggatgttattttggtttggggatttgggtatatgcatggcactcaatttggggatttgatgttcgattttggtatatacatggcactcgatttgggagaaaataaaaagaaaatggaaaatggaccagccgggactgcggactgcccctaccctctctttagtcccggttggtgttactcccggttggtaacactaaccgggactaatctttagtaccggattcgtagtatagggggttacaaaccgagactacaaggggttacaaatcgggagttaagacgatttctccaacagtcccggttggtgttactcccggttggtaacactaaccgagactaatctttagtaccggattcgtagtacagggggttacaacccgagactacaggggttacataccgggagttaagacggtttctccaacagtgattgcttgatgcataggagcgttgtcgaggagtgatcctctctagcgggagatcgtgagacacccctttcgtgagttcggccgggggcagcgggtgagattcgaggatttggtgagcgaaactgtgtgtgtgatcttgatctcggaggctcctccaagacgatgagacaaaagaggtttatacaggttcgggccgctatgaagcgtaacaccctactcctgtgtgtatgattcttctgtgcttagaaagtccctgaatccttggtatgcaagctagggttagacaagctttggctcagggatcctcactccgatcccacttcctcgctaggcatggtcctccttttatactctaaggggataccacatgtgatgcgagtgctacctagggagaagggaaaatattttctatattaattacatgtcttgtgccttagcccagaagctatctgcacgtcggttgctgcgcggggcccatcaaatcatgcagggcgcccttgtcattcgccatttaatagatgaggacttccgggttctcattcacaccaggaaacgggaacccgggtcagttcagagtggttggaccagctctgaccggggtaagaggctttgaagcccctcatcattatgatgagatgggacagagcacaccgctcgccgcctgacacactgacagagcgggggtacacagtcgccgtcccatcggtcattcaaccggtcacagaccggtcagatgcacagcacgccgcataaaatacggcatggcacggttgcatagaccgctttaaatgcagttaggtgggcgttaggcgcgcccacctaaccctgtacacgtgggctgatacgtggagggggtcgaggcaactcgaccctaagcgagggcggcctcctccctctagcttggagggagtagccccgcgccaccccgggctcgacccccctcggggtgagccacgtgggtttaggggcggcccgaccccaagctgggaaggggcagccgccgcaacccccgggctcgacccccctcggggagagccacgtgggtttgagggcggcctcctccctctagctgggagggggtagccaccgctccacctcgggcttgatccccctcgcggggagccacgtgggtttgggggcggcccgaccccaagctgggagggggcagccgccacaacaccccgggctcgacccccctcggggagagccacatgggtttgagggcggcctcctccctctagctgggtgggggtagccaccactccaccccgggcttgatcccccctcgcggggagccacgtgggtttgagggcggcctcctccctctagatgtgatacccccgggcccatatcaccgacagtagcccccggcgttagccctgaccaaaaccttcccccggtggccatggttgacgccactctcctagtctaacgatgtgggcccggtctcttctccattctttgttggcactagggcccatgcgtctttttcgccccaacttgagggcgactcgccggcccgtaccttaggttgtgaacttattttctgtatatattcagcaaacgctgttagattctctcgggcccgcgacttcatgctgcgcacctcgcttgctcctgccttttgttaacctctgttcatgttctacttcatctattcaaacgattattttcgcgtgagtgtgaggactgaactttccatagccagcaatcctcacctgcaatcaagccaagctgtgtgccatagccagtcggcggggccaaagccaactgctacgggagagccagcacagggggccccgggcgtcgacggcgtccaaagctcgacgcagggctaggatagagctaggaatcgtagcccccacacttttagcaaagaatcatttgaatgggtgaagtgaatacaaactttttgttaccaaggggggcaaacgagcgtgcgacacgtgggaatcgtgggaccgcgaggaagagatgggtgagagataaatataagccatgataattttgctgataagcatgaataaagaagatatatacttaaaggaagtattacaaatgctatgctcaaaaagagtccccggccaacgctgagctttcccatagaggtctgctttggtccgggtattgtaacacctcctttgttacctttgtttatccttgtttacacgtcgcgagctttcaaacctttggctcgaagagggctccccaccctgggcttcgaaccctttagggaagcctgcgaccacttaacaaacgaggtcaagctcccatgaacctgcgccccaacgctacacattttgttcgctctttcctttcggtggcttccttccaatctctcttccttcttcatggacgattactttcgcacgagtgtgggagccgaaaaattctagagccagcaatccccgtccacagttgagccggaccgggcaccgtagtcagccggcgggtccaaagccagccgctacggaagagccagcacagggggtcccgggcttcgacggcacccggagctcaactaaaggctaggataaggctagaagacttagcccccacacttagcgaagaatcgttcatgtagatgggagagaggttgggctcttaccaccgaggggccaaacaaatgcgcaacacgcgagcgtcgcagggccatgagaatagaatggggggaaattaaatataagattttaagctaatgaattgaaaaattgaaaatatttgaaacttgaaaggacgatcagttgagccgggccgggcaccgtagccagccggcgggaccaaagccagccgctacagaagagccagcagagggggtcccgggcttcgacggcacccggagctcaaaactgcaagagtcctcccaggagtgaaccgatgcggcagcaggttcatgggccaaccccgcgcttggcccctgagggccatggggaagaggttcaccatgacccagtcgccacccccacccagccgccgcaacccccgggctcgacccccctcggggagagccatgtgggtttgagggcggcctcctccctctagctgggagggggtagccaccgctccaccccgggcttgatcccccctcgtggggagccacgtgggtttggggatggcccgaccccaagctgggagggggcagccgccacaacacctcgggctcgacccccctcggggagagccacgtgggtttgagggcggcctcctccctctagctgggtgggggtagccaccgctccaccccgggcttgatcccccctcgcggggagccacgtgggtttgaggacagcctcctccctctagacgtgatacccccgggcccatatcaccgacaagcgtagatcaaaatcatatctggcagttgttatggcctttaacaaatgattaacagataaagtcagttaaaactgcactacctctatcccaaatataaaaagtaaacattttatatttagaagcggaagtgtaaggtggtgtttggatgcaataacgggactaattttagtctctatcacatcagaagttggaacactaattagaaatattaaacatagactaatgacaaaacccattccataaccttggactaattcgcgagacaaatctattaagcctaattaattcatgattagcctatgtgatgctacagtaaacatgtgctaattatggattaattaggcttaaaaattcacgaattagctctcatttatgcaattagctttattattagtctatgtttaatactcctaactagcgcctaaacatatacggactaaaattagtccctcccatccaaactctccctaactctcttggcatgaaatatttaaagttttctccatgggtacaaatggaagggagttgcagaagagaaatataagaataaccggtgataagcccacacattgctgtggcttcttcatatatagaaaacattactgtacttcttatctgaaaaccgactttaggaaggtttaggtcattttatgatagatttgagcctatctatagtagaactttcaggtagactttttatatttttgctccttttaaaaacttattttacaagtagatcctaaaaaacttattccatagatagacctttttcttaatgctagtaaccttacaccgaggtccaacgtctcggtgtgaacgacgctagcactgacaccctcactccctagcaaccgagatgtagaggggttggcgccaaagaaactagcgttgaggacctatttataaaatattttttaaaatggttaaatgtaaatactcagcgccaaaaagctaccgatgacctatttgtaaagaaaaatatgtttgttttgttcttttggaaattattttataaataggttctcggtactagtcgatccccttcacctcagcgacttaatgtgtgtttggctctctagcccagctagccaagctcggcagcactaaaccatctctttgccagcttgctaaccttgcagtggcttctatgtttggatggttttgcttcatgtataagtattagtggctagctgatgcagatgaattattgttgctgagttcttccgtgaatcatttttccttttagatccagactgattgttcgctgtatttatgagttgatggagagaacaattttcaacaaagcctaagcgagagttcgcaacaaagaaatggaagaagaggctggtaagattgtgcgagtcattgaaaaaatcgctaattttggagaagtatgtgttgccctcgttctaacattttcgcgcaagcagagtttgccatcaaaggagagccgatttggctctccttggctagctagatttttcttaccccacaaagccagattattttaccggttgcaaacgcgtagctttgcttggcgaggctaggatgacacttgcccaggatccaaacatgcccgtagctaccatagaggacaagggtattagcgtcagtgtctttgtcgctgagacattaaacctcgtcgccttgaccctgatctgagaaaaagattgcattcttagaataaatttttctagggtctatttgtaaactatttttaaaaaaggctaaaatataaatatccagaaactttatgtatctctttaggtcgagtgccattgtaacttacatgcggggtactcgatataacgtgaatctatttttcacctcaactaaccaacgtaaaaaagaaaaacaaaaaacggagagagaggaaaaaaaaaacctggttatccgtgtctgtctaatgcccaatgtacacccctacggctcatatcaggatcctctgcagttgaagtcacgtgactttatcactgacatgtggacctaatgaccactagacccatatatcagtgacataggtaccgcgcatttaattgcagactatctcaatccttgtggctcgcctatgccgttgctcctgtgttgccttgctatctgacagcaaagagttattaccatcgtacctacgattagatggaatatttcttagtactacaaatttaaacaagctcagtacttcgaatctggatagactccatatagaaacaatataatactatgaatccagacatgctccttattcagattcgtaaaattaggaactctctgtccaaattcgtagtattgaaaaatgtcacatccaatcctagccttatattctaatacggaggaagtaggttacagtcgctacacgaatcttgaagcaatccaaaaccatcaaaaatcggtccaaacaaaagagaagaaaaagggactgtctaacaatcattcgacagattttctttagaaaatcagtcgaattttcaagccatcaccatgtgctgctcaaatgaaaacgtatcaatgtacgtcagtcactggacattaatcacgtcagtgatgctgctaaaaagaaaaggaaaaataagcaacttacatcaacttacgcatgtaattttttggggttacatatgtaattttgaaacttacgctataaatatattaaaattacatatgtaattttaaaacttacagcgtaaatatattaaaattacatatataattttgaagatttacgatgtaaatacatgccgattattttttttatgaaaaatatgacggcatatatatagtccgaaaatatcaaatcacacctcaaacaattaggttaactacagtacaacaaaacaaccatgagtaaaaaaattaccatccatgtaaaacaaaaattacacctgcatctattaaaaattacactgtaaatgtagtgtacttaactatgaaactgcggtgaaagttttaaaaacgttaggtatagcagcaaagtaatcagtcgcttcttgcacagttggtacgatgcacgtcatgttatcctgacatcatgtggtcgattccatgctctagcggcatttttttttcactcgaaggcacgcgcacaaatctcaaagtaaatcatacggtgaagaaatcgacagatttttaaccaaaaatctgtcgacagatatacagcaattccggaagaaaaaacagtcaacagacaaaaaacgacggcaacataaaaagatataaaaaaaaagaagagaaggaaatattttgagtccaaacaattccaaacccacacaccccacccttcattttcttccccctttcatatcctctttttccctttttccaccctccacagccgcctccttctatcgcccctctgcttcttctgccggagccgccgccgcgccctcctcctcgcctcctcgcgcgcgccgccgccgccgagcgagcgagcccggagggtgcgtggacggcctcctcttcctccgtcctagccttctccgctccctcgcgcgcgggcgcggcgcggcgcggcacggcacggccggcgagcaaagttcggagaggcggcgaggtcggccggcccagccagccagccagcctcgttccgccacctcgggttttttaaggtattccttctccgctactcagtgtccctcttccacctcgtagctagtatcccctcctccttcccaccgcccccgcttcgtagcagtagcatccctcctggtctcctcctaagcggcacctcgtgcggcgtagattggagattcatccggattgggattggtttcgtctcctctgattaatcttattttcctgtgtggtgctgtagtatagcagcttgtttccagtgaaaaaaaagaaaagaaaataaactcttcttttttctaggtttatctcaaccccatgcccccatgttaggtctgcccatgccttgaagggttctttggactttattacagtttgccattgctaattgcttacctagattctttgtttcttccttgcttgatgtatgcttcaaagtaactttagattttgccttttgtaatacatagcgatttctggagagggcgggtaggttcactgaatctgccccatgtttatggtcaagtagtgaaaatgtttaattggtccataaagttgtgattccattgtgctagaattgtggtagtggagatggtagggcacttgatgtattcttcttcgtttccaacttttgggattggtggctgagaatgcggttcttgttgtggctgtcaatgcagtgcagtcgcccgccttcactgtgtgctgtagattgaggcaaaaacattttccaggagatggcagcgacgatggtggcgatgtcggccaagagcaagaacagcgtgctgacattggagaagaagcagggctggtctgtcccacaacttccggagctccggttcccttgggatttgcatgaagacaagggcttctctttgagcttacatggctctgcctcccctcatggtgggctgtttgctagcgtcggtctcaaagtgtccacagctgcaccagcagtggcacccagtcctgccgagcatgacttcaagattccgttcgctgatcattgcataaagtatgtctcctcagcagtggggtaccaagttcctgggactgaggctgaatctgtcaatgaggaagaggtggtggatggcaaggctgtgaagaaagccaagaaacgtgggctgaagctgaaaattaagattgggaacccacatttgaggcggctggttagcggagccgttgcgggagctgtctcgaggacttgtgtggcacctctggagacgattaggacccatttgatggttgggagcaatggggactctatgacagaggtattccagtcaatcatgaagaccgaggggtggacagggctgttccgtgggaactttgtcaatgtcatccgagttgcaccaagcaaggctattgaggtaagttataaatgttggcttatgttgatcctttacaaagtccaaagtcctattgcctaactttattataagaactaatacattttttgtttgaacaaagatgtaactaatgtatattagttgtattggatccaagttgtaactggtgttggcttatgtgagccagacgtccttttaaattttgagcaaactatagtttttttttgaccttccattgagatgctaatgttagatggatgcttaggaaaagacaatttgtattaactactaacttataaccacttcaattttgtggatggcctatcaaaagcagtaaaacaccctatggaaaatggattttccgctattctcaataatatttccgctattctcaataataaggcaatgccacactgtagtcaattttatatgacaatcagccttctatcaataaagtaggtatgcaactaggaaatacacttctaacaaaggagtctgggttcaccacaatggtattttaatgttctccattttttcatggttgactctaatcttcatgactacaaacatctatatgtgtagtgatctcgagactttaagcaagtcaaagtatggactatgtagctttcttatattttttattgtttcattctgatattttgagctcactcgctttatttaagtgtatgctttgttaggcactggctatatgccaaaacatgaatagtaagatgtttaacttctgggaaatgctgacttagtgcgtccaaaataaacttgtgaaaaacagttttgcttttgttaatcttcacttccatggtcttacattgctaaagacatttattttggttttatgaggcggtggatggatacttgttacacttgactttgactgagattatgtgaccacttttttcttatgaattttaggatgtcagaagtacctaggattcgtagcaactaatcagtctctctttgattcacctattaagacatagcaataccttaattcaactgatttttgtcttttgcccaaatgcagctatttgctttcgatacagccaagaaattcttaactccaaaggctgatgagtcccctaagacacccttccctccatcgcttattgctggagcacttgctggggttagctcaacattgtgcacataccccttggaattgatcaagacccgattgactattgaggtgaataaaactccgttaacttacacaagtgcatttctctgtgtacacccacctaaccctacttttttctgcagaaagatgtctataacaacttcctccatgctttcgtcaagatactacgagaggaaggcccctcagagctctaccgcgggctgacaccgagtctgatcggcgtggtgccatacgctgcaaccaattactatgcctacgacaccctgaagaagctctacaggaagacattcaagcaggaggagatcagcaacatcgcgactcttctcatcggttcagccgcgggtgccatctcgagcaccgccaccttccctctcgaggtagctcgcaagcaaatgcaggtcggagcggtaggcggcaggcaggtctacaagaatgtcttccatgctctgtattgcataatggagaatgaagggattggcggcctttacaaggggcttgggccgagctgcatcaagctgatgcctgcggctggaatctcattcatgtgctatgaagcttgcaagaagatactggttgaagatgatcaggatagtgagtgaagcatgtgctcttgaaggaagatgagtcccctagttctttttctttcgttgagaaatgcaagttggatgattaacaatcaaaagtttaggactaagatatttgagatatctgttagatcaaagttttggctttggcttcatgtcaaaggattatttggcttcttttgtgctcgagttcaaatctatgaacaacaatgtcatcctgagcggaagcagttttgtcgtgattttgttctagattatatgcgtattaatgtcgtcgtgtcaagaatattttcgtatcacattgcacgggcatgactagaacatacgatacagaattcaagagaaataaccaagaattattaatatgccatgaactaccattcaaacggatcaaattggcagagcctcacaatgtatgtctcttgtcggccatatttaactgaaacataaacctgctgctaatcaacagttttgagttttgtcacgattttgttcggtcttttatatgcttcccctgctccatcagagcaacctgtttttgtcttcagaaaaactacactctttcttgggtttatctgggaaggattattttcatcttttaaagagaaaaccgagaagctaaaagctttaagcacaacaacattgcaatacacaaaaaataacaaaaataggcaccatgaactatcattcaaacgaatcaaataagcagagctttttgattacacaagataagtctcttgctgaccacaataaacggaaacttaaacctagcaggagtactaaattaaactcaacagccaacttaaaatagtttatttagctagccttgttcctcgccctcagcagcagccgcggcttccctctcctcggcagcagctgccatcagctcatcaaacttctccgtcttcccaagcaaaatttcaatctggacatcgcaacaggatcagaataaggaaatcgttgtcctggtaatgaaacaggcatggaatagaggaaaataaacgaaccttcgccttctgcataggacggctccttgagtcgtctttgacatcaacagttgatgtcatgatctctgcaagaatttgatcgagtagttaagagacattgacttcttagtacaaaaggattccggcgtcgaccaacaggataataaggcagcatgaacttactcttttcaacagcaaggccattattttttagaatttccgcaacagtcaccacagtggcaatggctgaaataataaataagaggtttagctgtttgaaaacatcataacgacaagcatgagcagtggcagctagaagaaacatcagcagattttaacatacaaaatgaaataaaaaactcaatcatggtagaaaatccactaaaattcagatggatgactagaatgaaacaacagcagaaaatacaatgccaattgccaagttacacaggaaattgatgattgtgaagccatgtctatggtcattagtcaatacacgcatattagttgtacattccactgctgacctttcataaagaagttgcacaaggaatcaataaatgatcgtgagatggggcatttgacatgaattgcaaatcaaaattatataatggctattctgtcaccaaacattgacactagagtaggcatataaacagttgtaagtttattccttgcataacagatccatcgcatcaatttgacaacaactacagattgcaactatcaatacaacagatgcatatatactccgaaaggattaataactaagggcgaaagtgcttacccatgccgagcgccgagagctccacctcattatgctgctgcatgtatctctgcaatcatcagaaaaacaacattagctccaactccaaagtatcgtagacatttattgtaatgcgacacaaacatttgctttaccaatacattcataaaagcaaatcacgaacaagaaaacaaaatcgacacttgattcaaaagctaggtctttgaagattaaaatagaaatagatcgatcaaagggcagctttttagggttttagacgaaaaaccccccgacggatcgaagcaccaaaaaggatcttctttgttaggcgggataaggggacaaacaagaatcggtcaaatcaaatcgacgaaacagcagcagcatccactcgctattgcctcatcacaaaccgccacacaaaatccggtaacaaaaaaaaaaaatcgaacagcaacaaggaacagggggaggaatcctgaccttggcgaggttgacgtagaagaagagcggcttcttggtgttggagacctggatccggttcttcttgtgcggctccgtgatggacaggttgctcaccgcctccgtcacctcctccatccccgcccgaaaccctaacgaaacctctccctacctccgaaacaagaaaaccccacgacctagccgccaagaacaaccacaacccggcgcagcgcaacggcgacgagcacgcgaggggagcgaatccggcggcggcgcaagaggaatcgcgagggggagcaaatccggcggcggcagcgagattggggaagaagccctatcgggtggtggccgcttatattgggggaggaagaatacaaggggggtacgggtcgggttcgagttcgagtccggctcggtcggaactcggaagcggtgcggttgcaactctggctcgggagaggccacgcgggtcggagacggactgtgcaggcccagtcgtagctgggcggggtcgttgggcccattgtcgaccaggatattagagagcaattgggttgggtgtagtctggcccaacttggctactttctgatggactgaggtcctgactcctgagcgtttgcccatatttcttcgtaagctaaaacgatttattagaaaataaaattaatttataggtgaaatttttatatatgtattcgtagcgacttaaaactcaatattaaaaaaaatgctacattggaaatatattaaaatcaacttacaagttaagtttgaaaatttaaatttggatactgagaacgaaggagtagcaaaacacagaagatcacatgcactgaaccaaaatctcattacaaggatcctctacagggatcgcgcaagcgacaaccatgaaaaacttgaacggcatgtttggctgctaggtctactgcagccgcagccggcatcaataatgtcgcacacacgctgcagcgctcgcctgccgtacatatgcaaaatcgagacttgtagtgtcctcttcgtaatttatttatataactaatagcttatctaaaagaatttgacatttttttccaggttgcccctgaggcgtgataaacttcatttggacaacagtaccaaattagaatcagtttaatcattgatgtacgttctgtcttgctcggttgtgttataaaaacttttctacatctccttgttttcgtacgtcataattttcttatatattctctgctaaaaaaatgctcgtgcgttgcaacgggtaaatacattttcctagtgatacaacatctattatgaaatgatcaataatttgaaacatcatgattgctttacactataattgaaaaggttaataaaaaaaatttcttggttttgagccaaaagcccattactttttttttccttttcaccccaagcacggtctgatgtctcctacctctctccgctcggactgtctctcttccgtccggttcggtccacaagtggaaccttagacccagctagcacaaccgccccatttagcagcgtcttaaaccttcggaagaaaaatccttttgtgccccgtacgatgacggatccgatcctcccatcaaaaatccagtcgagtcttttttggtctcccaacattggttcagagcttttgattcactcgatctcccccgtacgatgacggggccgatcctccccattaaaatctagttgggtcttttttttatctcccaacattggttgagagcttttgatccactcgatctcctcttttcgtttgctccaaatcggagcaaatccgcaaaactcgggacaaaaagggattggggaagctcgtcggtcggtcatcattgctgaccattaaacgaagattaaatccggcgaagtaaagccaaattgaaaggggaaatcatggaggaaacaatgagagaggagtggggaatcgatttttgcaatcaacggaaagagaaaacgtatggggaggtagatcgatgtggcggcggcgttaggggtcggcctaggcggcggctggagattaaatccgggaaaattaaagccaaatcaaaagaggtagggaatcgattttttaatcaattgaagcaggaaacgtatcaaggtggtggatcgggcaatatacaaagtgacaaaaaaatatagtgcgtagcacgcgtgtggaaaaattggatgagatccaaaaaaagggttgtgggaaacaccggaaaaaaaatcaaagcgggatagaaaaagaaaacagcgaaaaaaatggaccaaaaatattacgagaagccttacttattttttaaataggtatataggtatagatatagatttagcaaacaacgttgaaaatatattaagaacaacttcaaaattaaaatttaaaaatcaaaattttcttattaaggcaatcaattctaaaaattcagaattttcttactaaggcaatcaatgagactccttgtgccatgatcgaagcttaagggtacgaacaaaaacaaaaacgaagagtccttatgtatacgttgtaatcctattaccaatctcttgtttagtgagttcacaataaaaaaaacgattgctttgggtggccttcagttgtaacgggttgggttttagattctacagtcaggaggacgtgtcattccgtgtctggttctactactttttgttgtgccatacatgcatggtggccatggaccaaaatcgtgcacttagtgtccgacgacgatggatcacggattaaggcttttacgtgggcatcatgctgcttcatgcgtgatcgaatcggacacaggcgacgacgtacgaagccatggcaaaaacatcttaaactcttataatagataaagataagcatgataataaaaattgccctggctccttagtttctttcacttgtctattccaaaaaaaaatacagtattagtaaattttgtggtatagaattatagatggctagagatatagattttatatacatataaatatcacacatatatcatcattatattaaccggaacaaaacgctagtataggtgtccctgaatgtgttaactcattactccaactccacggttcaacgtaatcgtgcggggcaaagaaaaactggtgatcatatatcgcacacttaataacaatcaaaacatgactaaataagtcttcctataacttcaacttcaagaaaaagaaaattgaaacgagcttcaagaaaattaaaacatgataagttgagttcaacttcaaggctgtaacaacaagtaatcacgtttcaattgatattttttgtttgacttctggacatcatatatgtggatctcatgcagggaaaaatcagatattttt

SEQ ID NO: 1816 - DNA, 5866 bp, Oryza sativa
ttgaccgaatgtcggaaagggttctcagacacgaatgaaaaaactaatttcataactcgcctggaaaccacgagacgaatcttttcagcctaattaagccgtcattagcacatgtgggttactgtagcacctatggttaataatggactaattggactcaaaagattcgtctcgggatttccatgcaaactgtgcaattagtttttgtttttatctatatttaatgctctatgcatgtacccaaagattctatgtgacgtttttggaaaaaaaaaattgagaactaaacccggccttagatccaagggtgaaaatttttgccgtgtcacatcagatatacagacacacatttgaagtactccctccgtcccataatataagggattttgagtttttgcttgcactgtttgaccactcatcttattaaaaaattttgtgcaaatataaaaaaaataaaaagttgtgcttaaagtactttggataataaagtaagtaacaaaaaaataaataataattccaaattttgttaattagacgagtggttaaacagtgcaaacaaaaaactcaaaattccttatattatgggacggatggagtattaaacatagtctaataataaaacaaattacagattctgcctgtaaactgcgagacgaatttattaagaccttagttcccaaacaaaaacttttcaccatgtcacatcgaatgttcggacacatgcatagagtataaattatagaaaaaaactgattacacagattgcgtgtaaattgcaagacgaatcttttaagcctaattgtgccatgatttaacaatgtggtgctaagtaaacatttgctaatgacggattaattaggcttaataaattcgtctcgtagtttacaggcggaatctgtaatttgttttgttattatactacgtttaatacttcaaatgtgtgtccgtatatccgatgttacacgcaaaaacttttctcccctcgaactaaacagggcctaagtatttgggaacaaaatttctgaatttgtaatatccttttccgggcgatattatgtggacccagaaatttggaaaagtatttcgatttagtgaaattggttgatattcagtcaatataggttcaaatttctagtttttcttttgttagtcgaagtcaagagtactgaggtgttcctgctacttgcaatcttaacccgcgacagattctctgagaatcagcactaccctgatcatgagatttataaatcaaattcacaggttgacctgctgaaaaataagcttggattcgatgacgctttcaactataaggatgagcctgacatgaaatcagcactgaagaggtcattattctgatcttaccaccgtatgatcttaaaaaattcttcctccattttaaattacttgtcgctttatgtttatagtaagttaactgtatctatttttatcattaatttttagtcatccatatagtttaacaacatgagaattactaatccgtccaaaaaagacaaaccctaactatgaatctagtcacacatgtatccaagttcgtagctaggaattggtttttttgaatgaaggggtatatattatgaaagtatttatcatgatgaattcagaaatatagatatcgtgatatcaaacaatattagtttatataaattaatggtcaaatattagaatattgtaaatttaaaatgatgagtaatttaaaacggtgagtagtaaaatgacaaatcctgccgggtaacgttcttgacagatactttcccgacggtattgacatctactttgacaatgtcggtggcgagacactagaggcggcgctggcgaacatgaacacctacggccgcgtcgccctttgcggcgtcatctccgagtacaccgacgccggccaccgcgccgtgccggacctgctggaggtgatctacaagcgcatcaccatcagaggcttcttcgcctgggatttcctgacgaggttcgccgagttcaccggcgtcatcagtgactggatccgtcagggaaaggtccaggtgatcgaggacatctccgacggcctggagagcgtgccgtcggctttcgcggcgctgttcagcggcgacaacatcggcaagaagatggttaagctggcataggagtacacagccatggccggagaaaagctaatgggcatgtcagtgattcagagtcaaataaaatttaggtgagacttcagaaatttaccgacagtgaaacaaagttgttttcttcaactattgagcatgtcagtgactcggagtcgaataaatttaggtgatttcaggaattactgacagtgaaacaaagttgttttctgaggtagcatagccgcctctgtgactggattgaactcactggtcacaacactctgcaacactgttaactagtagtaccaatcaggtatctgagtgtcggaccaaatcagaaaaaagaacacatggagaaaaaggcaggcagcaggccttgattatcactctgcattctacaatccacctttccagcagtttgatactagtcaagtacacaagtcaagtctaagaaatgaaacccattttggcgttttgaacttcaaaaaaaaaaaaaaacaatgaaagcaccaggctctctgaacatcccaactgcatctactcatttaaaaattgcacataaaacaaaatatatatagtatgcatacccaccagaggggcaagaaaagggagcaagtaattcgctatgctcagcaatgggaaaagggagaagaaatcaaagaatacatgtatgtaatcaaaatgtgccagtttgcccagaagaatccaagttaatacaacgaaatctcaagcgctgcaggttggcaaattgatctggtcagtgctgtgattttctgaacgaataatggaccatcttggacaacccgcagcgcagagagatcaagaagagattattaatggttgggggctgatataatcctctaacataacctaatgagctattagtgctgtataatctccgtgtgctacggccgtggtctcctgtacggtgattcaactcaagtggtttgtgtaaaaagatcacctatctgaccattccatccatgtggaattgatgctatgtgctgctgcttcttcagctagtagatgactagctaatggcgcaacatcctcgaattttgatagtgtaacctaccccagaatcatattactgcaagtttcacaagcaatgcttgtcatcaaagccttcctgggtgagcaagcctgtgacaagtttctttagcctgtctgcaccaggccctgggcggagatcttgtacacgctcaacagtgaacgatcctttcactgttgtcgtgttcaacagatccatccacccacctgccacgaacccgtcaggttggcggcccaataattcctggtcgatcttgtctagtacaggatcttctcttccaaactttcttgcaaagggagcattgctgttaaccataccgtcaaagtcattgagggtgaggtagtgagggtgttgctttggtgggttgtcccaagaaatgaaatgtagatcatgattcacagtggtgttgcggaactctgggacattgcaaatgactgtgtggaagtaaccctctggtgaagaaagaaaattggcataatacatcaggaccgtcctgggaagattgtcccaaccccatatgcagtattcaataaattgatgagtaagcatcatccacgccgagcctagaacatgatacatataaagcatgtattagcattctgtgagtgcaaagtggatgaaaatttaacaaatatgaactccatgcaagataatgaaatttgcaaaataatgaccaaattatacagtcaacataactgttatgcacaattgattggccataggttcataaccagaaagggaaagaagtagcatggtcagtaatacaatgtcccgatactaaagattggccatagttttgtggtcagaacagcttggttcaaggtttcagcaagcaactggaaaaccatagttttgtggtcagaagtaacagtttggttcaaggtagcaagcaactggataaccatagtttgtggtcagaagtaacagtttggttcaagatttcaacaagcaactggactttgactgtccaacaaaagaaaaaaggttaggatcacatgatgttttcagaaatacctagtaagattagcagctgctttgtcacatacaacaaaacgtaaccaatatgagatgggcaagcatatattatagtataggtaaacattatcttagtctatgacctgtgaaatgaggctagcgcactacagttaagaaattggagtgatactatataagacaaaaacatcggtttcaccaatgcaagacaatctgtccaaagtgattttcttggttctggaaagtaaatttggtgctgaatgctgatacaaagcagcaagcaagacgtcattgtactggagagctgcaatgacgctattgagcaccatctcgactgttactaactaccttgctgcgagtgcatgctatcaatagatgccaaaccatagtcccacaccaattgatatcttccaactcgattctttagcacatggtaagttgatagaagagagttgacatcaggactcatggtcgaccaaaataaaaacaagaaataacaccaagaggtcagccggaaaaaaaatatttttccatgtctctagcacggttacatgcaagtaaaacttgattgcaggatgaacaattactcactaataaacatagcatgagacaacgaatgcacggagtaattaatttgcaactgaaatggcaaacgctcaaggtggtgcagataaccaaaaaaaacaagaagagaaagctcatgcagaagcatcaggttagaggaagcatttaccagtgaagagcttgaatgcggttggaacacttcttttctctgtaatccagaaaacatcagatttctgcaggctgtatagcccagggtcaattatcaccggctttgccctctgatacctacagagaaaattttagccacaagcagcttgcatgaacaaaacaaacaatactttcagcgaaattccaatgcttactccttccatccgatgtcactggtatgctcaataaagttaagttgccttggcaagtcagatagaacatacaacagatctgcaaagcacacaagagaagtaagattaacatctatacatgttaattctaacaaacatgtttactgaatttactcaagcctaatccaaacaggccaagaccaatgatctccacgagtaagacaaatcatgaaaaagaaagtagttgtagatcgaaatagaaatataaagcaagatcagagcccaggggagcagagaagtggaagcctccatataaagaaagaacagccaaagattttgcctaccccagataccacctagaaggggcaaaatcaatcgaatcttaccaaattcctagaccagttgggtaaacatgtcataaattaacaaaaaaaatatcactgcataccccaactggcaactgcaaacgtataaaaatcacctctttcccctccaacccttccacccaactaccagtcacaatttgaaatttccaatcccaatccccaatatgctctccagtgagccaaacttagaatcgaatgagcccaattcgatacgaaagcgcaaagatcgcgttcatttttttggatcggagctcgcgtatttgcgcgatccaatcgggggcgattggattgaggcggggtaggagatcgcatcttgggggcgcttaccgtcctgcgtgacgagggggtagtcggaggcggagaggttgatgaaccagtcccactcgccgccctcgcggaggaggatgaacggcggcgtgggggtgc

SEQ ID NO: 1817 - DNA, 651 bp, Oryza sativa
cacgctccgcctccgcgaggacgcgctcactgagcgggagcgagctctcgagggggccgaggccgcggcgcaacagctggcggtcagcctgtccctccgcgaggcagcgcaggaggagcaggcgcgccgcaatctggaaggtgcccgcgccgagagggccgtactgaaccaacgggccgctgagcttgaggcgcgggcgaaggagctggacgcgagggcgcgcagcggcggggcggccacgggcgaaagcgacttagccgcccgcctcgcagctgccgaacgcaccatcgccgatctgcagggcgcgctggactcgtccgccggggaggtcgaagccctccgcttggcaggcgaggtagggcccggcatgctttgggacgccgtctcccgcctagatcgcgccggtcggcaagtgggcctctggagagggcggaccgtaaagtatgccgccaaccagggaggcctcgcccagcgcctctcgaagatggccggggctctccaacggctccccgaggagctcgagaagacaattaagtcatcctcgagggacctcgcccaaggagcggtggagctcgtcctggcgagttaccaggccagggaccccaatttctctccatggatggcgctggatgagttccctccggggggcag

SEQ ID NO: 1818 - DNA, 1943 bp, Oryza sativa
ctgcacccccgccgccctcgcggaggaggatggcggcggcgtggagcgtgttggccaccatggtcgggccccggtaggtgacgaggttggcgcgggtgaccaccttgacgttgcggaaccgcgagtagaccgggtcggcgcgcaccgcggcggcgagctcggcgcgctcggtggcgggggcctcgaggtcgaggtggacgacgtacatgttcgacgggtggtagagcgccctgagcgtgcggcgcagcgcggcgccgtcgccggcggagccggacacgaggtaggcgatcctcggcacggcgccgcggccgcgcccgcccgacgccgccgcgccgcgcatctgctgctgctggcgcagcttggcctcgacgaagagcggctcggcggatgccgcggaggggagcggggagaaggagaggaggagcgcccgcgacgaagagaagaagagggacgccgcgatgaggagcgacgagagcagcacggacgccagcagcggcgccgcccacctccgatggtacccaccccctgccacccccgccgcccccgccgtccccggcgacggcggcttcgtctccagcatccttccttccttccttccaccgccaccaccggcggcgtggatcgcggcgaggcgaggcgtggattgggatcgggtgcggccgcgcgaggaggaggaggaggcggtggtggtgggattaaatgtggccgttcggttggtgatggatgcgtgtgggggagaaagagaggaagagaagggaaaggaaaaacgcccaaggaaatctgtctctcgtgtgcgctttggtgttgggtgcggggatggatgacgatgagtcgatggtgatgatgaccatgcgtctccgcctgctgctgctgccggtcgcgttgggttggggttggcctgtggccaactcaggattgggacggcaaatctcccttcttttttcccttttttttggaggacgccaagtctctcttctttctggtattttggtcgtggagtatagcgaggggtttggaatatttggagtggatttggtattttgggtgcaatttattttgacttcacgggtatttggttgcgattgaaattttgaaaggagaataatataaaacggtatcctgtttggacggaatgatacatgtaagatatctaatgcatcccgtccgaacgcgataccgttacgtagcatttcccttttgaaaagtaatataaataccattgtgatttgaagggtagtgttatcgaggctaatatttgtatttagactcatgtattgctactttaaataaaaggagttatctgtttgtttctctctcatgtctcatacgccaccacccctccctttaagaaataaccatgatttatgcaatatccatgcaccatacttctaatctatttccagtcacatgggccaatactcctggttaatcctagccatatggccatgaaaaaagaaagttgttgcagtaatgtcatcgagactcgtgttctcaaaatctttcatatattgtgtttgatttgtagtcttgtgttcaatgacaaatatttctaaaattccatggtgtccctaaatacttcactatgtcactcctgatgctcctgaattttgttcgatcttctatatgcatcacccctccctttgttactttaccatcagttcacatccatcattaatttcttaaaacatttgcgttatcccttacctttatcaagataagatccaaattaagagtcaaataactgatcatgctgcattgatgcatggtgcggctgaaacaaacccactaactcgtatagaaaatcattcataccactttctcctgattgacttcaaaaataaaatatcctggtgctattgaggtacacttgttcaataaggattaaataaagcatgcgcaaccgcataatcttgctatgccctaaacaaatcagtgttggggga

SEQ ID NO: 1819 - DNA, 753 bp, Oryza sativa
gataaaagagatagactcattagaaactttccatgaggttgaacctcatgttaaaaatccttcaaaacttctattacaaaaaatccttcaaaacttatatggattgaggcgttccttaggaatttcataggattaaataattttcaatactttgattcaaaggaccatatgaaaaacaaacaatataggatttgaatcctataaaattccatatgtgctcatagggatagggtgtgagtgtgtaggataaatatacgggcgttacgagcacatgcgtttgtactgtgtgtaaaaaaaaaagatgcccttaaaatgtactccctccagtttcattttaattgacgttttggacaatgacacggactacaaaatatatctttgaccttatttttctattataatatatacaatgaataaatgcatgtttatttttattatagtgctttaaaagagaaatctatatacgttgttctagtttctttaaactaaatatttttaaagttattaatggcaaaagttataaaagtttgattccaatcttgtccaaaacgtcaattattatagaaccggagggagtatagcatttgttccgttattaagtgatccgtcctccgtggtccgtacaatgatgctggaactgttcattgaggagcgatttcccccagtgttatacgaaatgaccgtaccagccgtttaatcggtcatatatatatagttacaagcagcaaaatcgttcatacattctgcgtttat

SEQ ID NO: 1820 - DNA, 658 bp, Oryza sativa
tgactaccaaattgtgataatattactcgtattcaccaagtcatcataattgaatgtgtaaactgtaacctagttaaccatttttttttaatttttttacagctgtcaaatgcagaaaaaccttgtattcgttctagtcataaaaacataacacgcatgctgtcataagaagactgaaaagaaatggtgtgtcagcactcagcagtaggaatttgaaagatatatccacaaaaggtagctattaacataaatcagtcataagactgtaaaagaattagtgtgtacctcctctgcagctcggccacctaatgtcatgcatgtcatatcaaaaagctgttcttttgtcatcaaaagattttcatttggaacatactgtgcaaatcctaaagcagctgttccacggggaacaattgtaactttcagaagaggctctgcatgctctaaaaaccatccagcaacagcatgaccagattcatggtaagcaacagtgcggcgctccagtttgctgatgacctgcaatttgattaacaggctaagaggtaagaaaaataaatggggaaacatgactatcacatgttgagaacaagtcatttcatataaaagaaagttactaagttactaagcattgatctgtgcattactcccttactgaaagtag

SEQ ID NO: 1821 - DNA, 667 bp, Oryza sativa
cgcgtgggcccgccacatccgcacccaccgtgagccgcgcgcgtgcaccgcgtccctcccccgaaccctagcacgccaccacgtgctccctccgcacggtgaaccgtgtcaccgacaagcgggtcccactcggggccacgcgaggtgagcccggtccaccggctccctctctcctcccctcccgcgtgcccttgggctgccttctcgggccggccggcccattaagctcggccgagccgcccctttctctcgggccgcgccttagctgcccgagggaagtctattcctcctccctcttcctttttctttttccaaaagggtttaattaaatcctttttcctttagacaaaaatccaataatcttagaaattcaatatcttctcaaccgtgtgtccgtttgactccgttcgacttccaaaattccccaaatctcgagatctatctattggcacgcttagaggtcaataatagggctttgttttcgccgtttgttgagttgttccgtttcgcgtgtagtttcggagcccgaaagacccgcagtgcgaggatttcgaggatcaagctcaagatctcgagcaaggcaagtcacctttgatcatcttgcacctataatttaaatctaagtatttcttttgcacaaaaatattgcataaataggattatcacg

SEQ ID NO: 1822 - DNA, 3855 bp, Oryza sativa
  unsure (1)..(3855): unsure at all n locations
acgtacatttgaagttctcgtctttgaaggtccggccatatatgcttttccctccagtaccctgaaatattcattttttgaaacctactttatccacatgcagaagttgaaagctgaatgatttgatgtaagctaggtcaaaaattcataattcatgaaaccaggcagctgcatgatttaatttaagccatcaatttaaagaaaaaggatttggtgctaatctccttgtaatctagccatgaagtcaataatcactgcatacacattatgctgatcacaaactaccaattcatactcataatgtacatgatgcaaagcagtataatgatctaaaacaccatagggcaagcactgaagtgcataacacaaagttgtataatgatccaaaacacatatataggtcagctttctatccaaaacagcataaagcgctaacattgataaaacaaatcaaacttttttttttttggagaaatagttggctcaatggtgatagatagaaacaaacacatgagctcattcagtgttgtgagtaatgttacactatgtgactttttccaatagagtttgtcagatgaaacagaggaacaagtgcaacataggagtagattataaagaaagtaaataatgaagacatacgttgcccttgtcaaagtctcctnnnnnnnnnnnnnnnnnnnnnnnnnnnnnnnnnnnnnnnnaccccttgtaaccaaaccctttttctcctgaaaaggaaaagggcaatggtatgtgtatcatgcaccaaatctgggtaatcctgtaaagtagtagatgacagaagagaagaaaagcaagaagccctttgtaccagtgcaaagagcacggaagttctctgcggtctggggaacatcatccccgtataggccaataacgaccctcccaacgttcttcccaacagggtttccgatgcttatgtcaaagtacaccttgtttgtgattttggactggaggtccacttcctgcaatgtatgggagaagtttagcaaaactgaaagaataaatttgaagcgtggtatccagttctcccacatagggtaagaataatcgatacttgcgctgttcttttatgtatgatgttaattgaactaaccaacgtcatatattaaaggaaggaggtagtatatcgtaagttaacatctagtggaggaaaacatgaaagcgcatagtgcacatgggaaaggaaaacccagctttcagtagtacagaagggcacacgtgttttctcacaatggtgcaggcagtcactgatgatgaataacgtgtttacattcggtgcacatacaaggtaagacctgtaagtagcagaaccctatggtcgaggcaactaaaattattaatcagagcaggtgaatacataataaagcattggtgatgataagcctgaaactgcaattttggtagcataaatttcacctggtgatttaaaaatctgataacaaaatttgacatacaaaggcattactagtattagttttaatttaatggtgttggaaggtcgaggtcatctgtgctaacccaatatctcttccttcaaagaggcaacaaacaggggccggtattgcggaggctgattgcataataatagtccagtaaggtggagtagtaatttgactgatatactactagacaggattacaagaatggatgcggtgcggcaatagaaagatatatgtagggcagataaaagaagaagatccggggacacagtaccttggggtcagcggtggcggaggagacgaagcgcgcgcggctgtgagcagcggaaagcgcaggagtgaaacctccaaagacggccgatgaggggaggcgtgcggtgccggtgccggtgcggatggagaggagcggcgagggggttttggaggcgaggagggcccgctccgccgccggccgcgcgatggcctgcagtgcaaacacaagagaagaaagagcgacgataataagattgagagctcggtggggaagaagaggagagcagaggccatggatgagtgagcttacgagtgtggcgaaggaggttgcgaccgccattgttgatgttgaggaggagaccctttctctctctctcgctcaggtggattgggattggataggtagatagggcattgcactgggatgaatggatggcatttttgcatatgtgtgcacaggaaatacaataatcacacacaccttcttcattgggggaagtactatattttatttttgggaccaaaagcatctgttaaatcaactctatttgtcccaatccaactatttaaaaattatttatttacagcgtctctttctataatatatcnggaagttatcaattattatacaatataccatcggactatactattttcaaaaatacctaagatacaccatattagggttattatttgatttatcctaccataagtttcagaagaaaaaaaatgctagtttatgcactagttttaagattttacatttttatatttttttaaaaaacattatttatccattatatacggcaagaattttttttgtgctgtttttaatgtaacttttttcgagaacatacctcatttctaatgtaaattatcttttgcgtaagtaatttctctctcataaaaaactcaaaaatattttttttaaaaaagtgaaaacttgaaatttatatataaactttcatgttgggtaagtaagctacataaacaattcatatttttaaacccttagatgaataaattaattgttaaccttatatgtattttgagtattttttaaaactaggacctgagtaaatatttttcttgagttttaggttataagacttcacattcatatatgtctagatctattaacacatatataaatatggccaatgctaaaaaataagaataggaggtggtattattttttttttggtagagaggggaggggcccgcataggaggcaggaggtagtaaaatgggctgatgggcatagtattcacgggggcccatgtaatagatgggatgggcttgaacacacatgtaatgtaccaatagcctcggtcgaggtgaggtggaagaagcaaagcaatctccgtgagcggtgatggcgcaacagtggcgatctctcctcttcctcctcctcctcctcctcgtgcccttcgccgccgccgccgggcaggatgcgccgttcgtggtagcacagaagaaggttgcgctgtcccgcccgggtccaggcgtggagcgcctcgccgtcaccctcaacctctacaaccagggttccgcgtcagtcccctccccatctcatctccctcttcccccagatttagatccacatctctctctccctctcttcactttgttaacctattattgctctatccgcctttccttattgattaattcgcataggtcaaaaacaacgggaattcctactgttagctagacttgatagatagccgcgagcccatgtttccctttctctgtgtaataatgtcaagctgactcacttgttgataacacaaattatcacgctactattgtgcatatatactactcctacatgacatgacatgattgatagtcacatacacacacatcaatcgctaatccatttctccatctatctaaccacactgctattttagggaaggggaaccggaatcctcattatgggggtgtttacatccagggttgtaaagttttggcgtttccgggtattatataggatgtcgcattgggtgttcggacactaataaaaaaactaattacagaatccatcaataaaccgcgagacgaatttattaagcctaattaatccatcattagcaaatgtttactgtagcaccacattgtcaaatcatagagcaattag

SEQ ID NO: 1823 - DNA, 3896 bp, Oryza sativa
cgaatttcagcacggacgttgaggaaaacccagcaatcttgcagggtgtgtttcttagttttgtggataggacaccaagaccttgtggcttcggaagtcatctttgtcggctcgtggttcatatcggaaggacaaggtttggccgtatcagaatccttttgagcttggatgtcgtcaatattccgttctccgtctcgacgggaggatttttcgacatggaatcgccttggttcgtagccactgcgttctcgtctccggtcattggaggaccggttgagatcggcgtcgtggtgtaaatcgggaagatgatttcgccgacttgagtccataccagcattgttgaagcagggagtacttggctgaggctggtgctgacgttgttgtcaacgaagctggatgacatagtagtagaaccttgagtaccaaggccccctacctggcgcgccactgtcgacgggtgatacccgtagaccggatatagaaggtattagggtacgttggtacaaggatctacgtagtacgacatcaagcaaacaaaagataagaattatactagttcaggccccttgataggtaatagccctaatccagttgatgtgggattatatggtagaaaacacaggttacaaagagaacaagggaacttgtcggatccggcgagattgtagtcgagttgattcgactagctctcgatgagttggctcctcgtaagctccggcttcgtaggctgtggaggttgtgttggctttgagattcgatgtctaaaccccctctcggggggccccttttatatcgcagatgtggaggtctcctcatagaactcggaggtatcagaccctatacgatacgccaacgacccagttctgcccgagtaggattcttcccatctatagattccgtgaaaggtttccttagaatatacaggaaatatccgtatgcgcgtgggtatgccatatcaatatgtaacgtatatcgaagggcaaagggtatacctaacccgtaaccctgacaatatgtttttagtgttttaaaacctaaattgtaaaataaattacgatgagaaaaacatcaaacttatttttttaaaaattcaaattttggcaatagcgtaaaggctaatctctccgttcaaaaatatagcaaccaaatattcaatgggacataacctaatactatatatttgaatagtcttttttaaatgtattaataatataaaaaaaacaacaaatttgaatagtctgataattacatgcgccaaagagcaagttgggccagaatgacaagaatgaattggtgatatggatcgctgccaatcataatgggccaatcttttcctcggcctactaaaccagaccggccgtatttttctgggccagtggtaacgtgccctgccatttgtacagcttatccgtctccatctgggccgatgaaatcacatccaacggttcacataaaaaacaaagatgtcatctcccccgcttccggagctcgccggagctccgtcgcgcgcaaacgacgacgagaacacgaggtggtgagagacacccggttcagagacttcgcagcaaccgcgttttccggcgagcttgtcgcccgtcaaggacaaaaatcagtagctctgttttgatcaatgtacactcgaatcacaaattgataggtaaaataattcagaaacagcatatacagtgcagaaataaaacagtaatttgatatcaacccgctacaaaaacacactcattacttgcaccaagcaaacgactgcagattaaactggcagaacaagcaggcacccaacgttactcatctgcaccattgattacttgagtaccgcgaaacctccaagtccggcgacgacaacgattggcacgacggaggcccagacgtcgagcttcccaacgcctcgccgccggtcgctcggggaagcagagacccagcagccgacgcccacctcccgcgcgccgaacacggcaacggcgagcagcatcacgtaataggcgtcgaagagcgccttgctgcgaacgaacacgccgcccggcgacctgaaaagggcgaggacgagcgccgcggcgaccttgccagcgccgccgcccaccagcgcgcgccgcagcttcttatcggcgtcgatgatctgctcggtggccaatgcggtgggcatcgcgacggtgacgaaatcggccattgctcgatcgatcgactcgatggtgcgtgtggtgactgacaaagtgacaaaaaagaaggtgatgagcttggatatgaagtggatgcgatgcgacgaggacgaagaagagatcgccagtatttatacaagcgagccgcgtggcggtggaagtggcgttcagacatcaacagcccgagcccggttgagcccgagagcccgcgacgagccgacgactgatgcatgtgctggaaactggacgattcactcgtcagagtctcagcaaagatgactccaatataaaataactaacaagaaagacgacgcagagatgccgagttgctaacccccgagcccgagcccgagcccgcgttaactagtacgaaaagctggtcgtgagatcaagagaagaaagcattatcatttgtcaacgaaagggaaatttgcaaggaatcgtcgtcttggtagcagacatgggcccggagcccgaatcccaccatgggaagcaacgactggacataaactgcataatactatatgattaattataccacttcgccttgagaactgggatttagtttaattatcacggtgataagcgccaggtagttataatcaggcagaacctccgccggggacgatggaataagtagctagctctgaccatctccgaccatctgcagcctgcaattctgctatgatatcctcactgcaatcccactgtttctttatattattttttcgattaatatatggtccttcccttctctattgctcccagtttcatattataagtcgttcagctattttcttaatcacattgtctttaagttatttatagagaaatatagtaaaattttaacccataacaaatatattatcaaaacatatttaatattagatttagtaaagcttatttggtgtgtaaatgctgttagatttttttataaactaaataaaacttaaagaattttgattaagataaaagtcaaatcgacttacaatataaaacagagggagtgataagtgctacacagcaaagctttttttcttttctaaaaaagtaatataacattttttttatttattcttgtagcgccacgtatacgtcttatgagacgagtactaagtgaacatgttacataggtaaccgccgttcaaaccatagagggatatgatttcaacctccggggacatggtttgaacgggttttttgtaggtgtaggatgctctacatctaattttaggattaagggatatgagtgaatatgtaaaataagtttttcccagtccaaaacacaatggggccttcataggatgaatccttttcctccggtgaaataaccgagacactagtgccacattttgctgggcacatacggctgcgtcacaagcgattgggcatatggtcgtcgttgccgtggagcaggagcctcacaggcaacagtgcatggtgacgatggtttaacaatttttgacagaaatggaaaagtattagtttagcataaaattaaactattaccggtccaatgatcgagtagcagcggatcaagacggtgacgtcagaaaggcctaccacagggggaaatttttttatttatacatttttttattaaaatatttacaaaaataatttttttttgacaatttacaaatctaatcgcctcccgccctttggcagggtgattttccagagggcggcaagggacctaaatgtaaaatttttatttgtgttcaaacc

SEQ ID NO: 1824 - DNA, 1509 bp, Oryza sativa
ccccccgcccttgccgacgccggccaatggagttgccccgactgctccggggactccacagacgccccgcccccggccccggcaccgctggcccctgggagtgccggccaactcgtcgccgacatccgcgccatcgagtgcgacgccaccctctccgaccaggaaaaggcacgccgccgccaggagcttctcggcggcgccgcgcccgccggtgccgacgccaatgatgacgagggggacgacgtcctccaggtcatcggcaagaacttcagctgcgccttctgcatgaagctgcccgaacgccccgtcaccgtcagtactcttgcggggcctttcccccattcttcctcttactacttgctttgcttatatgtacgatgatttatcttaacgctagggtgatgatgggggctatcctatcccctctcttcacacatttatattcattacttacattagagttgtatcatccctgattatccgtcaatcttattttgagtggacgctggcatttattcttttctgttggttcaatttgcatttcctgttatcgtttaaggttcctaactagtgaaatgaccatgtccaatttctacatgatattgtttgcttttgctactcatttcttatatttcttatttacgctaccatttgaattccaataacggaacaagtcttctaaaaaggcacccacataacctgcttaggtgctaggcttacatcctcccaccagaccactcttaactgattatcatgaaccagatcatcgatgttacgcacctcgtagagtgatgcttacatttctttatttctattaattgagactgcaatgcttgttacaattcaagtttaacttgttgaacacatcgattgcatgccctttctagatgataattgtttgctttggtaatgccaactggtatgtcactcctaattttcaccacatgcacacatttactatgcctagatatgtttgttttagctcataccaaatcccccgtacaattctgataatgcaaacagtattctaaaaagcaatccacgtaacctgcctaggctctaggattaggcttacaccgtcctgccttgccagcctagctcattacatcacccaagcggctgcctaatcagtcactagacatttgtatgtggtacagctagcttctattgccatcacatgcttgttcttctggattgatgcaataccttgcattgttaaaagtgctgtcttgttcttttggggtattggtttaaccttccagtttctgcacataattcttattttgatccatgcattgtaggtaggtaaaagttcttgctattctgtcaattcattggacccttttttttttgggtagcgtttctaaccatcagattctacttttgtcttgggcagacaccatgtggccataacttttgcttgaagtgcttccagaaatggatccacagcggaaaaaggacatgtggtaaatgccgggcacaaataccagcaaaaatggcagagcagcc

SEQ ID NO: 1825 - DNA, 596 bp, Oryza sativa
taccttgttttggtaaaatagttcatgttggctagtccaatgaccttcaaaggcacataatgatatgacagaaacctcaggtccatccttcatggttcctttgtacactactgtctcaggagatgaaccaataatgttgctaaaatcctcacaagctacttcaagctcttggcgacttaactttggcaggcttttcagcatatcagaatctggtgagagcattaagatattaacagcactattcaaatcatatcaattaattaaccgataacagcactaaccgatcagcactgttatctcatcactccaactttttgatctgttccacgaggatattcttatcgatggctttagcttgcaacttctggaagcagtaattgcaccagtgatcacaaatacaagcagaagaataccagttgaaatttctaaaatgagaagccatgttggttgtggtgatctttcatgtttatggtcagaggggggatgcttgaatccctttacgccacctcgctggccagccggagaaccacctaagacaaaatgagtggattcagccaatatcactacatggtgttatcgactagttacccaacaat

SEQ ID NO: 1826 - DNA, 1001 bp, Oryza sativa
cgggcttcaccttcagcttaaacgtgtctgcacagccaaaccaccacacattgtcacacattgtgacacgactaaattaaacaaaatcagtcactaattaatcaccttgggctgagcagttgtagagggggccagggaggccgttgagggtgtagggcgtcggagatgttgggcccgccgccggtctggagcgcctggctgatcaccgcctccgtgtcgttgttccaccactcgccgaacatgatgggcacctcctcatgcggcgccgggaacgggtacccgacgccggcagggggcaagatgaccatggggccatgcacggtggcgcgcagccaggagatgtgcgcgtgccaccacagcgtgccacgctgcccggtgatggtgaacctgtacacgtagcttcccccgggctggatcgggcactgcgtgatgtacgacggcccgtccgcccacccgctcagcagctgccggatcccgtgcctgcacgcacacgtacgtgagacacacacggtgaaaacactgggttttttggcgtcaaaacacggtggaaatcgcgaggcgtacgtaccagtggatgctcatgttgtagggggagtggttgacgaccgtgacctcgacgtggtcgccctcgcgggcgaacagcgtggggcccgggtactgcccgttcaccgtcacgatgctcttcgtgctgcacagccgcgtcacgctcgtcgtttgcacctgccatgcatgtcacggcaaattcgcgttggttttttttggcgaaacttgtgtatcgatgtgatacaccacaccgtggatatgcatgcacttacatcgaataggtactgccttgtgatggcttcagctcccattgcggacagcgtcatcagtgctgcgacgaggaggcagcaacgaagaacagaggaggctgccgccattgctaccttcactgacctctctgtctcgtatgttaatgaagctcgctcttagctagctcagcttgtgatggtatggccata

SEQ ID NO: 1827 - DNA, 680 bp, Oryza sativa
attcctgcagccctggttggggcttagaaaatcgcagctcggtctagcatttgtgcgcaagaaggcactacgcctgtttgtcaaatctaagaattgttttccccgatacaaaaattattagaaatttgtgttcacacatgacacatcccttgatgagctccaacagaagtaatatatcacgaaatcctactttactaaacaaacaggcagggcagatttggatgccatattgttaggttatagtgaagttagctgtcaatcaatcatggtgacaattttctcaattttaaactatatatatgccataatcctggatgcaccacacaactagttctttaaaagttgcatttgatgtaatgatcttatttaagagtttggtgcaataaattaaagaagggattaataggagcgatagttcagagtgtaacctctagcaagggagatgatgtccctccaatccatctgcttgctcacacctaaaaaataaaataaaataataaaatcctcaagtggttaaaacgagccatatcataagagattattgttttaccctcagagttaatggcaggggctcttaatacttctagggccttcctgtataacccctgtaatacacagctggtttgataagctcaaagtcccaacccacccagactgaaaaaagtttactcacagcatct

SEQ ID NO: 1828 - DNA, 581 bp, Oryza sativa
ccctccccaaattggcatggtgcgcacctcatttctcccctcccgtttcccgccttcctctctcggaccgacgcctcgccctccctccgttccctcgctcgattccagcgcctggacgcagaggagcagccgcgccgcgccagccgtcgcccatgccgtttgaccccgcgcccgtgagcccttctcctcgaagctccctcgccccagcactgctccgaggtcggttcccgaaccgacatagccaccccttaaaagccgcccctccccctctcgctcgatccccccgtttcgctccgagccgccgcgccattgcagccatgccctgttctccgtcgccgttcgtcgtcgcgcgtgtcggaggagccggcacgagcgaggacgcatgacgtggactccgggcgcaccctctcctttctcttccccggcccgaggccggagcgatcacgccccgcgctgtcggccatcgtcactgcgccccttcaccccgtcacggtactgccttcctccgttctccctcctcgctccatctcctccccttagacacgggtagtagcacgagtagattccccgtagtcagctgg

SEQ ID NO: 1829 - DNA, 2539 bp, Oryza sativa
  unsure (1)..(2539): unsure at all n locations
atcgagccgatatgccggggggcacgtgttggcttgcttacgagatcatcgcccgcacctggacctcgaacatcttcgtgagggttttgctcgttctcggaggactccggcggagatagaccatctggcaaggtcaatgtcaccgttggccaagaagatcttccagtctatggactggcgttggccttcttggtagtactcgtaccctgtgacaaatatcttaggaaaagatgtaatgtagcgaaagatttgtgaaaaaactgtaaggagtattttgtgaataaagaaatctatctttgacaaatgtctcttactctggatgtcatgtgtaagagtgcgttctcggttaacgactttagtcagccgtttgattcgtacactctccctagcccctagccttgtcgtcggaggagttttctcggaggataaggctcttggacctttgacctgccttggttgaataagctctgatcctagcccccagccgtgaagttgaaaagttaatttccgatttcacggcgtggttaatacgcacggtgagaactcttacacgaccagatcttacatggtctttcgtctctacaggatctgacaaggccttatcggctctgggcgtccccagccgaagatcccttaggttcctcgaaggccttgtcgagacggcgtaaagggacataaggacatgtttcaacgctaggtgtcatcagagtgagggatcatcgggcgaaacacgttgattgtgatatgggcctagaaatagcctttattgatactgtaagggtgctacaggtatgaatgatattgactcatacaaagaatttacgtagttggtcaatgttccaagaatttgctaattcgcgaccgtcgccgtctgcgattttgaatgcgcctggccgcaagacttgtgtgatcgtgtaaggtccttcccatttaggtgagagttttttggcccccccccccttgagncctttggcttttgaactcgtcggaggacatagtcgccgatcgaaagtatgcgtgcacggatgcgcttctcgtgataacggcggagggtctgttgatagctggctgctcggacggcaactcgttcccgatgcttctcgagaagatttacagcgatatctcgctgctcctcctggttctcgtcgagtgcttctgtactcgtgtactctgatgttgtagctcgcctgggagcatggcctcagagccgtacacgaggaagaaggatgtttccttattagacgttgtcggtgtggtgcgtacggcccatagtactgacgggagttcttcaacccaccttttgtcgtgtgacatgatcctgtcgtagacgcgggttttcatcgcttgtagtactatgccgtttgccctctcaacttgtccgttcctttagggttagagaccgagcggaagcatattttgacccccagcccgatgcagtagtcctggaaatcggcgctgatgaattgagagccgttatcagttatgatgcggtgtggtagtccgtatctgcaaaatatccctttgatgaatttgatggcgttgtcggccttgatttcccccgtgagtactgcttcgatccatttggtgaatttgtcgatccgaaaaaaatataaatctgtagccgccctgtcctcgtgggaatggcccaagtatatctagcccccagcacgagaatggccaagtcagagggatagtctggagtgcttgcgcgggtagctttgtgtgtttactgtggaattgacaggcttcacatcgctggaccatgtcgcatgcatttttaagggcggttggccagaaaaagccttgtcgaaaagctttgccgaccaatgtccgaccggcggcgtgtgacccacatatgccttcatgtatgtcgaggaggaggtgtctgccgtcgtcggtcgagacgcatttgagaagtaccctgtttggcgctttcttgtataaatcattgccgaccatacagtagatctttgctttacgggttattttctcggccactgtgtcgtcctcgggcaactcctcgctgctgatgaatttgattagtgggatgcgccagtcgtctgtggtttagatgtcggcaacggcgcgttctgcctcggtgacctccgagctaatgtcgggggtgttcgggctgacttcaccgctaacctctttcaccgatgacttcgtcaggatatcgagaaaagtgccaggctcgagcgattctcgtctggacgcacgtcgtgctaggtcgtctggctcgacgttgtccttgcggtagacgtgtcggacctcgatcccatcgaactttttctctagcttcctgacttttgcgagatacttggataactcagggttagagcatttataatctttgtgtacctggttcgcgactagttcggagtcccctttgacgattagtcgcttggccccaagtgtagctgcagctcgtaccccggcgagtagtccttctgcagtgttattggtcgccctgaagttgaggtggattgcgtgcttgaattgatcttcggagggagacgtcaagataaatcctacccct

SEQ ID NO: 1830 - DNA, 1292 bp, Oryza sativa
ctctgccgccgcaagaaaccctagttcatcaacctaggctcgcttttcggcgaccttctatcggcaatggacctcggcaaatcagcttccactagtgcaacgttgaagaaactccaggaggatggcgctcttcctggccatggaaccatggagagggaagcaggaggtactaatcctcagcccatattgggtcgcatggttgcgatcgaagattatgttctctgcggttttctccctccaccttccaaattcttctcctggttttgaatttctatggcctctctcttctccatttgaaccccaattccatcgccttccttagcatctttgtgcatctttgtgaggcctacatcggggtagagcctttccttgatctttttcgcttttactatgaactgcgttggatggaatccaacagggtatctggttgcgtcgggttccgacttcgggatggcctgaagtcgcgttacattcccttccagtgcccttcttctcacagcaagtggaggaataggtggttttatcttgagatcaaggactcgaaccctgacttcgtggttcccgaagatcaaccgaacaagattccgtcttggaccgcaaagccccccttgaccccctctcttcagtcgtttatcgacatcatcgacaatctctgagtacggggtttgtcgggatatgaagtcgttgcagacttcgttggtaggcggatccaaccgcttcaggctcgggcccatccagcttataactattccgggccagaggacgtgacccgggtttctcctcggggtatctttctcgcatttatcttgacatacttgtgttcgcattcctcttgacttatcgaaggttggttctcgattaacaggtctgagcggggaaaccgtggagcgccgcgtcggccaagtgatgatcagtggcccgaccacggcgagtgacatccctatgtccctttgtgaaaagggggcggcggaacgtgatgaagccatcaacgtaagtatattcgatgaacatcccgcattctcctttcgaaatcactttatgacttgattgagcgtaggcccttcctttgactgatatcatcggaccgctcgcggaccatcaggtggcgtcatctctgaaagtgaaggtcgtcaaggaggcgtctgatgctgccaccactagcggtggcaatgttctgacaaagccgaggaaactctcgtctgtaatcggacaacgtcgcaagggggcgaccccctcgggcatttattttatcggtaaatcgtgcagcaagaaggatttttccttactttgcg

SEQ ID NO: 1831 - DNA, 1486 bp, Oryza sativa
ctgtatggtaacacaataaaaaaaatgttagctgtgaacacagcaaagccttatgcctcacattagcaacagcaattatttccctcaacataccacacacttgatcgcattattttcactccaagagcggaatgaataagatctgccaagtgctggttccttctagagcgttgggggaaaccttctagtagctgatatataggcaatctctgtttaaatgagaacagaaatggtcagatatctttccattataatgccaacatgtttttacaaagataatactggcttcctcagtagttccttgtaaaaagtgctgtacagcatcctcagtgctaaatgctttcagttacatttcatgtcattatgtcccattacttcgaactatatattctactccctccgtttcaggttataagatgttttgactctagtcaaaatcaaactgctacaagtttgactaagtttataaaaaaagtagtaatattttcgacccaagataaattcaatataaaaatatatttaattattaatttaataaaataatttggtaatgtgaatatactatatttttctctaaacttagtcaaacttgaagcagtttgactttgaccaacgttaaaacatcttataacctgaaacggagggagtatatctcattatgaaatctgagcataaaaaaaatgaaaggtacacttacgagaaaatgattcatggttatccctaaatgcttcatcttcccattttctccaagaatggatctgccaccatccaatatttaagtatcatgtttacctttttcataaacttataccaaaataagataataataacattataaaaccaattttaacagcaaacttagaatatagtattaacatagctaatccagatttttgtaaagagatatcatcatccgaaaaagaacagagggactaatgcatattatataggatgcataaaattgagcatagtctttttctagaagagacatcaatttaaatttcacgcggtacattttaaatacttgaagcaacaggcgcacaacttttccttggaacaattaaatgcatctgtttatgtacatcagaagtttttgtatgtaacaaatttacatattctaaatctgtttcatcatcatggtgtgctttagtagtaaagacatgcacaaattagtaagcttgaacaatgttaaccagcaacaaaagcttcatggaagcctagcaggcaatgccattagctttttagccatccattgaattcatacatcgatatgttgcgtaacctacatatagttcctgtattttttataagtgttttgatgacatccaaagatcccaagttaaaaaatataccaatgaaaatcaacagtacatcttaataacattgaaagttgcaaatgtttagaaaagtttataagaggtgtaacttgtaactgaaatggaaatttataacaactagaaaaaaccttgagtatagcaagcagcat

SEQ ID NO: 1832 - DNA, 1457 bp, Oryza sativa
tctcctctgagagcgtcttcaattggtcgaacaccctgcgtgcggcacggatgctgcgcccgactccacatatctccctcaccgcaagcagccgggccccagccgccgcggcgatggcggcggacacgtcctccacgccgccgaaatccagcggagcaggcagcagcgcggccgccgcagtctgttcgagcagccgctcgctctcctcccggctccgcccgacgggcacccgcccctctccgcaggcggcgcgccccgcggcggtggaggcgaacccggccagccgcgcgcacacgccgccccattccagggcggcctccgtctctacccgcatctgcttcgcctccggagtctccgccgcgacaggcgacgttagggcctgggaggcggcggcggcggcggcggcggccctgaagcgtggcggcgaagaccgtgcgctgcatacgaggccggtgggaagagaaaccctagaagaggggatagccacggagacttgggaaggaaaagggaaaaaggggggggtttttttggggggggggggcttcgcggcggcggcggcggcggcggccgccatggctgtgcccgtgggagaggcgggagagctcggcttggcttcccgccggaaagttcgccttatcctggtttgtccccatcgaataccgctttagtgtggacttgacgtattcttcttacgctttcatgttgctgcctccctattattattattatattattaagatagctttggaagaaaacaccgtgttcgccatcaaggatacaaattcctactttaatagaaaaaaaaagagagaaaaaaaatctaaaatattagatcatgatgagcctatattataacggttgaggttgattggatacctataagtattaaggttagacaaaatatagagagaaattaattctactcaaacttggtaaaaaaaattgctaccctaaaaaaaatagaaatcatgttggaatcatatccggacaccattcggacatgtctcacacctcactaccacgtactccatgtttttttagagtacatgtttttcttaataatactataaaaaaatatttatgcattgtaacgggtgaatgttattataatcttattattgttatataatttagttaagatgaaattcaatgtggaaattcacttgggtatatactttttagaaaatcataagctgcaattaagagcctgatcatctcaagttagcatgcgagttttttaaaaatatatcttatacgactccttccgtatttccaaaagcgaacctaaaacctggctcaaatatagatttgtatttttaaaatcaaacggatttaaaaccgactcatacattgtatgaataacgtatcaagatacactatacgcagcatcaacatatggcctcatatgtatagttatacatgtctatgaataaatatatatggtgggttgagaatat

SEQ ID NO: 1833 - DNA, 620 bp, Oryza sativa
tcagttaatccctcccacaagggaattgaaggggtgtggaattaatcccctccaattccctccgtcatggggattaaccaaacaagccctagaggagaaggttatacctatgggaactgatcaacagatgcaatgaataagtttagcatatctccttgatcagcagcatctttgttaagacaagacacaagtgtcgcagcattagccaggacagtacatgatgaagccgtatttattagccttctcaacaaaggagagtgcacagttctatgctgagaagacatggtgtctgtatcctcaagaacaagcttgtgcagttgctttccagccgtcaggatagcttggacgaccccaacaaactacaatacaaaactataggcaatcaggcgtcaagaacagaatgcaccagtcaactattggcataagaaccaagccataatttttcagcagcataacatttactccctccgggttgataatacttgttggtttggtcttttggacaagggcacggtctccaaaaaacaactttgaccattatttttcattataatatgtataaaaatgttaacaaatatatgattttattaaaggactttttaagacttatctatacatgt

SEQ ID NO: 1834 - DNA, 814 bp, Oryza sativa
tattcaggtttaaggtactgatctaatgaagacaatctatcatcaaattgagctttgatctggtattgccaatgccatattattattccgaggactttgtagtttgacctacaatatgctttacaataatccaatgtactactccatttaaaaaaaaaacctaatatagtattcagattcatggtactctagtactatatttgttttcctttcgaatgaagggagtattattatttgcccttatcaaattaccaaaatgcctctaaacttatcctaaggccttctttggttaatcccatcgggattaaggtgcggaattaatcctactcaatcccttctaatccctgtctcacgcggaataatagaacagtctagagtgagtaaccaaaggtgcttggacatgaataaaaggatagtaaaaaaaaactatcaactatgaaaataacacacgtgatcttttctgcttattcaacgtattattgacgtggattatttgctctatacttctaaaattacgggctcaaacaatgttcttatagtacattgcatatacaaacttaggccatgtttagttcccacgaaaaacttttcaccatatcacatcaaatgtttagacatatgtatggagtattaaatatagacaaaaaaaataattacacagattgcgtgtaaaatgcgagatgaatctttaaagcctaattgggccatgatttgacaaatatggtgctacagtaaacatttgctaatgatggattaattaggcttaataaatttgtctcgtagtttacatgcggaatatgtaatttattttgta

SEQ ID NO: 1835 - DNA, 564 bp, Oryza sativa
gtcaaatcccccccaacttagtggcttccccagtacataggctgatcctgcctttctttttatcttaagtataattacgccttcactaaataactatactagttttactcggtaccaatgtttatgttgtttgcttgcctgcaggaattcttggatcagttcttgtaggtggtgatgccaaactccctagtgccggggaggtactttctggtgctgccaaggtattgtattattgcccctccatgccctaactatcaacccagaatactactgctatattgattatatatcttataactcaccgtcacatgattcctttcccccctagtttgtcaagaagcatggaaacgaagggaaagatacatcgtctaacaccgatacacacaccgctcagctattatctcaggtcaaccatctcagacaggagatcaatctctaggatcaaggcctgttacagttgtcaccaatgctgctagatcaggtaagttcctgctgactagttactatgttttagaaacagacttatgcatgggtcacagatcatacaaacataaatttcacatg

SEQ ID NO: 1836 - DNA, 2943 bp, Oryza sativa
acacccaggccatcttctcatggccatccgaattccacaaatcttggggaagtacatattagccgtaacatacttagcctctgaaattagttctgcaatgtcagaaaacaggttcaacttactgcagacctcttttgctaatttccagtcatcatcatcaggagcacaaatatactgttcctctatttgccttaagtgatcaaagacttgcttgtagcttatggcaacatttaacatggataaggtagagtaccatctattattacaatcaagagtcaacttcttgtcgagattaacattcaaaccacgagcaacatcagcaaacactacatctctttcagttgttgctgccaaaaatcaacactggcgcggatcctatcaacagcacctcccatcacacccaggcaactattggcaattctacttagcacataggcgcagcatcttatgttcagcaaagacccacctaacaaaagttgttcggtatccagcctttgctttaagagccccgtaaccgtatcatctgtagaacaatcatcagccatcaccattgataccctccttccaagattccattcgttcaaacaagaagacagagtttcagaaattgcttgagctgtatgcgggcatggcacatgtataaagctgcatgtggcaatcaaagcacaataagtttttacattaaaatagtctgaatagaactttggaccgagaaaactgcaactatatttgaaaatatacatacacacatctatgcgctcgaaaaataatgaaaaaggaacacacctcagtagacggcactggaatgtccaggattggtcgataaaatgagctctgacagccacataacctctattttgatcatctgatgtccatatatctgctggtattgcaatccgacctttagcctcccacaaaatttccctggttctgaccctctccgtctcataaatgctgataacatccttcttaagactactgttgggaaccagctggaacaatggttgaagagccctaacaaacctttggaaaccgtaatgctccataatagacaaaggatattcatgcaagataatcattctcgcaagctccatcctggcaacatcctggctaaaggtggagctttctaaagaagcaacagtgggttcctgatcaatatcctttgtacatttggagggagttggcttgctgactttattactcctgcgacgaggacatttgctgagatgatcgtgcaaatgtttggtgccattcttagtgtcccctccgagcctcttatggcaccataggcactcggctttccacttgctgacgattttcttcctcttgaattctttccacacactcgatgtcagctttctcttactaacatattcttcttcaacagcatgactggaatcaggagcagcagttgagtttttggcagctccaagacccagagggatgtcatctttcataaccaactctgaattctgcaaagtagaacaggcaacaggggtagtgagaaacaaatggcagtagaaagatgataattctccctggattttctttttcacttgggctaatttctcatctctatctctactattataaaaattcaagatgtttttgcggtactttggtacgtcatccgtgtatgagtcggtttttaagttcgtttgcttttggaaatacatattcgtatttgaataggtttttaagttcgttcgcttttggaaatacagaaggagtcgtataagaaatccttttttttaaaaaaatcgcatgctaacttacacggttggactcctaactacagctcatgatttttgtaaaatacatatattcaagcgaatttctacagtgaatttcacctgacttaaaacatataataataataagattaaaatagtcttttcccgttgcaacgcacgggcattttttctagtcatcccttaattgaaaaactagatacaactcatagctcacactctcaaaacaggataaatcttgtccccgtttgacatggttttgagcagcataggaggtgaggtccacttgtcattgaggataaatggtgggcccacacgacaaacgatgatcaagcaggtcccatctccagtttgggtaaaacccctgttaaacaggttggaggtacatgtttttacccggtttcaagagttaagggactgatcatatatgtatattacgcctagtctaaaaggaaggagaaacataaattttcttataatcttattgagcaattgagcaaagctgatgaattttctactagctgtatcgaactagaatgaatacagggaggcgcgagaattcagaatgtgtaggggcggagaggaggagggaccttggacttggagttggagcgagcaagatagtcttggatggacttcattgttgaaaccctagctagctacatgcctctgccgccgcccatcaaacggacagaaagggagcgccgtagctagggggttggatctggccggaggagcgtcggcgtcggtcgatgggcgcggggcggcggcggcggcggcggcaagggaggccgggagggagggagaagcttcggtgcggtgcggtgcggatgaacaactcgatccggtcagttcagtgcaggtggggcggaatgggttgggctgcccggcccaccatgtaagcccataaaccgcattccggccctgtgctgtgtccctttcttttctctttatctttatctttatctttatccttaccaatctaatctaacctaacctatttaaaaaatacttaatttttcgccgcgctttcctccgcaggttcacaattccgacgaaaaccggtcgaattctatgaaatttcgacgtttcgacacggctcggaattaagtttcgattagaatttcaaaggttaaataatagatttggtcaaaatttatcgaaaaccgatcgaaatttatagaaaaccgtg

SEQ ID NO: 1837 - DNA, 2063 bp, Oryza sativa
  unsure (1)..(2063): unsure at all n locations
gttctttgaatgtttcacaataaagaaattttaccatataataaaaatagaaccccatatttagaaacacgtgatgccccgttttgacagtaatggatccccccaaatccactcacctccaacagttggttccccatctccatcatctgtggggagagagcccgagaaatttagggttgagaggtgagtggcgacggaaggaatccacaagttgcaagggtgtggaggcgaaggagtggcctcgattggggatcggaggtggtgaatctcggtggagaggcacaatccaaggcgataagcgtcgatttgcaagggtggttcgtgggcgaatggcgaatcaagggcatccaggcggagggtggcgtcggcgtccaccgtggtgagaaaggtcgccctcccgcagtggcgcaccaggggggctcctcgcaagctgggagtgagcaatccaccaaggctggaggtggagagatgaggggccagatgaacaaaggggggaagctgcagcaatatcgtccagttcagaaggagaagaatcaatctgaagagaagattgcgacatctgcagtgactcctcagactgcaacccagcaaccaactccaccacccaattctcgcattggtatgcaaactaacccacagagaattttctgccacagatgcaaaggttttggccacatggctagggattgtagcaatgttgtcttctgtataaattgtgccaaacccacacataggacagaggattgcatctatgacaagcagccgaggcctatggcaaagctagtagggtatggtgctccaggtttaggttgcatcttaattcaaaacactaagcctgacccacctaaggagcataataatcctctggctatgatctctactgtctttggtggagaattgacagaagctcaacttgagcaaggtttcacgcaacaatttaagtggaattgggtttggaaagctaaagcaatgcctaatggaagctttcagatgagatttcgtaacaagataaagtttgatgagcttgcaaactttgattatttcaatgtcaagggcactgatgtgcaagttaatgtgaaagaatggacccagaaatctgaagcagttggaagttgcatattgtctgggtcaaaatcactggaattcctgagnaaatgaagggttaccaagctttgtatgaaattgggtcaaatctagggcttgtcttgnaggttgatatggctactttcagagctagcaatgtgatcagggcaaaagtggaatgatggagctgggtgttctgcctttgaaactagtgttaacttctcccaagggacttttgttccaagctcatttcagtctagaggaggtggtggaactggggtggtttagtgatcagctagatgacacttttgagaaaattgagatacaagaaaatactctggagggtagcagtcagagagagggtaagcaagttgtggtggtggatcccatgacagaagatcccatgtcagtaagacgggtaacgggctattgaagtttgtcagaagcaagtcctggtgccagaattgatgctgggagaacataagatcaaatgtgcacagatcttgagagacatggagttggcaatgcaactgcagaaaggagactgtattctgactcagtgctgtgaagaaggaaagaggttgggaaaaaggaaatgtcacaggagcaggttgatactctgcagcaaccgatgaatcaaaagttggctgaagaattagaaagctcttagacagatgttccaggggataaggagaatagagtcagttttgatatgggtttgaatcaagaagacaaggacaaagtagatccgggggacagtgaagattacatggattctcaggagtctaagggaagttttgctaagaggttggggattaatctaactgaagaagctcttggaagtcaagatgaagagatgaggagaagcaagagactgaaagacaaggaagataagaggtcccaagagatggcaatggaaaggaaagaagcacaaaatgctttcatcaataaaaattccctccttcatacatgaatcaaat

SEQ ID NO: 1838 - DNA, 571 bp, Oryza sativa
atctctaatctttctttggtctaaaattattaatctctcaaaatttactgctgtgaggtaagtcttttccttttccatgtccaaatcaatctaggctatgttctggtatggttcaatcccctccccactgctaagtaagctaatgttatgctctcgaacttgccattgccagctgcacttgtagcagatgggttctgtccaggattgatattctagcactgactagctcgagtgttttctagtataatcggaacttgtattacaaattcccacttttagttatactgtgatttaaagacaaacactagtttaggtggtgtttggatccagggacttaactttagtctctgtatttagacactaatttaaagtattaaatatagactacttacaaaactaattacataaataaatgctaatttgcgagacaaattttttaagcctaattaattcataattagagaatgtttactgtagcatcacataggctaattatggattaattaggctcaatagattcgtctcgtgaattagtccaagattatggatgggtttaataatagtctacgtt

SEQ ID NO: 1839 - DNA, 1329 bp, Oryza sativa
cggtccaaccagccgtcgacctaccaaatttcttcctggtaatttcttcatacgccgccaacgccatctgtccgtacgctgctgctgccgccgtcttctccctacacacggtggagccgctttcctatccccttcacgacgctgtctccctctccgtcggtacgccctctatcctctcctttcagcaggaacatggtcttttcgcattggaaaagggttttggtaaaaagattttttttttcttcaaaatatggcaaatcatcagtttcatcctttttggggtttaaacctaaacatgcgacgaatttaggggcgggcaaatactcaaattccccacttattatattctagagttcaactgtcccaggccacgatattgattgacgaccgatcagggaaaatttacaaatcgtaatgtttcccctcaagttgtagtaatgacatcacatgtgaatttggtctttgttttatagggataccatggagatgggatttgatgagaaatttgcacttctgaggagcattgcggaggagtgcatatgcgaggatgagctacgcgtattactgaagaagaagcctaatcccatctgctgtgtttggtttgagccaacctccatgatgggcatagagcaggtatagcaacaacaataagaaaaaaggttatgtcggtcttagaaaatatatatctatactacttcctccgtttcataatgtaaaactttctagcattacccacattcatatagatgttaatgaatctagacatatatgtgtgtatagattaattaacatttatatgaatgtggacaatgctaaaaagttttacattatgaaacggagagagtacagtataaaagataatagtggtggtggtggttctgccattagcccctgatattaaggacaagttgggcaggctaggatgaaactcatcaagaggggtatgaaccaagaaatatcataaaaacataatggtggtactaatataataccagtagtatatttgtagtagtacaagaagcttgatttctatgccatggttcagacgtggatctctaatttttatgtgctcctatgcaaatccaattctctggttgcatttcaaacactgctcacagataactaggtcatggtctgttatcattttcagggtattatgaagacaatctatgtcaacaaaatggttagagctggctgtacagttaaaatattgatagcagattggtttccgcagcggaaccctagattcacctgtaacctaaacaaaatacaggctattatccgctacaatatcatgatgtggaaggcaattggcatgcaccttgacaa

SEQ ID NO: 1840 - DNA, 775 bp, Oryza sativa
ttaaaaaaatttacacaaatatataaaatataaatcatgcttaaagtattttgagtgataaaacaactcacagcaaaataaattataattacgtattttttaaataagataaatgatcaaacatgtgataaaaggtcagcggcgtcatctattaaaaaacggaggtagtaataagctagtgctcaagtgctttttgataaaaaaaaatggtgcttttagattgcagattaataggaaactgaaatgtcattttctgtttgagagccttatctcaaagcgttatattttgatttcactagtcgaatcattcaccccttttaaatgtattttgtggtaaatcatgatattcattttgggtcattttgacagtatattagtataaccccttcatagagagataagatgttatacatcctaaatggacaatgaggtttatcttttttggataatatgtggctctcctggtcactgttttctacgaatgatgtttttgtttactgcaggatgatatagaagaaaaaataagttgtgctttctgcccttcgagagtagtagcatgcaacccatgtttggagtatataaaatctgttgtccttccttggtttgggaagtttgaggtcgttcagaaggaagggaatggtagcaacaagtactgttcttttaactcaactaaaatcttctgaaaatttcttctatctatttcttgtgagacatctattttgtaactcacgttggctaaagagttgtgtgctaaccaaatataagtactataagt

SEQ ID NO: 1841 - DNA, 656 bp, Oryza sativa
cagctttcagacgacttagatcagcataatgagttgtcacaatggccagattaagcctactagcaagatacttcaagatgcttgttgaaagggctacaccgtccgacggatccgtaccactgccgatctcatcaataagaaccagagaatctttgacacaacttgtacaatcttgcgaagacgtgatatgtgcccactgaaggtagagaggctatgctccagcgacttcaatccagaaaagagtttgcatcaataagcatccccaattgattagagaaattctcttcaaaagacagagactacctggtgatctccgatatctgcaagaacttgatcgaaccatggaagcctaggggttcctttggctgggaagaacattccagcctttgacattagagaggccaaccccaacgtcttcatggtggcagttttgcctccagtgttgggtccagagatcacaattatcctagtatcggttctcacctgcatgtccagaggaataggcattggagagacaagatgttcatcagaaagctgtcctttccctactctggttgattcttttaccatactaagagactgttcaagaagtaaaggatgctgaaagccctcgataaaaactgagcattcactatttggatccagttgagtatcac

SEQ ID NO: 1842 - DNA, 1991 bp, Oryza sativa
  unsure (1)..(1991): unsure at all n locations
ttggaccagctttatcttgtttcctttgacacggacctttatttttccatactgaaccatacagctaccatcctccccaagtgtctcgacaacactagccatacttcctcctcccagcccctcaacgtacactttatctccgatttcaggaacatatgagctctcattttcttcatcaccgaaggtaaaatcagttggctggtgagtagcagccaatgaagcagtggcagcttctgcttttctcattagtgaattgtactgttcaagttctgaattcttgagttgagattcaaagttcttgattatttggtccatctgagacttcacaaactgtaactcttggggcaccttttcagactctgttgcccttaaagctgctactcgactatccaggtcatcatcttcagagcgaatcttcatatcaaaatattattaagtaagatttcaagtgaaatcatcaaagaggatccttctcataatactgtggaaaagtcaaaagcagatcaatagagtaaaagagatgaacctcattgtacagtctctcaacgtctgaaagaacagatgctgcttcatttgcctgagactccagaagttttctttcatctagcaaagaaccatagagtaaaccttggcgttccttttgtttgtcaggcaaaagtttctcaacccattcttgtgcacgagcaagcactttctgatcaaaaccaatggacttggcaatactcaatgcatttgaattaccagtactgccccataagatctgatatgttggttgcagagtttccaaacaaaattccattgcagcattctcaaatcgatcgtcaacagctttcaaacgacttagatcagcataatgagttgtcacaatggccagattaagcctactagcaagatacttcaagatgcttgttgaaagggctacaccgtctgacggatccgtaccactgccgatctcatcaataagaaccagagaatcttttgacacaacttgtacaatcttgcgaagacgtgatatgtgcccactgaaagtagagaggctatgctccagcgacttcaatccagaaaagagtttgcatncaataagcatccccanaatttttggggaatttttttaaagggggaaagggggaaaaaaaaacttctcttcaaaagacagagactacctggtgatctccgatatctgcaagaacttgatcgaaccatggaagcctaggggttcctttggctgggaagaacattccagcctttgacatcagagaggccaaccccaacgtcttatggtggcagttttgcctccagtgttgggtccagagatcacaattatcctagtatcgtttctcacctgcatgtccagaggaataggcattggagagacaagatgttcatcagaaagctgtcctttccctactctggttgattcttttaccatactaagagactgttcaagaagtaaaggatgctgaatgccctcgataaaaactgagcattcactatttggattcagttgagtatcactatccctgtcagtaaaggctggcctcacagcatttatccataaagcgtatgaacctctggcacaagccaggtcaagttccaatattttccccatcaaatgcttgatcttcatttcggagtcagctatgcttgaagtaagtagacccaatattgctaattcttcagctctttcatcacctgagagctttacttccatgttgttcagcctgatggcgtcccttggctccataaaatatgttgcgccagagccactggaactcaaaacaattccaccaggaaccagatgcttgtgtgaagctttaacaccgacacacatcctagaacggcgcttagtgacaacagggctatcaatcccaccaccctggaagatctttgtggatgtatctctcaacagagattctaacatatcaatgttcttccccctctccttgcggattgttgctagtttatcgctggcccgatcaaggaccacagaa

SEQ ID NO: 1843 - DNA, 634 bp, Oryza sativa
tgcacatgacatttactacaacatttgtcatccaacccaataagtccagcagtcagaaagttaacaaacacacctcagcgcaactttgattatgatggggacgagctttaaggttcctcctggccgcatggtgcagaatgacttcaattaggtgcttgcgtgcactagatacggcatgcttaatctttatagattcttcaacctcttctctggtgcatggggagaaattgctgttgtagtactttgaatcaatgcatatacctgagatgattcttgatgtagctgccagaagcagagatatgaaaccaagcaacatcatttttacagcaaagtcagagcaaatcattagtccacgttgcacagcagtccaacaaaacaagctagcaaagagaaataaataacggaaggcctaacctctttcatcttctccattgctttgtggagtggatttcggtgggttttcttcaaccactgaacatgtacaagattactatgagttctatttcaacataacccgtgaccgaataatcgattaaaagaaaaggaagagaggctttcatataatgtacaataacttccacagaaaagaaaagctatcccttcattgcttattgttccaaaactttgaaagatg

SEQ ID NO: 1844 - DNA, 699 bp, Oryza sativa
tttcttcttttcgcctataacgaagaatacatcctgatgtaccaggtttgccgggcagttcctgtgtagttacagcacattgcctgtttatgcccttgtcactcaggtaatgccctgtttatatcccaaaagcttcagattgcataccatgaaattgaaatcactcctaaaggattggcattttgattagcaagatcaatatagatgaattgcagaggcgagataattcccattaccttaagacatactacctttattttcaaatatataacgcaccatagacacactacctttattttcaaatatacaacgcaccattcgccttattcaaatacttagtgctaatatcatttattttggtgtgacttgttttatcactaaagatattttaagcatgcctcaattatttacatatttgtactaaaattgttcaataaggcgaattgtcaatgtccaaaatttaacggtatcatatattctgaaaatggaaggtctagtatttaattttgaaccccaaaaaaaaaagattgactaatctcactgtgctggtacgacaacagatggggtcaaagtacaaggctgccctgatcccgcgaggatcagagagacgatgcatgggtgggggaaagacgcgaggaggaggaggaagaagcaccgcggcggcgacgacttcaccatccgcacggagaccagcaccgt

SEQ ID NO: 1845 - DNA, 692 bp, Oryza sativa
atcacctctctgcagaatgttatattgttaaatcaaagattatccatgcaaaacccaaggagacgtatcagcaaagtaccacctttagaacatcagcctgaattagcaacaacccagcgcctgtatcatgagacatctcgctgctgctttgaaccgcttggcgcaaactttggtacaagcagaagcagggccagattgtatcctgagaaaatacaaattgagttccaaccaaaagagaatatgatgttgaatgtaacgaaattatggtaatagattatgtagaaaggttaggagtccataagcatggactgccctagatcatgttatggccaacaggaatgacagaactggctagatcaagacatcaagtgacggcaaacaacagtgctcaaactgtagattaagatagcaaagctgaagccagtgtaaatatgatgcaagcagtcctacatgtttgcaaattcattgaggctgaatgacatggtagaattgatagtcagactgtatatcaattttaaaaaaaggaaagggccacaatgtagagatgagcatacaatgatgatgagatacaacattcacgtgcagcaaatcctctaatcaagtgttcaccggctccagttgcacaacacccaactataaacggtgtgccaaagggccctttggatgaggcccagcacccagacccatacata

SEQ ID NO: 1846 - DNA, 527 bp, Oryza sativa
gacgagagcccatgattaggcgtccaattaccaaattctaagcccacaattgggaatatttttaccaaaatttctataaacgaaaagcgcaaggggccctcgacaaaatatcacccaagtcctcttctctcttctcttctccgccgccgcctccatccgcggcgcatcccatctcgccccggcgactcgtcggcgtcggcgtcggccatgggcggcgactggcagagcttgcccaggcgggggtaatcggcctcctcttcgccttcctcgtcgccaagctcatcttcacggtcatcgtcttcaaggaggacaacctccgaatcacccgctccacgccgacctccccctccgccgcggacacccccgccgccccggccccacctccggcctccctcgacggcggccatggggacaccagcgacggcagcggcagcgacagcgacagcgactgggagggcgtggagagcacggagctcgacgaggagttcagcgccgcctccgcgttcgtcgccgcctccgctgcgtct

SEQ ID NO: 1847 - DNA, 502 bp, Oryza sativa
agtagaaccatccatgatacttgcatcgcattccacatgaccactctcagtcaattttgaaccgcgtccagcatttgtgatgggatcatcctaatcagccatagatgagaatggataaactaagacaacttttgcttggaacaaacaccattagccctttatctacatacaagtacactgtatcaccctcgattcgcttatatctaggaggtctgcaaaccctgcttatatgatctatagaaccactcttcctttttccccccttttgacatatcaaaatgtggccatatatcatacaccatcctatttgtcacccattgtaaaatttgaactaaactgcatagtacgtgtagacattgtaacaatacgtagaaagagatgatccaaacctccaatacttgaatggcagctgcaaccgcatcaaggcttgtgccatttccctgcaaaagtattaagagatttaggaattcaccactgcgaagctacatggacgccgctcgag

SEQ ID NO: 1848 - DNA, 1584 bp, Oryza sativa
tctcccgcacatggtccgccgcgcgccagctgcaggccatcgggggaggcctcacggtgccccgcgcgaacgacatcgccgccaccggaggcctcgcctccgccgtctacgccatgggcgccgtgctgttcgtcgtcacctgggcgctcgtggcagcaatcccatgccaggaccgcggcctccaggcgcacctcacagcggtgcccaggaccttcccctgggctggccccctcatcacactcttcgaccgcatcctcgacgagtccaagaagaaggaccgcaagcactcatgcggcctgctcaaggagatccaccagattgagcgctgctcgcggcagctcatggaggtcactgatgctgcggagttccccttggccgacgacaaggattccgaggtgcaggaggccacgcaggagctggtgcaagtttgcgggtcactcaaggatgggctggaccctcttgagcgccaggtgcgggagatgttccacagggttgtgcgcacccggacagaaatcctcgactacctcagtaggccgcacaacgccgggtgaggactcattgcttgatccaactttgtgtgaaatgcagccgctccaccgaggtagcttctctgtaaaagttagcatctacatatacatgtctctgcatgaagaaggcctggccttagttatgatacatttgagttatttctttcattttttttctctccttttgtagcttgtgaatccttacttgagcagttcttcgtactaatggtctaatatcatttatttcattcattgcttgtcctggtaatgttgagcactctggttggtttgtttccatgattagtctgtggattaggtttatattgtaaaaaggcgtgggcgggagtaatttatacaatcggataggttagctcagatattgagctgtgaggttttgatatactgctattcccaacattttgtttgttgatgttccaacaaatgtgtatatgatcggaagaaaaaagaatacagaattttattgattattgacttgtttttgttctagttcaaaaggccgaacaatgctccttttctttcttctgccctttgttttgttgtgcgtttagatttgaaaatggccacattcatcgtgtgctccgttgacacagtctatgatcaataacgcaaaacaggaaagcccaatgggtattacatttgggatgaataagtagaacatccgcttgcaaatgtctgcttctgtgtcctttattgagcttagatcaatattagaacaaattgtttggtattctctatttagtactattagttatataatcaacacacatatactcttctttcttgcaagaagtattgctttgttggaatgattatatctatgtagaaggttcaattttaaggttacttaacttacgttcaaaacttatgtacacatttacatttttgttgtatgaaagttgtattagggataggaactagtatcactaaatgggatataaatttgtattgttattgtcacttattccctccgtcccaagataagtgccaccgtgaactacactttcgctgcacttattttgggacggagtgagtatat

SEQ ID NO: 1849 - DNA, 1644 bp, Oryza sativa
cccataatataagggattttgagtttttgcttacaccgtttgaccactcgtcttattcaaaaaattttagaattattgtttatttttttgtgatttactttattatccaaagtacgttaagcgtaactttttgttttttatatttgcataaattttttaaataagatgagtggtcaaacagattaagaaaaactcaaaatcccttatattatgggacggagggagtaacaaactgatatgtagcagttcgcggatgatgatggtaacaaatcgttcgtgatgtctgaccacttgcataatgcatactagtgctaacttcgtaactactcctgttatgttgctctgtacagctgatatgtgggtgttccatagtcagttttaggctgattccacggaaaaaaaaagttttaggctgattgatgggaatgattcgccataactgtagatgtctcttgtgcagtaccagagatcaatctaatggtaacaggctaggacgagagcaattttatcgtgagaaaaaatggtggtgattgatgcaagaaaagaaaagaaagtgaaagtgtgaaacttgaaagtgagagtaatattcatacagtagaggcagcagggaaaaagaagagtgatatattataggctgtgctgcctggcccattgactgaagtgctataattttggaggcccaaacgaagcccgtctgagtatcctcgtatcctggggttctgttcttggcgtggttgatatgattgtgctggtcaagctctccagtctccaccatgctgcgggccaatcatcaggaggtgtcatccaagatccagatgcagaatgtactacccgtctttcttaaggtttatatatacagtagtatagtatatataaacctttccatttgtttatttccaatgctatatactggctacttctacctctcttttctaatgctagcacgttgtaaaatctgctccaaagtagtagtaatatcttaatgaactaaggctgattgttttgttgcgcttttatttgctgagttattggattcctttgtcccaaaacattcacatgatcatcgttggtgtacactagtgatggtgtgcaaacgtggacgactttgaccaatctaccttttgtcccagattcagagcatctagttatgcactttaactccggtgggtgagtgacttctgagtagtcgtactcgtgtcacgtatgcttcccggtcctgtgccagcgctgtgcaatttaataaactacactttgttttgtttttatctgattaagtgtcgtgctatgccgaacgatggaaacattaattttgggtttatgctgtgacaaagacagttgtgatgatgtagcactaactgatgatgatgatacatttgacatgcagttactctgtcccgaccgaggaatcgagtagtaactttactttttatgaagcaaaaccattctaactaagcagagaatgcatggaaaccaaacaccacgcgcagatggcatcctcttaattattattactagcacaaaacataaacataaaacgatcactaattactccataagttaattaggcgtcggcggcgaagccttggtcgtcgtcggcagcgttgaggaggtcggaggagcggcggttgggagcggcgcagttgt

SEQ ID NO: 1850 - DNA, 1333 bp, Oryza sativa
tatgttaatatactactgtagttactaaaactcggtatttaatttgttttttttttatgtattgccatctgtaagaaggaggcaccatgcatcaaccgaaccggcaactactggagtaaaatggtagtaggacgtgcctgcgggaagcagtcgtggaagaagatgcggacgaggccggcggcgatgccgatgtcgcggcggagggcctcggtgacgtgccacctcacgatgccctccaccgacgggcacgacgtgtcatagaacccccaggagaggccggcgacgacgggttcgccggtggtcaccacggccgcgcaacgggcagcaaagaggcccgagatcagtagcacaaccatacccagcttggacgccattgctcaacactctagctaacaaagatcgatcactctcagctcgacctctgcctcctgcaaatggtccatctctccatgccctatatatatactggactggaccctatcttgtggaaaagtggaatataatgtatactcctactacgtgcatagtatgttggtctaggattgtggcttgattgctcaagccagcacattatcaagatgtcagtttgctgtttctaattaattgttatgtccaagcccgatctgatccacaggaggcaggcatatgcctacatcaaaggcagagatcaataattaatatatcaccacctaaccttgcagtatgttaactatattcaaagaaaaataaagctgactttttcacaaagataaagctgaccagctagactcatttcttttagttaccatcacatctttaatttgtgttgtacaataatactgcctctgttattttaaacctcacatttttgtattttcttgtggtttccagaatacgacttgggctaatccatttaataactttgcatcaagatcatacaaagattatatttgtatgaacagattttgtaacgaaaaatctaattatatcaattttataaatcaaattctaatagtttcaaacatgtcagtcgtcacactaataaaatatttttttcagcatggattctcggatcttaagactccagattgcaagaagaacgttgcagtgggccatgatgttgatcaattaattagcaagtggtctagtgtatgaaaagaaatccaattagcaagtggtgatggtgcaattaattgcgcttgatatctctatcttacggttgcacgcccccaccaattagacacctcccaattcccatttcttttctttccttctttttaaagcttcacgagccagttagtggtacaaactacaaagcagtccagagaggaaaaaaatcaatggaaaacaacca

SEQ ID NO: 1851 - DNA, 2182 bp, Oryza sativa
tgtgcaaagatattgtcaggaaccctgaattttgtggaaagcttacatttccagtgtctcttaagcaggtaaccactgaatccaatagcaaataactacaatacgtaattcctattacaatcattattccctgagcggtgctggagttcccatcatgttcttttgtatttctccaacctttaatttcacaccacactgttagtttacattggtttacactagcagacagtagtgccatttggtccaatgctacttccaggttagctcttctagagtaaatgagtgaaagacaaatatgcgatatacatgtgtggcctgccccatggggcttgggcactgaacaaaatttggacctcggggtttttacatttcttgggacctggctgagactgaatcttatgcgtaacctgttttccaattatcgtaccaatcactttcttgatgaaataactctgcattgatgagatgttatattcaagtttacccctttggtctcatctctttatccttgttttcttgttgagatatgatatttcctctgtcttttaacaatgtttttcatctcttgtgcacagcctggacctcgagatggagtaatccaatgtttcataaaaagggacaaatcaaaactaacttatcatctctacctgtgccttagctctggtaagttcctgtaatctttttccacttacccattattgctctaatcggcactatttttgatattataacagatctgtttgttggcagataaactagacagtactcataggagtatttgttttgttactattttagtccttaactttgtcaatccttatcctagcatccagtgactgtctttatctattcttgtgtaaaacctccttgtagaatcaatttttgacttaatgcttggcgtagtagaattttggtggtcattttcagtaattttgaaaaatctgttttagtatgaaattttagtctgttcaaaagcgactggaaacgaacgtactatagtataaaccgattcaacttgctgtaagaaagtgagcttgttgagtgatcgaaaagaatatgattactcacgcatgctataagcaatatggtaattattgccctcggaacagtcttccataaactttcttctcgtccgttgattgctaccatttttgtaaacgacgtatactagtcctattgtctctctgaaagcaatgtatcttggtaattgatatgtagatattgcagttatgcaaacactcacctatcatttaatgcgtagggatgccagcactggtcttttgtggctctaatgatgctgcttcggaacctcccatataacatgatttttaagttaaagtaaacacgtgatgtgccgtagttccatgttttctgctgtataaaggacttcttcgacacaattttagagattacctacagcattttcagataactcgttacaatactctgagtagtatattgaagagaaagctagaaattgcactaacaattttaattgcatcttgtagctgtgcttgatgagactggaaagttcctactatcagctaaaaggagccggcgaacgacacacactgactacatcatttctatggactccaaaaatatctcccgatcaagtagtggctatattgggaagttgaggtaaagttcctttgccatcaatcttcttgcacccacattgtcacatacacgtggtcacagatacatgcataataatctgacatacaccatggtattgcaggtcaaatttcctcggcaccaaattcatcatctatgacacgcagcctccatacaatgctcggacactttgctcacaagaacggacgagccgtcggttctcctctaggaaagtttccccaaaagttccaacgggttgttatcccatcgtgcaggtgaattatgagctaaatgtgcttggaacccggggaccaagacggatgcaatgcgctatgcattccatcccagcatcagcagtagagcctggtggcattgtgcctggccaacctaaagagctcctcccaaggttatttgaggagtccttccgcagtatggcaacttccttctccaagtactccatcacagatcattcgacagacttcagtagttctcgcttctctgagtttgggggaggggctctgcaagggcaagagcaagagcaagatggcgatgatgtgaacaagga

SEQ ID NO: 1852 - DNA, 5942 bp, Oryza sativa
cgaaacactccacagatcgagggcttagaacctcacctagtgcccccggccgaaccggcaaaggggggcccgcgcggtctcccggtgaggagccccacgctccgtcagttcatcttattaaaaacttttgtgaaatgtgtcaaactatatgtatatataaaagtatatttaacaataaatcaaatgatagaaaaagaattaataattacttaattttttgaacaagatgaatggttaaacatttttaaaaaagtcaacggcgtcaaacattttggaatggggggagtaggaaacattaaaagtatcttccgcaacctaaaagatacaacaacacccttatctcctctctctgtacctagctgttgcgtagcctcgcgtagtggctatcaaatctgtcttagaacgcaccaattttggctcgtcaatgcaagggccacctttgcctacccatgatgatctattggaggtcactaggccctctccctatatctgggatttgtgcctcttccagctcctcacgtagcctagatatctacacctccgccatcggctagatctggttggtaaatcggttagatttgtgtctctttgcttggtattggtcactccatcggcagcattaattgcatgatgaacatgcttggaattggtcgctccgtcatctacattgtcaaggctagaagggaacacaataggcggagaaaagagggagggagggagtgtggacgtctgattttcttttcacttaatattagatactcgatggaaagcgttatgaaaagtacatattaataagagaaaagataaagtttacatgtaaatcgtgctcagaatgaattatagtggtagcaatggattaacatagttttgtaaaaaaaaaaggaattgcatttgtggaaaataacaagtgctttatatataaagagaaaaaaagatccaaacaaagtttttaaaatctgctttcatcctccgaagcaagcacttaatagtttaccttgcgcgctgattttatagtaaggtttgaaaaagtttccgtttaccctaggaagatatagttaggtccattgaattcggtggtgatcgagttaactaatttctttgtcctccctgagactcgccgtgcgcttgttgtggtctcctgctagcagctaataagcaccatggacctgtctctgatgacttaggcactgtctataaatacaccatcaccatccccacactcctcgctcgcctgcctctctgttcttaattagctagttacctccaaatcaatccaatctcaattcatatatatgcgatcgatcgatcgaacaagcaagtaatcgtcagtagtcctagctagagagacataaatatctagctcaattggctaattacgtgcccaactcaactgcaattcagttcatccgatccagcacagaaattagctataagtaagggccggcgccgccggcaagaagaagtaaagaatatgggggccggcgaggtggtgcaggggctgaagccggtggcggcgatggtggtggtgcaggtggtgttcgccggagtgaacatattctacaagctggcggtggtgtgcgacggcatggacatgcgcgtcctcgtcgcctaccgctacctcttcgcctccgccgtcctcgccccgctcgcctacttcgtcgagaggtccctccctaatataattccctcttctcttctcttctcttcttttcttgagactattattgatcgagttgtttgcattatacaatatatttctacaacttcttcaattcaaagataccagtatttctttattatttttcctaaaattaagtatctccctttctgtataacatcacttgaataattatttttttttgttttccttcacgaccgccccatgcatgaattgaatgaatgcaagttttattctgtggcgaaaattaattaaaccatcagccttttgctgcgaataaaaatcaatggcccagctcactcatcctagctttttctctgcctacatatatatgcatgttttattttaaataatttgtttattctgtggttagtcaattactgaaacaatagcatatatgcaatctgttaattttaggtatgtgtgtgcgtgatgcaggaagaacagaacaaagatgacgtggagagtgctgatgctgtcgttcgtctgcggactctccgggtaattgtttttattcaatcacgctgactgtactaaagtactaacatgcagttaattagctacatatatatagtactcctactagaatttcacttaactatatagcgatacccaattcatcgagataattaggcgttaattagctttcaatttgaatgcccatgctgcttaattagctactactccagctggctatatatactcgaggtcaatggaggctaagcatgtgtgtttttggtcggtgggcccgtccgtcacgaggtgcttgccgatgccggctgacaaaaacgtttggctgcctcaccaccatcctttactctacatatatagtacgttgcttatatattttctctgcataaaaaaaaaaagcaatcaagcatcgtctaaagcctaaagatagatggatggatggatggcgcacatgtacatgacagaagcggataaccacttagttattggacaacacaaattaaccacaagcttaattagctactacctccagtttgaagttcaaactaattttaccttgttaattaatgccatatatatgctaccacgtactactagcagtagcagctggtacgtaccttcctgtgtttgaaggtaagcgttaagtgtttgtgttgcacacgtcgatcggtcttcactttttccttgcttcttttgcactttagtttccactatcatatactgctaatggaaattccatccaacacactgcatgctttctttaattttgacccttaattgatctctaattaatcaaaaccattagaagtaacgtgacgttggcagcatatatatatatacagccacgcacgcagctgtgcacacatcgatgctgacgatggcgtacgccctagctaagttaactgactagtaggagtaggttgcacacttctaggaatgctaatccattcacccacgtacgcgcgcggtgtccgtacgtatgtacatacgtatcacacggacctcgatcgatctgatacgtatacgtacgtacgtgtataattagctacgtacatacctagtggaggaatacgtgtcaccgagcttcaattctcggtgtcagtgcctgctgacgtgtagttgaattaatttgtggtcgatctggtgtgcatgcatgctgacgtgtaaggtaattacgtacgtgcagggggtcgctggcgcagaacctgtacatctcggggatgaagctgacgtcggccaccttcgccaccgccatgaccaacctcatcccggccgtcaccttcgtcctcgccgtcctctgccgctacgagcgcctcgccatccgcaccgtcgccggccaggccaaggtcgccggcacgctgctcggggtcggcggcgccatgctgctcaccttgtacaagggcgccgagctcaacccctggcacacccacctcgacctcgtcgccgccctggaggcgcgccaccccgccgccgccgccgccaccgggaataacgaccgcgtgatcatggggtcgatgctggtggtgggcagctgcgtgttctacgcggtgtggctgatcctgcaggcgaagctgagccgcgagtacccgttccactacaccagcacggcgctgatgtgcgtgatgagcggcgcgcagtcggcggcgttcgcgctgttggtggacagggagcccgcgcggtggcggctggggctggacatccggctgctgtcggtggtctactccggcgtgctggcctccggcgtgatgctggtggtgctgtcgtggtgcgtgaagcggcgcggaccgctgttcgcgtcggtgttcaacccgctgatgctggtggtggtggccgtgctggggtccctcctgctcgacgagaagtatgcacgtcggcaccctgctcggcgccgccctcatcgtcgtcggcctctacgccgtgctctggggcaagggacgcgagaccgccctcgaggccgccaaggtcggcgacgacaacgataaccaccacatccacgtcgtcgtcgtcgtgccgccggaacaagcgcagccgcagccgcaccaacaagcggaagctgatgctgatgccacgacgacggcatgcgaacaaccatcggattcggaccgggcgaatattgcatcctctttacgacacagccatagatacttccatcgttcttgcgggttttaattaattaattactctagctagctcaggctcagctagctgctaattaattaactcgcacgtacgtacggcctgcttaatccatgatctctgttcgagggtaactaattaattaattaatcagcgcgagtacgtagaaaccaattaaccaatcaacaagaaacaaacaaacgagagcggtcgcgatcaacaagctatcgatcgaccgtgcgtacgtaggatatgcatgtatggtaggtaggagaggagattaaatatattgttgctctatctctgatcattaatatatacgtacgtacacatgcatgaacactacttctccaatttctgccaaattcaaattgtaaacttgcaatgtaacccggccagagtggggtgccccttcttcttgagttgttattcatcgccatcggattggcacaacaagtaggcagaggagaatattggcaagggaaagaagatgggttgggctacgtaccggaaagaattgctttcgattccgaccagttaatgggctacttttggtctcgggtatatcatgggctgagctgggctgatttaaatcatggcagagttgggctgggcctaaaaccaagtagtcactcgtcacaccctcaccattcaccaaccattgattcgttcgtccattgatagtttggtgataccgcggcgatggcgacgacgactcggacaaaatatgcaaacaagtataattccgtgcgtgtcaacgtcatgagcaacgaacgaattaaaggatgatatggatgcggagcagccggcgtcacacatactacgtacgtacccagggcagctatagctgttgatttctcaaacggttttggttttgaccatatatacaagctgtcaggttgatttctatccattcatcacccaagctgtctgcataaatgattcacttacgtgccgacgttttcttcttaaagatacgctcgatctatcccaaacgacaaacacaacgtatttctctgcacaaaaataaattaatttattaatatcttttttttagataaaattaatttattaatagctagctgctcctcctcatgaaacacatacatatacatgtatgatgattctaataaagacgacaaattaagctgtcttattcccagccttccctagttcagttcactccaagctaaaaaagtttaatccactctaaggccccgtttaaaatagctaagattgatggatcgatgctttgtttttcctttgattagagttatatatagtattgcacgcggtaagttacgagtgttttgtaaatctagagcacgtggaagagtgaataatctagtttttatgatagttatttaagaacgaatttgctagaaaactttcgcaatttttttttgaatggattaactactgaaaggttgctttagaaaagtattctaaggagatttaattttatatacattttttttcctgaaacacattgtttagaagattggaagcatacaaactaaaaacaacaagtacacggcaattaactgaaagaaagtacttcatgctgcgttggcttgtgttttttttttaaaaaaaaagtccaatgaagcctcagcattattaattagcagtctaattacttcagtatattgttcat

SEQ ID NO: 1853 - DNA, 4249 bp, Oryza sativa
gggttacagcatgcaacaataaagtagggacacgatatatgtgagcgatatatacttgcaccccaccggactaattaattaataaaacattattcttaaacatatagagatatggtagcttagcattagatacgcccacgaaagcgagtaaacaaatggaaagaaaccacgggtcgaacgaacgaaaaaagttcctccaacacgaagcatcacgtacatacatatatattcttcaattcgcatatataagaagcatttctgcttgactcaatcacaacgcgaattgaatcgttacatatatcgatcttgctggtggtagtggtcgctgcactatctatctatatatatctgcagcctttagcaagcagaggcagccaaggtggtgctggttgctgtctcatggagtacttccacctagctagctcattttgtgatctttccgggtggagaagaattaatccatcatttcagtgctggtgggcatgacagatcgcgacatttttaaccttatccggcgagagatgtgtttctgccctctcttaatcactcgtgtgtctcgttttgtttaatttccaggggacctggcctactgctacttgcagtactactcattagcattaaacaagaaccagatgcagatttagtagtattgttaatttgcactatgtaaagctttgttgccctcatgcatttgtttaattatctgcctgtttgtttgtttgtttccacgtgatttcgtatgcatatgcatgcatttcccccaacattattatttgacttctatctgcaagtgcgaatataactatgtgtatgagtggtacgcaatatgatagatattgttagctgatatgattgagcttatccaatgatttgtgctgcttctggtgaaatgtttttggtccaagttaacaagagaccgggagaagtaaaggattaaggaagagtaaaaaaagctaccggcatgcagcaataacagcagcagcaaccacatttatttggagttttggaccatttggttagatgtagctatcagcagttccatgatgcttgcttgcttttattcatccactgctctatgtttatatgcacagtgactgatatttgtcttggtttgcctgattaggtcatcgcaatgatatttggcagctaattaatcaagggctacttttgcttaaatagtactagtaccaatctctgagagatcgataaccacaaggtattaggtggtggttatcttaacaccgccgaactgaaaaggatgatcaatttctctccctttctctgtcatcatgaaaagtgaactcgatcgatgcaggaattgaacagttgtatgcataaatggcagataaaaatcttgagatattttttcccattccctttcctttcatcatgtggaaaaagtcatcttgtgttattgccttgtgctttccttatcctgtttatttgatggataagtacactagctcatatccctttttgtttcagagatttccacttggctcaggcacttgctgtggtctatctcttctgcatattgcaagcattttagcagaagaggcagcaggtgtgatgtgagtataataatatttctctgtatacattgctgatagtgctccactgaactaaatgttttaattaggttttcgcctcggctgctacatttttcagatttctcttgcggctgtccaggtcgttaaatatctgaatcgcattagatatttagttagcaggacaatggtatagaagaaaatggaatgaattacaagtgttaacagcctatcagagaatcaatgccgggaagcaagtttcaagtaattttcttcagagagcaccgaaaagtctccggtcaggttcagtttgtttacctgtaacagacagcagaatactagtagtagcagatagttacgcaaaaccgccttctctgctcgcagttgcagcggtgtttgggaggcagctaagctatcatgtcgctctgtactactactggaccagattagatgctcgagaggggaaaagttgcagaaaaatttcagtagatccgacaaatagggattcaagattattctgaattactcaagcctgaagcttaggtgtcctactttttagtaaagtctgagtttcagtggaatgcacatgtaaattactatgtaaatgcaagagcctagctgactcgatgcatatataaagattgattactagtgctacatatcgatccatgcattgcttgcctcccaatcagagaggaacaaatatttgcaggaggaatagacaagatgcgatctttttcagttgtctccatgctcggggagcgattcatgtgtcttgagcagccaggaaaaacttttgtagattttttatctagtgctctccatgtcggattatgctcgccaaagtggagtatgtcgctgtagactgtattgcaaggtggatctctctctctctctctctctctttttcaaaaaggcaaacgcgcaaagtggatcgtgtttaattcacttttgcctcttatggctccactaaccaatcttgttgccttgcctcatttctctaaactatttcaccatcgtacataactcacaaaatattctacctcctccgattcatatcgattctcttataaatttaaccaaatttataaaaaataatatttctaacacaaaacaaacatattatcaaaatatattctatattacatttaatggaactaatttaatgttataggtgtacctaatttattctacaaaattaatcaaacctaataaatttaacttaaaaaatcaaaatgacttataatataaaacgaatgtagtactagccagctttacttagtaccatttcgatgccgttgactttttcataatattttaccattcgttttatttaaaaaattatgtacatatcatttattttattacaacttattttaccattaaagaaactataatagtaacttatacttttatatatttatattaaatttttaataagatgaatagtcaaactaatacgaaaaattagcgacaacatatattttgaaacgaagaaaatattattttaaaacggagagtagcattgaagtacttgctcgagctaatggttctctgttaattagcctgcgtaatccaatgaaaaaagttattagagtttgtactatgtatttttaaaaggtttcatattatatcattatttaactttttttcatttaacaacatctaatttcacatttttgttttaatttggatcaccccattctatctatctccaaatccggtgactccaccttcgttacacctacaagttcagtaactctacaaccacttcgcgcactaattatctctttcccctctgatggttgaggaaccgccggatctagcaagtaggagcctagatttagcgtctctgctctccaacgggtctgactcctgcctccccgagtctctgcaaacccgacacccttagccttaacgacgaccatgaaaatagtgtacattacgacttgggaggagaagagacataccgatggctagagggtacgacgacgcatgtgaaggagaagaggaacaatggtgtatcatgaggaaagagcggtagtgattgtggttggggcggcagttagtggttattagggtccgaaaagtttactatcgatataatctctaagtgagttttttgtattttttttcttagtaccactgacacgtgggtcacgaatcatcattgttgataaagaatgggctagtttttactatgtgaaaattttgatataaaaggtagagcactcgagtatctcccccttcacttgcataaaagaaaatcccccgtctcgtctcctccgctccttgtgcctgcgcccatcgactccatctggcgactcgcgagagcagagcaggggagggggaggggaagggcgccgtcgtcctggtgagcatccccatcctctgccttctgatttcatctctctctccccccatcgggactagcttctcttctagatctggaagaagctcttctcttaattttcattacactgaacccccatgtctcaagttggatccgcccaaccatgacatcatgtggccatgcatacatacaaacaatctttggacttgagcttatcaagatgtagtataattatggcagctctgttttttatattgtccataagcagtgcctctgatgatgagtgaggctgagctgatttcagcagatttcgatgaccggtgctattagttgttaattgcagcttgtg

SEQ ID NO: 1854 - DNA, 586 bp, Oryza sativa
aatatatagaagctgtaaaggaaatgaaggacaggagataagcaatttttagtgcaataccaggagtgtagaagctcatgtagggtaagacgctagagtagaccccaggctcttcaaccttcttcacccgccttgacttgagctcgatcgtgaataatccaacacctgtgctcatgaatatgacacccacaccctctgcagagccaacaacaaatgcttcatcaccgcgattggcaacaggtaccatttgctccagctcaatcacccagcactgtacccattctgcagccccttctgaactggcattcctcgacctcacataaaggctggatccctgaatgcaggcataacccagtgagccgttctccatctccatgaggaaaatgtcatacacatctcgtatcggcgggtcaatcttagataagcagttcgcggcccagttgtacttgatgattgcattctcattccgaagcgtgaagtagatttcatctccaacaagggcacctcgcctgggctggacataaggtgtacggtatgattcacctctagtaatggcttgcaaacgctcttgccaggtttgataacc

SEQ ID NO: 1855 - DNA, 670 bp, Oryza sativa
catcacatgtatcctcccagtcggcatccatcaagggagaaatatccaagtctcctatgagttttatcatccgatgtcatcggccagacaacttggaataggacaattgccaatcggcctgtactttgccgacaagatccaatgcagaggtgacatctcctcaactttaatgatggatcggctgttgaacatccctggacctccgttgggcagcatcgagaacataaagctggcaaggttcaagagtagggcgtttgacagatggtgcggtgaatggaagctgcatctgttccatcaatcggcttccatgtacatgatagacttattccctgacagtatgctgagtgcactcttcctacactcgttgatccctgttacttgactttgctctcaaagttagcacagaaatcaattcaacttgattgccatcagaagtttatggaaatatacaggtgcaatctacaaaagttttaaagtcttttctacttgcaatattttgcttctgagtttctgattttgcttgttcacatttttcatcattcccacagagaaattcgtagttcaactttggaacggactcttaagcgcttgggagttgaatatgttacaaaagaagaaatgcaccaagttgaggctcagagcatggaagctaaaaacgccgagtggacac

SEQ ID NO: 1856 - DNA, 647 bp, Oryza sativa
taataacttgaataaatttggcttgggataggaacgaagggagtatataattattttttctagttgcacacatacaactattatcttctttttttccgtttacatcacatgcgtactcaagtgcttctcctaatacacgttcagggaaccggagatgaacaacaaatcccaacaaactgaattttattcaaatccacagcgattacaatggtaaaaccaagttacaacacaataattactgtattcgagccagagaaaattgtccgacaaatcaattgcagcacggttacatctctgctagctcttctgccgccgtcagctaagttagcttagctgcggcgcttggtcttgcggtggtggtggtggtggtcgtcgtcgtcgtcgtcgccggcggcggcggcggctttggcgagctcgcactggtcgatccactcgctgtagacgtcgatgggctcggtgagcgcgtgggcggtggtggagtagcgcgcctggcagacgaagcaggaggcctcggcgatcatgtgcttgatgtcgatgctgcactccaccgcgccgccgtggtcgcagaacgggcagctgaacgccgtctccagcttcggcgccgccttcttcgccgtcgccagcatcttcgacacccgagacttcct

SEQ ID NO: 1857 - DNA, 644 bp, Oryza sativa
ctatagctgctatttaaaacattggtaataacccaataaaaataaaccattaaaagaagtgttttttttatacagagctatgacatccttgtcggcgacacgagcatctcatcaggaaggtacaaattcgtggagttctcgcagccgtacaccgagtcaggactggtgatggtggtgccatttagcgcggacacgtgggaccgttcgtggatcttcctccggccattctcgccggcgatgtggctcctgatcgccgccgtcaggctgtacaacggcgttgccatctggctcatggagcgcaggcacaacggcgactaccgcggcggcgtctggaagcaggtgaccatcgtgctctggctctccctcgccgccctcctctcgccgggggagaaggagaggcggctgaggagcagcctctccaaggcgtccatggcggtgtggctgctcgtcgccgtcgtgctggcgaccaactacacggcgagcctgagctcgctgatgacggcgcagcggctggggagggaggcggcggtgacggcggagtcgctcaggtacgtagaaaaatctaattgttgtatttttgatgttttctgatttgttacatcgaccctctcaagggtatatgtataggagtacatagagtatat

SEQ ID NO: 1858 - DNA, 714 bp, Oryza sativa
tgaatttttattatttctaattgtatttttatgtggactctaaactcatctttcaatattctttaatttttagtttcgaatttcagttacttctaaagtgtattcctaagctcttcttcccatgtttttcttaatttcgaattttagttatttgtaaattttatttttatacggactgtaaactctacttttaattttatttaattttattatatttattccaaatttgagttatttttaaattcctatatgaactctataatctacttataatatttcttattttttaattctgaatttctatttttttttcttaattgtatttctatatggactctatactctacctctaatattccttatttttaattccaaatttctattattttctaattgtatttctatatggactatatactttacttctaatattccttatttttaattccaaatttcagttatttcctaatcgtatttttatgtggactctatactctacttctaatattccttatttttaattccgaatttcaggtatttcctaactgtatttttatatggactctatactctacttctaatattccttatttttaattccaaattttagttatttcctaactgtatttctatatggactctagtctcccctctaatattccttattttttaatttcgaatttcagctatttctaaattgtatttctatttgga

SEQ ID NO: 1859 - DNA, 502 bp, Oryza sativa
cgtagtaataataatttaaacccaaaactgtgtaatgataactctgtaataataagtaaaaagggaatcagcggcatgacttaccaggatgccattgctgaagcgcatgaggacggtggagacgagggcgtaggcggcgagctcggtggcgccgatgtgtccgatgaacgcctggctgatgacggtgacgccgaaggaggagaagcgggcgcagatggaaggacccgccaccacccacagcttcttgttctcctccaccactcgccgcctcaccgatccaacctcatcctcctctgcatcatcatcttcctgatgcttgtaggtagccggcttaggctccaacagaggaaccgtcagcttctcatcatcacccggcttctccattttgctaattaattagtggcggcttgtagtttgcagcaatggagatggagtggtggtgcttcagattcagtagcaatggcgctgctggaggaaagggaagcatcaaggatgctcaagt

SEQ ID NO: 1860 - DNA, 563 bp, Oryza sativa
gaatactctcaggctgctgcatatacatatgctgagttcccagaatactttacctggcatggtaatggcaaatattgggctgcacagaaaaattgccgcaagaaaattggaaggatagcacatgtttgtcctgcccaaggagatgtctactaccttagaatgttgctgcacattgtcaaaggagcaaaatcctattctgatctgcggaccattgaaggacatgtatatcctacattccaagctgcatgtcaagccctaggccttcttggtgatgaccgtgaatggtccttcgcaatgactgatgcgactcattgggcacttccctaccaactccgtgagttatttgtaacattgcttcttttctgtgatgttacacacccactgagtttatttgaagagcatctgtcttcaatgggtcaagatgcagcctaccaccttaaccatgccacactaggtataaattcttctgcaccttcagtcatacaatatgtcaagtcctatgttctttccgagatcgatagcatacttagaaatgttggtcgtactttggcatattttcattt

SEQ ID NO: 1861 - DNA, 18305 bp, Oryza sativa
ttgtcgatggcattactgggacttggacgcttgtcaatagcatttcttggattatcttttttctaatagaatttatatgtagctgagttggtaaaggagagaggtgttgggttcgaatcctaaccatgacaaggccggtataaaaaaaatacttaggatgatagtttaatatagtgtggaactaatgctacatatgaagtgttgcaatgtaattttttgccatatctattttgtggcaatatgaaaatttgttatcactaaataaaaatcattacaataacctattaccactatatttattagcaacaatttaaaaatgatagcaacatatatgtattgccacgattttttttcgtggtgacaaatcattttcggtagtgatattcgtttcatattataattcgctttaatttttttcctagtaaaactttgttaggtttgatcaaatttatagaaaaatttagtaacatctaaaacgccaaaataatgatgttaaattctaccaggaaaatagtatgtttgttttgtacgaaaatggtactatatctttttataaacttgtcaaacttaattttttttaaaaaatcaaaacaacttataatataaaatagagggagtaatatacaagcaaaaagaagaaaagaaaattgaatgattgtgtctatgtcattcatgaccaccaggtataggtgctgttattattgcacaaaattcacaaaaactcaatgaccaatccaacgtgtatgtacgtatatttatgtgcaagcactccatcatcatcatccctcgttgtccggccagaatgtatgtgcgtgtatcaatataatgtactcctctgcatcgatcgatcagccgctgtcgttggctagccagtcgaggagcgaccggaatttcttggcgacggcgcccttctgccaccggagccgcttccaccggcttcccaccagcaccgggtgcagcccgaggatgtgctccggcatgaagtcgtgcctcgtcaggatccccaccaccggcgacctctgcaacgatcttattcgaatgagagtttgtaacagtggaacaaaaggttaagtaatttgtaatttggattggagcaggtgtgtgttagtaatttgagtagtggacatcgattcacatacgtcgcaggacttgggcacgacgaggaggtgtcgcaggccgacctcgcggaagaggacgagcgccttggccagcgacatggtctccaccaccgtgtacggcgacgtgttggtgaaggggtgcaggtcgacgtacatctccatctcctccggcgacagctccacgtcggcgatggtgtcctgcttcccggacccgcgcttgtcgaagtcctgcgcctcgaacctcccggccatgtagtccttggggcaccgcaccggcgccgtcaggaactcccgcttcttgagcagtaccagcaggtgcgcgcgcagcacgaggccgtacagcaccggtgccggcgagaagggcggctcgtcgaccaccgggaacgcgtggtgccccgtggtccggagcgtgtgcacgatgtggcccaccttctcgacgccgttgaagctccgcagcggcccggccaccacgtcgccgacggtgagctgccgcatgtacggctcggcgtggccgtcgaggtgcgggaggcccttgagattgaggatgaggtcgtagatgctggagttgaaggagtcggcgacggtcttggagatgagcagcacgagcatgacgagcgggaggaggagcaggttgttggtgagctccaggatgatgacgcacacggacaccgtcatccggagcgtgccgccgaggaaggaggcggagccgaggatggcgacgaggccgtggtcgagtcctgagcggccgccgagcagcatggcgacgaggcggccgtaggtggcgccggtgaggatgatggggacgaacagccccgacggcgcgacgacgccgtagctgagcacgccgagcgcgtaggaggcgacgaaaaaggcgagcatggagcccgggtggtagacgtcgttggtgcccgtggagtagaggttgcggatggcgtcgtcgttgatgttgaggaagaggctggccaagtcgttgtagtgccccgccgggcagtggaaccgccggaatcggttcagcgaatggcacgtcccgttcggcggcgacggcgccccggctgtcgggcacggccggcacggcgccagccacggcaggccgaacacgcagcacgacgtcaggatggacaccaccgccgccagaagcagcttgtgcgcgttgcccctcctgcacatttcaaaaattaatttcattggattggattggatttttcactagaatataatcagttcaacttcaatgtgttccaaatgatgtcataattaattaattgaacgaacaagtaagccatgtgaaattggcaaagatatggaatgatcgtagctagctagccatactcgttgatcacgctgtagacgcgcaggaccttcatcatgaggaagttgtagagggcgcccaagatggcgccgatcacgccgatgaggacgacgatggggatgtccttgaggtggtaggtcatgaggtcatcaaacttggtgctgacgtcgtacatgatcagcccacccttgccgaacagcccgcacttccccgacgcgcacagctcgatgaacatccgcagcaccaccgccaccaccgccgtcgtgaagaacgaccgccagatcagcgcgctccgccaccttgattaattatcagccacaaattatacattcttgtaattaagttgtcagccaaaagcttcagaggatgaacagaaaaagaaaattgcagcagtgcatatcattcatgtgtaatttgatgggtagttttaccatgacgagagtgattcgagagcgaacaggacgccgccgacgggggcgcggaaagccgcggtgacacctgcgccggcgcctatggtgacgagatcacggcggtcgcggtcgttcttgaagtagcgcagccagcggcaggtgaggccgtacttgcgcgacccgccctggccgaagatggcggcgatgcacgcgcccgtgtgtaccattgggccagctttgccgacgtgcagcgaggatgacacggccgcgatgttaccgattatctgcacagttggaaatcagaatagatatggggagttcagcttaaaatgctccagttttgtcagttacacaacgttcgacatgtgtaatcatccctattattatcaccgtatttttactccctcagtttgttattattcatgatgttccatttattttccccatatttgaacgttacgctggttcatatctgtgcctggagttgtacaggacatcattgcctttgcctagactaaccacaaaagcataagaagaatgacctgtttaatttgccattaaaaattttgcacaatcctatgtttgccatatattgtggtaccctgccggtcttgattcaattccaacaatccaatattgccggcacatttcttgcaaactcttggggtacattattattttatttttaggagctgatcaatgtatgctttaggataagtttaccatacttagggcccctttgattcaaagaaaattcataggaattttagaggagttcattcctatataaatttttcctatatagccatttgaattaaaggaatggatcttatgaaatcctatgaaattcctatggaatgactctttccatgcaagtttcggaggaaatttaacataaggtagaacctcatggaaagaatcctttgagtctttatctctcctcaaattcctgtatttttcctatggcccaatcaaatagtcattcctatgtttttcctgtgttttgcaatcctctcttttacacttgcattcctgtcagaatcttatgtttttcctattcctccgtttttttcattcctatgattcaaaggggcccttaagatattaggagataacatatttttctaagtgtaaaacttgatatctccagatactaggtattacacttaacttttatgtaaaattttgatgtctacaagtgctttcttaagaaccataaaatttctcttttttttaacatatggattttgtctaatgacccaataattctttttctaaaaaaaataagagtgaatttcactactttagccaaattatcagaaacctacagatttgacatgatgtttcataatactacatatttaacattaaatttatcacagaactacagatttaaggtggaatatcgcaaaattacacatttagtaacaaagttatcacaaaactacatgttttatatcaatgtaatcacacaatttgggcatttacaactcaaacataaaattagagctaaatatttaaatcccaaaatcaataattgtttgataattttattattaaatttatagtttttggataaatttatcgctaaatctgtagttttatgatacatcagttaaatatgtaattttgcgataatttaacccatgtatctgtagttctatgaaatttactaaaaaaataattgatagataggaatatttcagtcgctcaaatgaacaagttgactcgttttatgaatattggggttttaagaaatctacagaaaaacaaaataagtatcaattattgaggactttgtaggcattccaattcaaacggaagtcgtgctgttacatttcactttcatgagataaagatctagagattctatatcaatcatggatccattttataactctgtcaaccccaatagagagcaaacaggtaaagtaaacggatgagtgatgtatgtagtggatccaaacaataataaaaaggacacccaaggtctcaattattaatgatgcccatgtaaaacaaacagccacacacataaaacaattctttgctgcaagaacatgccctttcatcgtaaaagaattagcactaattttttggcagaaacttgcacgatcacggctattcttttgatcctaatagtactaccactaaggccgtgtttagttctttggccaattttttttaagtatacggacacatatttaaagtattaaatgtagattagtaacaaaaataaattacatatttcgtctataaactgcaagacgaatttattaagcctaattaatctgtcattagcaaatgtttattgtagctccacattatcaaatcatggtgtagttagggtcaaaagattcgtctcgcaatttgtatgcaaactgtgtaattgttttttttcgtccacgtttaatgatctatgcatgtgtccaaacacagaatttttggaagtttgaagggaactgaacacagcctaatatagaacgaattaatgtcccttttgcccgtggataattcaggcacacagttccaaaaaaagaagagaaaaaaaaatcagtcgcacaactggcaattacagtaattgggagtggctcatgtgctaatctgcgctgagctgtagaggaggataggaacgcaccttgacagcgagtgtcctgagcgagaagatgtttggcgcgtccacgccgttgaggtaggccttcacctccgggatccccgacccgccggccgccggcgacacgaacgccgtgatggacgacgcgaacagcagcagggccaggttggttccggcgaacagccagaacgctgtccaatagctgcatccgacatgagtttcagacttcagactcggagtaacagacagaaattgatctttgttccaaaaattcagtcaattttgagggttcagaattctagatcacttgacagatagcattctcagatttgaacaagaattgatctgatcagggacaaaaagagtacgggataataatagacaaagcaggagacaagcatgagtgaatttgtcgtactcagcaaaagcaacattacttttttcttggacaaggcaataggaggcaatgagcagaacctgctggactccatgagggcggacacggcggtgtgcttgaggccggcgacattctcgacggcgaggttgatgacgaagccggcgatgccggtgatgatgccgatggcgaagcagaaggtccacttgagcaccacgtaccgcacctggtcggctttccctctcgacctccagttctgatcgaacaggtcgttctctattatcctgtaacccaaatcaaatccccaaagaaaaggaaaacgaattagcattgtcgcaaaccgacgaaaatattaccaacaggttacagagctgtgtatattactatattagcaaattggaatggtaattgcagcgagtaagataacctccgcaggagtaggtggatgaaaatgcaagtgggggcaagcaagatacaaacatttctgacaagacaataggtggcaggaacatgacatgtccttgagaggacagctgaatcaataaacagagagcaattggatcaccatacgaaacgaggcagcaacattgagatgctatcccaatcaagaagcaaatcatggaacactattggataagaaaaagcatttcatctcgacattgaatcaacaattcaacatgatggagaagcaaggattgggaaagatcagacgatacaggtggtaggatccagagtccctgacaagaacgaacggagagagaaagggaggcagagccacagaggagagggggcgcgtactcgtaatcgaggctctctatggggcaggggttggagccgaccatggcaacctgggaggtgttgttggtggcgctgcggtggagcagggcccggttgagaggcggccggtgctcgtcttcctccatgaggaggtcctcctcccgtggagccgtgcacgccatgagagagcttgccgcagagggagacgaggggagcagagcatctgggtattgcgaagtgtaaatagcggggagcagagacgggtttgagttagttaggcctggtctatagaccaagatgtggaattattggagtgtgtttattatttagtgtggcaaatgtccatatcaatagtagtacatattattttgtcagcaaatatttcttgccaaccacatggcggaaaaaactatttccttaaattgtaccgaccaaatatgtgccttcactgtcggtacgaacttacgatggataaactatattaaagagtctatataccccactaaactttggtaggaaattcatctagcattcttaactttaaaattatacatccaaccccctaaactttgcaatatcatttatattgtcctctaatgccttgttcggttaatccctgcgagggagagattgaaggggatttattccacatgtattgtggtgtagaattattcctcatcaatcccctccaatattctttaatactctctaaaccgaacaagacctaaggtgttttcggatggtggttttgtgaatttaaaagcataaatgagtgattttgaataattaatataatatatttatatatcattaatactcggttctcaatttatactcgatagtgatatcatagtaatattatgtaagtcagaacaaacaaggaggaaaaaaaataaagatttgggtggagattttaacacatatatccaatgtgtatgccacgtagtcaaactcattcaacgtatatacatattagattaaaaaccacattgcaaaaccacattaggagattatatataatggtattataaagttttggtgaggtgggaggggattaaatatccggttttaaagttgaggactttcaatcaaaattagggagtatttggaatttttcctaaactatattatgtcataattataattaaactataaatatataataaaaggaaattttgaaaactaatttctaaaaaaatactaactctatcataaaaatacaataacctactatgagatgtgacaaattctaatattacgagtttggataggtcccatgtccaaatacctaatattaggatgtgttccatctcatactaagtcgctatttttgaaatatgggaagtagagaatatcatgtaagtttatctaatttgactacctttgatcaaaatttataaatttgatttattttaaggaaaagaagctccctagaaataatgaaaaatttagtcatacctcggtgaaagattgggattttagttttactgagtgagtactaaataaacatgggatttaccatcaattatgataggaaaaaacaatgcacgatcaacactgttaatctttttagataaggatgctttgtgttcatgggaggaggaatgcctaaggtaaaccggaataacctgaatgcaccagttgctttgagatttcctgaacgagtagctagtagtgtatagaccgagcccacaggattctagggagagaacaagagcgtgacagggctgggaggggtaggatgacatgatgagttggcaacccgggctggtgtcttttgccttttgggatgcaggggagccgttgttaattatctcatgccaattattgatttgtcgtggtcgtgcgatgcgcctgggccaggagcatctgggagagacaccttcttttcatgaatactccgtaatagcaaagggaggacaaaataaattgctcgtaaggatgtggtatgggttgatcacttgattgcctattgcagttgtaagagcatcatcaatattgattacaaaatatcgattttccttcggagctagagatggtttataataacgatgaaaatgcttattcagactactgaaagcttgtttcattaatataatatatgtgcgatgagtacatgatgagctatagaaatgaagaaattgtaatatgcactttttaaacttcattattcttttatttgccacaccaatcctatatacctatacaattcatccccactaataggaatttcctgcattgttgtgcagccatgtcacctcaaattagcacagccattagatgaaatagcaatggttcagattgcagtccctctcttccctgcctttaaccacatcccaatatagatgggcaagcccaagccactgcctaggcccaattcgcccattccgattatactgcgtcgttatcactcccgacccccaagcgttcacatctgccggtgccgctaaaatcgtgaccgacccgccggctcctgacctcccgcgcgccttccatgcttcccggcttctcgagactgatcgccttcatggtgtttggagagataaaaactaatcgccgccgcaacttcgatttgtctcctacttcatctacctcgctggaaacagcctctccctcccatgaaaccttcacggcttcacccgctcagtcgctcactcaccttcgagtatattcctctccaaaagtatgtttccttctcttcttaaatcttatatatgttcattcaatttattagcatttattttctttccagtcacgctagactgatttttttcatattgtcagtgaagttatcaaatgattaaaaaacagagagatggatttggtttcgcatttctactagcaagattgaaatttatttggtctgtacacattgagtcaattcatggtatttattcggtttatactagccctgttcattgtatataaaccaattttacaatgtttctacacctataatttgttgtctttatgtattcatattgcagttcatcattaatattaattcctattgcagttcgttcctattactactgcctactgaggtcagtccccagaacactcccatccaaagcagcaactgatttggtttctctatatgagttctctatgaagtaaaaatcccaatatattcggtacctcatattcgttcatggtcatcggctttccagatattattattatatgaccatcctacgataccttctttgtaagaggtactaagcaatttcttccataaaaacaccgttagaattttcatgtgtagacagaaaaagatcatgctatgattgtttcagcaattaacttaatttaggtacatatattggttcctggatgtgcacatgctacccttccttgctatatgatgtttctactttacgttcaggtttgtaagctacagttttatgattgatgtaaccttattcttcgcattttgttctgctggaggttttaatgtagtccaaggatgtaatcacatcagctgatgcaatcaaccacaaaacagaaatgccattgatcgccattggcaacaatacatatagtaatttgattatcctggtgttcaaaactttttctcgacaacttttggatctcagattttcctaacctccatccggtaagtttattgatattgtggtcataaatttctatttgtgctacatattgctttctcctttctatccggaatcatccgccagatatcatattttctctttaattagttcgctaaaattgcagttatgtatctatgtggtatttcagtatgaggtaaaactgacccttttaaagcattttatggaattgtactttcttttgttgaactattgcctttgttatacatgttgcgggcacctacattttgtgtcttcttaacaggatgtttcagctgtagacttgctgcattgcaccaactgcacagaccaaggttagtactttagatggcagcttaattagttgcaaggccctagctacaaaattgattacaatttaatctgcttattccacttagacatggtttaagaatataattcactctaaaaaaactatttcctttaattatctaatctatatatgcattacattataccacagcatcaccaatcaattgcacccatgaatggtactttgatgcttcagattattgcataatatttctgtactatattaatcatgcattttcttagatattacacagttcagattatcgaataatattcctgtactatattaatcatgcattttcttagatatttcacaattgaactattgatatatgtttaagtttattataactatatattgcacatgaatccccgcagcaacgcgcggggtactatctagttattattattatgggtgataaattttgcttgcacacgccactacacacatattgcatataccactagagtgtgtctctttaacacacgcttaaaagttactccatctgttttaggttataagacattttgactttggtcaaagttaaactacttcaactttgactaagtttgtagataaatataataatatttataataccaaattagtttcattaaatcaataattgaatatatttttataataaatttgtcttgggttaaaaatattattatttttgtttacaaacttagttaaaattagagcagtttgactttgatcaaagtcaaaacgtcttataacctgaaacgcaggtggtagatgctaaagataaatatttagtcttcatgactgggacacaacatgattttgaaaagttgaaaggctgtttattttgttttatatttaaattgttgattacatattgttgttcccattaatcactagtgtatgtgtcaagttataatgtttctacaaactaaacaaccattatattctagagaaaatccaacaaatatcattgacaaatgtcctattctaagaaacaccatcgacgaatgtcggttctaaaatatgtcattgtacagggctatttgtcccagaaatgctacagttatcagtgttccatccatttatcttcattaacccatgtaaaaatgtgatatggttaacgagtgaaatggatggaaccttaacaaagatggaatttcgaacataagttggctcatacaatggtatttctaaaagttgcattattatttaaaatgggcacttgtcaatgacatttattatattttctctatattctaaggcacataagccgctcataattggaacaaaatactcctatggagcaacatagggtacatgcaaaactttacatactattagtacatgtaccttggcttgtccttttatcactttcttaatttttggcataatccctacaaaggaagcaacaacaagatatagatttttgatttcttgacttcttccttgaatagctttcagctaatagaagcaacatataattttcaaatgctttaatatatactatcaccggatttcataaaaaactgttgacttttgatatagatcatacctttgacttttgaacatatgtttgatcattggttttatcacaaagttatataactattatttattttgttgtgatttggtttatcatcaaaggtatgacttacaattttttatatttatgaagaaaaatgtaataagacaaatagtcaaatatattgccaaaaatcaacaatattatctattaaaaactagagagagaatgaaatacaaagccatgttgaaaaaaattgcatatagttaaataggggaagttataaaaagccacgataattctatccatacatgttaaggataatgtggcatatggttgtgtcattgtcatgctcaagggtagactcgggcctcaggacactgggctggggcacaaggcctatgattgaaggtccattaggatgaagatttttcaaccatataaacacatacatataaacacatacaagtcccaactctcaatgggctggctagggccttaggctaatcctggttccgcccatgatcacattatctctgttttatactattagatgtgttgattttttataaagtcaaaccttttcaaatttgactaatgttgacttcagcaagggggttgggagcccttcccctctagcatgcaaaatggagtggtagattagcacgtgaataattaagtattagctaaaaacataaaaatggattaatatgatttttttaagtaactttcctctagaaaatttttgcaaaaaaaaaaacacattgtttagcagttcggaaagcgtgcgcgttgaaaacaagtgagtagaagttgggaaagtgtagtatagaacactcataagtttatagaaataagtagtaacattttcaagacaaataaatatatttaaaaaatatatccaatgtttgatttaatgaaactaatttagtgttatcgatgttgctaattttaatatatttaatgaaacttaaagaaatttgacttagaaaatttcaagatatcttatatatgaattagagggagtatgatgcatcacatatggcttatactaggagcatctgtaccagtgatcgagtattggagcatgagggcacttgacgtgccaaacagactaaaatccgacgacgatggagcctataggaaaccaataaaaggtggcatctaaagagaatatgatgaggattgctagtttgcgtgtgtgtgtgccgcaaacataagtcacacatgtggtgcgtccctaccgattccgctccttgctactgagtagagaagcgttagctttctgctaattgagaactcatactacgttcaaaacatcaacttgtgccataaactttaatctcaaaaagtcacaaactttcaaatcaaataaaaaactttcaattcaaatctaaaaccttcatatcaaaatcacaaaaaatctcaattaaagtctaaaacgaaaatctcaaataaaacactttcaatttaagtctaaaactttcatatcaaaataataaaaatgtttaatttaaagtctaaaactttcatatcaaaatcacaaaaactttcaatgaaagtctaaaacttttatgtcaaaatcacaaaagtttcaaatgaagacctaaaacttccatctaaaaatcacaaaaattttcaattcaaatctaaaactttcatcttagaaaatacacaatactttcaatacaaaatctaaaacttcaaataaataccaaaatctatcttctcttctagcctcagccatcgcccttccagccccgtagccacgagcacatcgcagggtgcactacctatgctcctcctactctgaaaaggttagcacgatcccgatgcggtacacaatggcaaccgtgagagagacgcggagacaaggagtccccatggcgggagcaacgactgccagcgaggtaggattttcacaatgaatatacaagttaagtagctcttgctggataataaaatgaatgcttatagtatgtagaaaaaaatggtgttttagattatgaaagacaaatagtgctttgaactttaatttccactcaaatggaaacatctaattaattaattagagtatggccctattaattgttggactagatcagttgtagtcacatatataacagtttgagtaccataccaatatgttgacttgatatgatcaacgtaagaattccttagccttgatttgtggtttgttgatatactgatgatattattgtatgatagtactacttattgtgtgtaagctcatggttcactacccacactaatctagtggttagaaaaccgactaatactagctatcggtcaatcggcattaaccgtgtcagtttgtaatatactggccataaacctaagatgatggaattgcatgatatatagctgtctctattgctgttacttgcttcgtcgttataaaataattaaacgtaattctagcatttaaaatttactccaccaaaaaatataattctaacttatagagggtatcatgttttttacttattattttagatatggatacatagtctgtaaagtaaaaaaaaaacccaacccatcccataatacaacaattgtagcataagtataaattgccacagccaatgagccatcgctctcaatttctcattccctgatcaatctccgcaaaataaaataaataaagaatagccatacaataataagattagtgctgctcaattattatccgccctgctgctctgctattaccgaaagctccatcttagagcaagttcaatagtatagctaactactaacttcaattcatctatagctaatctaacagctcattcatataatagttacatactacactattaatatctggtcccacctgtcatacataatatgtgtcttggagtccgtgctatagctggctacaaatttatagcccgttgcccttttctctcctcatttatctctttaaaatatgtttgcagcctctatttaaaatatgtttgcagctggcttatagcgtgctatttccactgacatctgtcgccacgaaaacgtggcccctccggcaaagtgacacgaaccaataaatgctaccatcgcatccttttcctccgtacccatcgcaagcaacgagccaaccggcaatgtagatattcaacgcacatcttcaagcccccaccacatcccaagcacgcgatgcgagatccacccactcccactgatatgtgggcccgcgcgttcaccgacaccccactcctcaccctcacgcaaagttcccacacaacaggggattaaataattgcaaatccgaataataaaagaaatataaaaaaattggaaaaagagaaatagaaaaggaagcgcaccaccgctctcggctcgccttcccttggttcccgcaccttctcctccgcatcgaggcaaatcaatcaatccaatccatcccacacaccgcccatctccctggcgggcagcctcggcctcgcgagggaggggaggaggaggagagtggcggcggcggcggcgcgccatggcgttcctgctcggcgccttcctcgggctggtgctcggcgtcgccgttgtcatggcgttcgcgcgcctcgagaacacccgcgctgagcagcgccgcgagctggtacgtacgtgtcgcgaaatgaaatcctcccaattcatttcctgttcgtgccggggtagcgcattgattcgacccagtccgatacccgccgcgggtgggtgtcggtagtgattgggagctggtactggtggtgaattgcgaatttgcgagaggtgttggttttcggagaggagcgtggagggggaagttgctggcggtgccaaactgtgagcagactggtttggaacgccgtatgccgccgtaattgctaggatttttatcctaatcttcctccttgccaccaactgtgtatgttatgcaatacgtgggccgtgggcatgatggaatcggcagtaatgatcattagagaatttattagatagtgcttaatatggcattataccgagtaatgattgtttgcaagatgtcgttgatcttgcttccgtgtgagttgaggtgattagttttgaccaggccacccgatcatgcgggtcaatttaattactgtgatttgatattgttttagtttggtttatctgagtggagaaaggacatgatgcttaattttggaaaattattgtgtaggccaccccggattttcctaatatcatccgccatgtggcatactcaaacttgcccctttagtttgttttgggttagtttattattgaaacagttcatttgaaagtagtaagattgaaatctcatgagtaaaatgaccactgagtaagtatcacaacttataatagtcaaacacaccatcttcaaaggctgacatgttggttctgtttctcaacttcttactattctagtatttttatagagtagtttctcaatggtagtgtatctcagtgaacctcctcaattgtgctgtacatggataacaatgctgcatattgtgtgtcagtgttcaccaacctagatagttctttaaagctcaatcctcgttggtgccttcatagccatatgttctgttgcaattgcaaaacaatggaataaacctgtaattggtttaattcttatgagttctgaacctctgcaattattcatttctgaagttgctattgctatgatcaacatgcactaatagtatgtacagataaaccaggaaattaaatcatctgaatttttttaatgtatctgtcatagtgagttttgacagtatcttctgatctatttagtgtagtatctgcatgagtatatgatttttctaactgataaggtcataaaatgtgcattattctaatcatatatagttcttggatggtacatccatatggttgtttgtcatttatttgcagataagtgtcatttttggctcatgcacacatattaggtgtacttctattaataaatgtccagttggcattgtggtggattatgatagtctgatttggttcaatggcttctagacattggtgtttgaaaaactgtttctatacattggtgtttggtaaccataatattattgcattttgaaaatttggaacatccaagagagacatgacagctagatcatatatttttgtctaaccttaatttaattcataaaaaagtctataatgaatataagctctaattttcacaaaatcttaaaaacaagcactgcacagaaaaaacaaactaagcataagtccttacattcacagttcgtaaagcccaactgggtgtcaccatggtgagatcacctgtcaactggttagcatggctggcttcatgaggttttgtctgagaattccatccattccacatatttctagtattgtcctatattaccatataattgccttacactaactgcaattaagaacttcaatcatcatccattagagatccaaaataaaatttgcggataatggtcgtacacccaaaatttctttatctcaccccttgcaaaaattacattgccagcactacaagccatagttccatcccatctcatttctgagcgacatgacttggtgacaccacctccccttatctgcaattgttgctgttctctctctttctaatgcatctccactatgtgaaatcattgatgtttcccttcctattcggcttcccacgtctctattcaatatcatgcttgagtttgtcacgtcttcttgaattcctgttggtttatcacgcataatggccatacatgtgtatctgtttgagttttcaccaaatatggcaaagtagcagccgcacgaggccactacgtggaggatccatcagcatttgctggctgtgcctccaactccaagggtgtcaacggatttcatcaacagcgggtataacttgcttagttgtttgcaatcttgaccagttcctctgactagaagctgccacatggcccacatcattgagtgctccatctccatcttcctcaattcaacaaaatacagaaatgatcttacctactataattgttctctgttgcaccaatttgctcagatcaatcattacaataaatttttggcagcattgcatccgttttccactggtttttaaaatattacattgtccttaaaacatcttataagttataagcaattggttttccatgccacggaaattgtcatttgatgtaatactattttaatatcttctttcatttgtcattagatgcattttctatcatgcttctgcta

SEQ ID NO: 1862 - DNA, 23471 bp, Oryza sativa
ctccgtttatctgttttatattatataagtcgttttaactttttttcttctagttaaacctttttaatagtcaaacttctttaagatgtttttctgaacatagaaagttacaaatggcatgattcaattaacctttttttatcccctcatttcattgctctgctaccttcccaatacttctatttttttttctattttttattgtttgtttgactagattgctttgactatcatatgaaagtatctgcatatgcatgggaccttctcatctagaattctcctgacatgtgattggtatacacgcaaatgatccaacggtctatatttattcctactctcatcctaaggccattagtattccagatgacatggctcatcattttttgagacagcttgttgctttcacatatgtagatgggacgagttggtttttatctttctttccaatgttaaatttatgggcgagttggtttaataagacctttttagttgataaaagtaaaaataaagagttatgaagttgtagtatttttttaagaactttcaattttgaactaattcatagcaaagattaagatatgatattttacggatttcctatgctatgcatatttctgtttgttacactattcttattattatgtaagctcacttaacttgagcatcacgtttgtaatgttagatttaattgggtaattgatccatttaaataaattaaatcaaataaattccaaggctcattatgctaggaattcatgtgtattcattctcttatgggatatcaatgggatgaagagttttgagaattaatccatttgattagtgaattggtaacctacatcaattactcctaattaatggttggttgatggatgtgtagtggaggatggttgatggctagttgatgagaattagttactctattgctcttcctattccataactcttactcttcatcttccgttcctcctataaaatgagaatggatttgatctcccgcgtgagagaagagatatactttcatccatttctaaggctgttgctgctacggtaatcccatcccgacgagtgtgtacacacgcgttgggagagtaggcctccgaaactacgcactgctgtgatgtttgcacggacgggagggcgatcaggtttttggggagcgtaaggcgcgactactcactgttcgtcaacgtctacatcgtcttcaccaacatgtcgaacactggagacaacagcaacactggagacaaggagaaggaggttcccgtcaacaccaacggaggaaatatttcctcaaactccagcggagggccatttttagggtataaccttcttacattagaagttttactgttaatgttcatcgcaatgtcaacattacgttattatatgattgttaatgcttattctacgttaagcatgctatgttgattacattcacaactatcactggatcaaatcccattgtaaatatcatgtttattatcttgttattttggattaaaatataccgaattatgaccaaatttccaacatgtaattccaagtcatctatttaaatccaatagttgagtttttttctatatcgatcatcatttcaaaatagggtgaatataaatttcatttttggagtagaagcaaggaagaggtggaatattacaaagagaaagggtaccttataaaaaacaaaaacaagttcttgaaattggaatctattttttttaaaaccacccataagctcccttatatatttagagtgatccctatacttaatgattcacgcagtagatattgactaccgaagcaaaaaccctaccagggacaaaatctttgattagaaaaaaattgttatcaatatggatgatactataaatgagaattttcataatttaactgagccaggccaccaggaccatgttagagaaaaaataacggttatggaatgcacataggataaaatatactctattcgttccaaaatgtagcaatctaggatgagattagacccatcctaatactaatttcatcctagattactacatattagaatggaggtagtaaaggagcttgaattgaattgtgatgatacagaaacccacaattgtacttatcattgagtagtactccctcggttccaaaatagccattgacttttacacggtcttcaacatatagaacttcgaacaccaatcttattcatattactacatctacttttgatatgtatatttcgaaatctgaaaaatttatttttgataggcatatttcaatccaacaacctatcttcgtaatgaatttctcggacttaatgcgtgactctccattctttcacatgagattggctacatgggtatagagaaatgtaaatattaatgaattgcttgtttgcgaggaataactagtagcatgtttaaatggatgataagtagaattacttatctttgatctgtgtgccaagatgaaatatgactatcaaaagtagatggagggagtatattataaagggttaattggatccatgtcattgcaaaaatgccaatttcagataaatttcactattattcacgatatcgtatacatgccactggaatttagggaaattggaactatgccactccgtcacgatatctatcaaaaatcttgttagcctcaactgcacatgggacataacaaacatgttctatcttcttcacctccctcccctctcttctcttttcccaccctctctgaagtctctctttctctggcactcatcatcctccaccaccgtcaccgtcaccgccaccatcgtcgaccaccttcatggctccatggcatcatcctccaccaccgtcgccactaccgttatcaaccacctccacggctggagggctcgggagccattgccgtcaccgtctcaccgaccccaccgttgtcgtcaccgccactatctttgacctcctccatccacggcaggaggctcgggaaccactgttgttgtcgttgttttctttaacctcctatccatagcgcgagagctcgggagccaccatcgtcgacctgctcccatcctcgtcgggagggctcgagagtcactactgtcctccgccatcgtcgctgccgtcttcgacttcctcccatccacgccagagaccttgggagccaccgtcgtcgacgccaccgtctttgacctcctcccatccacgatgggaggcctcgggagccagcaccgtcgctcgtcgacctcctcccatcctcggcgggagggcacaggagcccgctgttgtcatcttcaacctcctcccatctgcattgggggggggggggctcaggatccactgacctcctcccatcgacagcaatttgccgttgcaccggccatgcgcgccgcaccattagcctccctcgttggtgccctcctcaccggcagccacatttgaaaacaagatgagagatgggaaagaaagaagagggaggatgaaggaagaagatggaactgacatgtgggtcctacgtttaggggtattttggtcaatatgatgacaaaaaaagtggtgatgatggcataattttaattttgtgcatattcggatggcacgactacgaatagatgaattacagtgacatttaactaaatcggtatatttgcaatgacatagttccaattaaacctattattaataactagaaaataatcatcatatgaaactactttcaaatacggatataataatatcacacgtatagcactaatcacatatagtgttactttaatttattagttacagattgtaaaagttgattttaggacggagatggaggggagtatatactgatttattttgatcgcaaattacgtcttgccttcagctatgccactgcagctagcccacggtatcggacggatccggtaaggttgccttgcctctcctcagcaccgacctggcggcccatttgttgccattgactagcgttcacccggccctggatccccctctcccatctcccatctcaccacctcggccgccgccgccgccgccgccgccgccatcgccgcagcgatctgtcacaatcaccaccgccaccggcaatgcccaccgcgtcataggtcgaggcgcgccatgcccccgccgaccccgctggcccgcctcctcgcggccatctccgccgccgcctcctcgcccgccgacctccgccgcctctcccaccgcgtcctgtccccctccgcgcctcttccccctctccgctgcctcaacaccctcctcatggccctcgcacgccaccgtatgttcccggacatggagtccctcgcctcccgcatgcccgcccgcaacctccgcacgtacaccaccctcatcaacgcctactgcctcgccggcgacatccccgccgcgaagcagcatctcacctccctcctccacgcgggactcgcgccggactcgtacgcgtacacctctttcgtccttggatattgccgcgcagggatgctgacgcacgcctgccgggtgttcgtgctaatgccgctccggggatgcctgcggacagcgttcacgtacacggcgctgctccatgggctgcttggcgcagggatggttcgtgaggctatggcagtgttcgttgggatgagggcggacagctgtgctccggatacccatgtgtacgcgacgatggtgcacgggctgtgtgaggctggacgaactgaggaggctgaggtgctgcttgaagaggcaatgtctaacggatttgagccaaatattgttgtctacaatgcgctgattgatggctactgcaatgctggagaaatggaacatgcacttaaggtcttcgagggcatggatggcaaccggtgctccccaaatgtgcgaacatacaccgagctgatacatgggttgtgcaaatcagggaaggtggaaagggccatggtgctgttcagtcggatggttgaggcaggtttggagcccaatgtagtgacatacacagctttaattcaggggcagtgcaatgagggtcacctgcaatgtgcttttaggcttcttcatttgatggagactaatgggctggttccaaacgactggactttctcggtgttaattgatgctctctgcaagcgtgagaaggttgaggaggcccagttgtttcttgggtctcttgtcaagaagggagttaaggtgaatgaggttgtttacactagcttgatagatggattgtgcaagacaggaaagattgatgctgctgatgaattgatgcagaaaatgatctcagaggggtttgtgccagatgcccactcatacagttcacttattgatggattatgcaggcaaaagaagttgtcgcaagcaacattgatgttggaagatatgatggagaagggaatacaggcaagtcctgtaacatataccattataattgatgaattagtcagggaggtaggatcagaaggtccaaagaaaatattcgacaagatgatcgcgacaggtatcaatcctgatattgtaacgtacacagtatttgtccgctcctactgtgaagaggggagaatggaagatgctgaatccatgatagttcaaatggttgatcgtggtgttttccctaacctagtcacgtataacactttgattagagggtatgcaaatctaggactagtcagtcaagcattttcaacttttgaagtaatggttggtaaggggtggaaaccaaacgaggactcctacacagttcttctcagacttgtggtaaagaaaagttcctctgataactctgttgatatatggaaaatagcagacatgaaagatctccaggtacttttggaggacatcactgagcgtcagttgccactagccgccgatatttacagttgtttcattagatgtttatgccgagttgacagattggaggaagcaaaacatttttttatggggatgcagaatgctaacttgacccctagcgaggatgtatatacttcgataatagactgctgttgcagattaaaaatactaacagatgctttgacattgcttgattcaatgacgaaaagtggttatttgccacatttagaatcttatagaattataatttcttctctttgtgagggaggaaactttcgcactgctaaggaagtttttggtgatttgttactgaaggaatccaattatgatgagattgtatggaaaattctgatttatggcctattacagaagggcagtgttgctgagttctcaagtctgctctccgtcatgaaggaacatggttaccaacctagtaacacaattaatgccatgattacaggtgaaataacagttacaaatgaagttcaggaaatcgctagataaatttggagaaactaaccaactgttgtgttgatggtctacagcagaaggtatgcatcttgatttcattttccgtccagttttattttggtaaatatgttcaagttatactgcggtaaagtacagtccatctgtaacaatataaaatgtaagaactatatcgttggtgatcaaatagttatttactaatttgagagaaaagtcaacacgaccatttgctttatctaaacaggatttctctgtctcccccccaccccccaaaaaaaataattattctaagttaagtatagcttttttacatgtatctatgttttgttgaaaaataagaactccaattaattggcaaaattggttctgtagcatcgaaagtgtccactttcagttttatagcactgaaaagttcacggttcattttagggcctgtttggtagagctccaactcctaaatttagctccaggagttgggtctagagtgaagttgtggagctgcctaaacccagttccacctctctagttcattttgtgagagagctctacctagctccgctcccatttcaggtggagctgaaactgtttggctgagctccagctctaagagaggtggagctggagctgtgccaaacaggcccttaatagcatcgaaagtttatctccgttactcccactcctttagaactgctgccacttattcctcttgcccttatgttttcttcctcctccacacaccctcttcctaccgttccttttgcacaagaaatcaccatggtacagtggcaggcgggctggagggtgacatggtgaacgatctcggcagcaactgtggtggcagctgacgtgctcgattgtgactggggagtgaactcgagggcagctgcaagaacaatctggagggcagcagcagtggtgtttgatctctgggagagagggatggagccgtggaggcaagatggcctgtagctcgagcacagagcttctgttggcttgagcgtggttgagctgccaagatgttggccttcctcgagcactaagcacctagtgtggaggaaaaacgcggcgcttccgaccatggccgattcgagtgctctagtgagaaaaaaaatcgaattttttaattttgaggggcaatgttcatgaggatgagaggatgccaattgttaaaacaattttgtattggttgaggccttgaggggagatcgagtgagttggaccaggatgtccagatccttctgttcttttctccccatcaaaaatgaaactcagattgttccgcttgttgtgtgggcaggtgtgcaactcaacattgttgcctttctgtgcacagtgaagcaacagatcctcatggactacttccatttgtggcatcagcatcgggctcagtcgagccaggcgcagtaccgtcattcgagcttgagaacacgtggacatgcgagtggtcaagctcatgggcatgctgacggccatcaagctcgagcctcgaggacggtgtccggctagcattcgagcttgagaaaggagagggggctggaggaggaagaaggaggaaaaggcacggctggtatttcacatgttgtttttcgaaagataaaatgaataccaaagaaaattgaacagaactttgtacggaatgctgaatatgagagcaggttaactttcgatgctattaagtgaaacgcgaactttcggtgctataaaactaaaaactggaacttttgatgctgcagaaccaatttttccttaattaatactcgtatctgattagtactaggcttaatagtcatttgtaattatatctttattttttatatttctacctaattagcatccagtcattgtagttcattctacaccctggaaagggcaaaatttgacattcttattcctacaggcgttcagtatgaaatggcaactaactataactggcacttgctcttgcagttggttatgtgtcaatccactgaagcaagcgggctatttgagaagatagggtagctatactttcagtggctccagaaactgctagacttggatatgtgaaattaacatccattacgaatgatctgatcccggagctagcattctagttaaattgctgtgactggccaaataacgatcggtacatactcaattctattgagaactcaacttcatcaaaatttggtggaagagctagagcaattttcagtcagtttgcacacgccaaggtagctgtgatcacagggactaagaaggtatctttgaaattatcatacattctatgttatgttttattcccaaattgttgattgctcatgttacatttgtgatgcacgttttgtccgattatcttattcttatcacccatttcttcttgattaagattagtcacacttaatttaattaagtaggctgatattgtcatgtggggccagcactatatctgttggcaccacagccagttcaaccatggtgcagctgcagaaacaggggtgcactcagcccccttggtatccttatcagattagaatctatctgttaaagagtttcttggttacatttacctttgttgagatattagttaggatatattagaacacacatagagttattttaggagatgttagctatatatgttagggcctctcctatataaaggacttggcacatatacctggacttaatcagatagaaaacagaaaacccaaatacctctcgttctccttggcgcatcacggcgccatggcgataggactctttctcttgacctcccacatcccacgacaacttcctcctcccctctaatccccaaacacatgagccgctgactgatatgacattgtgtatcacctgtgtactaaattgtttatctttctcctttttcttttcctccattatctttatttttcaggatcaatttccaggtcaaaagagatatccatatacattatatatccagaagttgaagtgtaattgcttgtgaaaatggttcgcaggagactggaacatgatgaaattactagattctacttttgttatggtgaagaacatatacatagaatgatggctgagtatgttctgagaaggtcactccaaaaataactggatgtaagttccatttgctgattttgtcttaagtagatcacctcttctttttttttattatttatttcagtttaattgattttacttttttttttcattcagcagatagatgaggtgatcgactccttaaaaatgctacagatgtttttcatggtccatgcactgactaagcttcgtttattttcaaggtaggctgggcagtaccttaaatattagaatggtgattattctatccatactttaattttaggctttagggtgcaataccatgatcaaaatttacaattatcataattcatctctgcgttattatggttgctcattatgttttctattaatactctcctagttttggaacctctgataaaaatcaaaactactccaaagatgaaaatactactatgaaggttgactttctgtgagaactaccgttcatagtgattgtgcatttacccagtccagatggagcgattggtgctgtttaaaatgttggtcaaaacaatccaatgtacatacaaaatggtcagatttctatgaaaatatagttgtcataggcgttgggcagagaggccgaggcccacgaggccaagtcctagcggataaacagtaccacgagtactgtagcagttggttaggacataggataggattagatagagttagtttgagttagtttcttaagggtcaagtcatatcatctctatataagggatggattgtattcatctctagttaagcaatgaatatcaattagtctaatctctccctcccaataatattcttctccctagcctaaatctacatcccttctccaggagccgacgccgcccggctatcttcccggcggtgtttatcccgtcatggccttgggtcatgacaatagtttggtgtctttttaaagaaagatacaatattgcccttaatgaactttcagtgagcagctccaggagtccgaatcaaaggccttgttgatccccagcgccccatacaaagaggactttcctaacagttgtatataagatcagtccaaataataacactgaacaacttagtaataaaaaacttccctagggaattattgatgctgtcatgctgcagaaccatgttgtacactactctgagcataggtttcccttgatatatcgcacatgagagtcagattgacaaaccaagtcattccctggtcttgtaatctctcaaaattcttttttgcgcaatagtgcatcactgtgtcatacatttttctgatagcacctactccctccatcccaaaaagcattaacctaggaggggatgtgacccctcctaggttgattctttttgggacagagggagtagataggtaaataggtgcagatccttcataaaaaggtgaaatctacaggagagcaattgattgcatcataattgaccaatccagtggttgattgagatactttcattaacttagataattattttttattttgtttgatgcctgttttggtttattttagcttgttcatcaaattgaccaatgcttgctctcatccattatgccacttgtatgacagacatgttggtgagttgtcttgtcagtgaaacaagagatttgcaaatatgcagtggcaacataaggcatttatccgatggggttgagatggaccctatcaggatttgtcaacagaaatttcttcctagttcacctagcaaaggctaacagggttactaatcccaggagttatggcattttgtgttcttttggatcctcattgcatttgtatgtaggttgaaaattttataatttttttttctaagaagagaggtaaaattcaacgtaatgcaaaaggagtaatgtctcttggtctgggtctgagtattatgtctaaatctggggttgaaatgtggcttgggcactgacacactgaaatgcaaaaggagatgagaactgagaagttctcccattcaagctgctggttcagctgactccggcacatgccatggtcatggagcccaatcatatcagaaacactgagtcttaataggtgttcagaacaaatgtccgtgtgtcatgattttttcacaattaggtcactgtcattgtgacaatggtagaagtaaatttagtgaaggtgcaagtgagacgattgtgactaatattgtgatgaaaacatgttctatctatgttactatgtgagtggtggtttacatctgtatctccatgggcaataccacgttggattttgtaccttggatggtacatttaacaattttaggggtattaactttgcattttccaagttaatggacctagattacacccatgcacaaggaccgctagtgtatttttactctagttatgattgagcctgtaaagaattcaatttcagtacattttggtgctcaaaagatattattatattaaatacattatgaattcctgatattgtataatggataaatagacggtatgattttaagtcaccccatgccccactgaaagatagctagagccgaaggtggcagaacttcatttgcatgaactgctctgttgtatcagtggcttagtgctgatcctactttgctgagttcggtaggacttgttgggaacaaatctcctccgcacagaaaacggagcagtccattagcgcgtgattaattaagtattaacttttttttttcaaaaatagatcaatatgattattttaagcaacttttgtatagaaacattttgcaaaaaacacgccatttaacagtttgaaaaaacgtgcatgcggaacatgagggaggggagttggaaaaacatactgccgaacacagccagtatatggcagtcctaggagcaactgtttgtttggtatatgctaaatcatagagttgtattaattgattactaggagaagaggatccaaaataggcaaagtactgtcagacattttcacttgtctttcacaactaccttgtccagggaattatgtgtttcacttttaataaatataattttccaaaatggcatcagaatttagtaccaccaataccatcttttcgttcattggaaagcctcatactagtacttgttagtctgtatttattcttttttgtttatgaccactgtaggggttatatgagcatgttttatctttcgcttgtgcagagtttcaagatatgtcatgaaaggcagcatgatggaatattggcccccattttgcagaacttgggcgaggttcttggaaagttctgaacctttgcctatatgaactctggggaagttagtattaagctctatatagtaaatgatattcacagcattcaacttgtgttaatagtttgcaggcgtggaatattctttttgaccggaacatggactaattatttgacaattgtatatagagattcaatcaatacattcttgacagaaataaatgcagatagtggatcataccagtttgaataacctagtcgatttgaaaatgcatgatacaataatattttgcatgtcataccgtcaggaatgctatgagaaatccacttcctgcaaaattcttatgaaattgggagaatagctattatggtccctgaagttttgctccgagaatattttagtccccgacctttcaaattgtccaagcaagccaaactttatcatgtggacatatacagtccttggctcttcaaaaattgccatgtgggcatgccatgtcatctttcgatgcaaatatatgatgaaatgcccaattttcccttaaacatatcatatggaaaaacagagaaaaaaaaggagaaaatacaaaaaaaaaaggtgatcttgcatattaaatatccgttagagttttaacattgtaatgcaactacgtacatggaatttagttggcatggtaattatatatttagtggttgtagctaacttaactttgtagtagtataatccagtgaaaaaagttagccacatatccatagtcacattgaacaaagtttttaaattcttttcattatttttgtatggtatatggaagggtaaattggacatttcaccatatattttgcatgagaggatattcacgtggcaatttaagtgggcccaaggactatattagcccacgtgacaaattataaggctcgtttggacaatataaaagattagggaccaaattgatctcggagcaaaacttcaaggagtatatgcacgaccctaaactccatatatcagtattcgtcgccacctttagggtttaggttttgcttagattaatatgtcaagaatagtttcgccgatccttcggtttgtaagtccccaacttgtgagcttaatcattcatctgcaactttggttgcattctttatcgctcttgtttgtgttcttcgatttgcaagcagggattaaccttttcggcgaggtcagccaggtttcgacacagttgataaccagaggagacgtggtgttgcgattgcggggctcaatagcgtgtttgttcagaagccagatcgacttgtgttgcgacttcaccaaatcaactgtttatcagaacctttcagaagatcagaaacccttgtcgacatcatccacatcctcgagctagcccggatagcggcctcaatgaaccacaccccaccaccaccaccaccgcaatccaccaacagctcgccggaatccatggagactgcaagcctcccggccgtcttcgccacgcgttgcgcctccagcatgctctcggtgtgttcctaacttagggccatcaccacggcttcgccaccctgtcctagaactcggggaggaggccgtcgatgaacgtagacttgaggaacaagtcagggacgtccgcgcagctgccgccagggaactgtcgaggacgtccgtgtcgcatgcagcctccattgcgccgccccgtcgctagctacctgggaaagctccgcccgcctccgtcgccggctgcctgagcgcgcgcgcaagaaaaagaagtagtggactggggaggtgttgggctgagggagatggatgacagctaggcctagggaggtttttaaatttttttctgactgaactgccatgttgggagtattagtccggtataaatagttgcgggtgtaaaatatctggtatatgaatttaaaggggtaattctgttgaccgtgatagtttaaggggtaattcgtattttttcttttttttaagcattattaagaacaaacccgcgggtatactagcttcttgcgttataaattcgtatctccttcggttttctttcattaacaccatcaaaatcaaatgtggcatcacacgtggggcccaaattaaaatgggaagacaaaataagttcaactaaaaccacataacctcgagtccgtgcaactactatatttgcgattaggggtgaaaacggtacggaaacggacggaaacaacctttatcgttttcgtttccatatttttttcgtaatcggaaaccccggaaacgaaaacggaagaatgttatcgaaaccaaaaatggagcgaaaacgaaccggcgcagatacggtaaagaaaatttatcggaatacaaaaacccctcaaactgagcttcaaacttttgtcaagatcaattctcaagccttaggagtcaacaattcatcataaaacacaattatatgaagtctaattgttaagtctcaacagcaaaatatattcttctataacttgataacttcatataatttgcataacaaatattctaaaaaaatttcagcagaacaccatggtataaggtataaagtatacactgttagcccgtagcccgcagcctctctctccctccatgggccggcttccccttcccctcctccctcttcgggccgccggctcagcccttttgctcctccctcgccgagaagtctattttgcctcctcctgaattcaaatattttttagggtagtaaatgatttcaaatgaaaaaattatcaataacaaagttgtataacttatcaagatcaacaacttttgttttggtcattttgctatatgactttgtttcaataatttgaatttgaatttcaaattatgacaacttcagacaatattttcaagtactaaatgatttcaactgaaaaagttatcaacaataaagatgtataactcatcaatatctataacttttattttgtttatttcttcatccgacaaagtgatagtaacattgttcacaaaatttacatatatctcctatagtttataaactatataagagaatatacattttgtaaacaatcttataaatcactttatcggatgaagaaatgacccaaataaaagttatggatcttgatgagttataccactttgttattgatgactttttcagttgaaatcatttagtacttgaaaatgttgtttgaagttatcataatttgaaattcaaattcaaattgttcaaacaaagtcatatagaaaaatgaccaatactaaagttatatatcttgatgagttatataactttgttgttgacaactttcccatttgaaatcatttactacccgaaaaattatttgaatttcttatattttaaaattcaaattttatatagtccaatcaaactcggatggagaaatgaccaaaagaaaattggtagatcttaacgagttctacaactttatttttgacaactttttcacacaagtttatttaatatcataaaattcgattcaaagttttaatattttgaaattaattgtttttccctcctcctcccttcaaattttttcatctcctcttctctctccctatcctgatatttttacctctactcactctctctctttctatcatctcccctcactctctttctttccttaactctctttctctcctctccattcctcctaggacggcggtgacgggagctggcggcggtggcagcggcacggctcggctgccttgggctccggcctggagctggcggtggtaggggcggctcggcctggagctagcggcagcgggggcggcgacctcggtcaaagagtgggcggcgacctcgggcggcggcaccgccatctcctcctcaccgccgccgccgacgaggaggaggaggcgacgggccagatccggcggcgacggttctcgtcccgcccggatccagcggcggcgggcctcgtcctgcccgaatccgacgggtctcgtcgggcggcggcgccaccaccatctcctcctcacctccgccgtcgatgacaacgaggaggtggggggcaggtggcggcaagagcggccggcgagctcgggcgacggctagggtttctttttttgaattctttttggaattttatttttttttcacgatttagtgtgtggccgtcatcgacggtgtggccagtggctggcgtcgtccgtgttgtctgtggtggcggcggcggcgaagatgtaacatcccaggttttagctatagttttagtcacgctaatgacttgatcacactggctgagagtggtgttgattgggccacgatgctggctaggacatataaatatgttgattgttgttctattatggatcttaaatgatttttcgatcgtttccttgtcatttatttatcaagtcatatccatatgcattattgatttatttttagttagagtaaacctggtgaggagtgggataatttagttttgggttaaactatagcgtggattagtcatcacaaagcaaggtacacgtgcacagtagaaatcacaactgaaactatagtaaattattcacaaactatctggttatcggttgcatgcatgcgatacatacatacataatatatatatccatgcatacacatatccattatagatattgtacatatgcatcttatacattgtatttatatacaacattaatgtataaactcacacgccatgcatacaagttaaaatacaaaattaaatgtattagaaaatgtttgtgtgatttatgatcgcaaatttaaatttaggaggtttgcattctagaaagtcgaaatagtaacaataaacgaatatttttgagttgctacaatttataattttgcatccaactatttagggacacaaaaatctacaaactgagccatctcaagccaacttccaaaattatccatttttgcatacaactccctgagttctagggcaattattaatcagtcccttaactctggagtaacctccaaaattccaaaagcttatggactggaatgcaaaattactaagtatcccaatttcaccagatttccattaaattgtaaattagtgagcctctcaaaattattccaccgaacatgccctggtgaggtttcaaagctagcagcagccatgtggtccaagcaggtgaatcaccagcaccaaatgcactgagataaagcataacaatgtgaattatccacagtctggtagagccagccttggttgcaacgatagacacctagctacagctagcaactcccagtagtacagcagccatagtagtagtaagatcccagcaacagcaagcagcctcggctggaaatcagtggagattgggagaaagagaaataatcacagctagtagatcagtagttcaacatctcaaccatgcttcaccacagccgtagcagccttgtgtgtgcagccaggagaggctagagtgagtgaatgagaggtcagaggagtagtaggagaagcaagaaggagcagcaatcaagcaagaggatcaacaccaggaaaagcaagggaagtagcagatccagatatcaatcaagattttcacatatcttaccatgtaaaccaaagcagcaagaagatgctgaagtgagacagcagagagaccaacctgaagaaggagcaagtggtgttctagcagagttaccattgatccagaagagcagcagtagaagagaagacttgggtttctgaaggaggggctgaaccacacatttttcaatcactgtagaatcatcagaggtaaccaaaaattaaaataggggaggagagtagatcctgcatacatagtatcagcatttgttagaactagagtttcatgcagatatataccatccatcctgaccaaaaaccttagtaattctaaatggttaaaagtaacaaaatttggggataaagttaaagataagtgcatgtttttaaatcctgacatatataaattatcatagaagaaatctgaatagtaacaataaatgcctgtagatataattcttgaataaaatcaactggtgttcatgacataaattatttaggaatagagcatatatagaagaaccaaatcatgcatgtgaacttataagctttcagatcctagtcatgtaaacagggcataacattgacatgtgcatatacagatatagaagatgagtagtgtgttccagtaaaaagaatcaaattgggatgacaagattaatgagtagaaaaccatagatttctacagtagatagtctatagcaactgtttagatttagaacatagcatctggataagttgcatatatctaattagttagaccaatagtttaattactgtcctcatcaaccattgtaataaagtaaattataaattgggttattaactactacagcatatggagatgataaacagaacacaagaggcagtagcagtagatcatatagaggacaaaattgccatctatttgtattcatgataatgttcataggtgataatttaattagttatagtacagattttctcatgatattccaagtgtagaatcatgtaattttcagcatcattcaacaaagtttattctaggatctaattctgttactatgtcacaaatttctggaattgagttatttcatcatgcaagtatatatataaggacagaattatgctaatgtgctttctatttcagtaataaaattcataggtttattcatgtgagcattcatacatcatgggcatacaggcatcatccaatctagcaaatccaatgacctagaaccctagagtcagtaatgacaatccatatcatagagttatcgagttgaccattaggattaatttacaagcatctttagtacacccacaatcatatatcagtagtacaaaagggaataacaccttaccaatataaacactagaaattagagggggagaggaagaagtagagacccgagagcacactcatggggatagaacagggccgccggagttgcgcagtgcttggcaccggccatctccacggcagcagcggctattggagaggcgagggatagttagggtttgaacagggaaagagaggaaggaaggaagggggggagaggaggaagcggcggcgatgcgccctgggagcgcagcgctcgtgcgccagggagagaagagagcgagaaagagaaaggggaaaacgggaggaaggaagagaacgagaaaaagagagaagaggaagaagatgggttaggtgggttgtgttgttgtgggctttagtagttgggctaatagaatttagaggtagagttagaaaataaagaaaattagtatatgacatttaaactctttaaattcaaatttaggtcttgcatattctaatgtattattgcagctactattttaattcactccatatgatttttaaattaaattaaagtgtgtcttttttgaagtagatatatgtacaaccaaatctttcatattagaaatctaaataaaagtattccttgaaatatatcttataaactatttttctaagaaaacaaatatatttatttctatgaaagcaatatatatcttggggttgttgaataaaatctgtacagtgaatcaaatttcttctaaataaaataattactctttcttaaaataaaagtttaacaaaagcaagtccataacctatatagatcatgtatgtgcattcgggttagacatatcatgtgcatctcattcatacaaacattctcgtatttagttgtgttttattgtttctttcagttggatgtttatctcggatttcttggagttctacattggtttattcgttcttcgatttcgggtatcttaggcaagtccaacatctttgatcatctcttgttatatttttgtgattgcaatctatatgtatcacattgcattaaattatactttctatgattaaaataaatatgctgatggattggattgactggtggagcagtcggtcatactatagatgtattctgaacttgccatgtggtgggggttcagttgcatatatttatcatcatcataaggttaaacaacaactattatatggcatttaagcgccgtagcgatcgtgtcgaccatatgacctagaatgggacaggctggcttagtagttctttcttaatggctttatcctgtggcttaaggacttccacgaatcccgtgagcgtgggctagcgatgagggttgccgttgttgcagaatccgattagatgatgtggatcgccgttgttgcgggatccgatgattcgccgttgttgcgggaatcacctgcaaagataattgccagatgggattgatgaaaagcttgtgaccttagccttgccggcatacaccatgaagtgtgcttaggcgctggcgtggtggcggtgtagcgcgggcgttaaaaggtttaaggcgtctatgggacagcgacacacctctgcagagtgtatgaattgtgatacgtcactacctgtttcaggtagaaactgcgaacgcggcaggaaaggaacctatcggaggttctaatacctatggtgccttatatgcagtagattttatagttacttaatatgagattttactacactgttttatgaacatgcataaaactaaactccttgttggattatgggatttggagatatatatgtattatgcaggtggattatgggcatatatttgttggattgctatagatggacttgttgagtaccattcgtacttatcccctatatattatttcttgtagtgttgagctaacaattaggtgaagagaagattctacaaaattgatcaagtgttgcatatctctacatcaatttactgttgaaggtgatgaagatctataagagcaaggtactgttagtattagtattttgataaaaagctaatttcttatggttttttatttattaggtttcgctacaattgtttctactatgctactttggtgtgctcagttcttggtaagttggttcttactaaggaatgagccatagaccggtattctacctcggaagtggaatacgagggtcgctacagaaaatggtgggggcgaggacggagcgagagaggaatggcggcgagacgacgggggcgaggtcgcgaggagccgactagccgaggacggcggccaggcggccagcggtggcgcgctcgacccctggatgcgccgctccgccaccgcctctcaatctctggatgcgccgcctctctcgatctctctctcctctctagggttagccaattcgggacttagggacttgggttgggctgggaacttggggaggaattatggactatttggatgggcctttttaacttcggaaattccgacaaactttccggaatttttccgaccgattctgagttccgacggaaactgttattatcatattcgattccgtttccgaaaaaatatttccgttttcgattccgtttccgagaaattccgaaaaaattccgaccggctgattccgtttccaaaaacaggttcggaatccggaaaaattccgaaccgttttcacccctatttgcgatgaagtgaaaaagaactaaaatcacttcatagcatcacttattagtgtcgttaattcatgagccaatatgtccgtctttggaatctgatccaacaggttggcccactttccggccagtaggactccatcgtctagaagctaatagcaaatggcatctattctactagttcggcatacagaccgcaatttcatggagcagctagtactattacaaccaaaccgtatggaaatgttgggccccacctaaatgcaaattcctctcgtggcttatcattcagaatagggtttggacagcggacagactgcagaaaagaggttgggctaatcagcatgtatgcccactctgtcgtactgtatcggagtcagcacttcgcctactcgcaagctgcaggctctccaaaagaatttgggctgaagcacaaaggtggactggtatagacctccgcctacaagaatgggggaatgcgcaatggttgaagactggtggtacaaaatttcacgcatggtgaactgcccaaggaaggcccttaaatcgataatcatcctggtagcgtgggaactctggtgtgagtgcaatgccagaattttcagacaagtggcatctacacctgccaccattatcgcaaaaatcaaagaggaggcgcgggcttggatcgtagcgggagcgactaagctaaccgagattattccagtgggagagtaggtctttaccttttgctttgggctcgagttcctcgggctttgtaaataacttttttaggtttgttctcctgctctatcaatatataagaggtaaagcttttgccctttcttcaaaatctttggccaacttcagtaggctctgtgttgaagagtgtgtcatggtaatggtaaagttatgggagcataattcttcactaggctttaaattaactgaaagagcccaacctatgccattgagttggtattgggtcaacaatattgctcatttctataatatgactagtttctgcaatataatattgagtcggatatttttcaaaactacccaagactccaagatattttatgtattcaagatttctttcatgtaatttacttttcttacttttaagaaataatatttttgtgtggcatatcagagagaaaaccatctacacaaaagataataagacaatagtaaaaatattttgtgcagcaactagtattggaaaaatgattcacataaaaatgacaacacaaaagtattgtatttaagacatacataaactctatgttgtataaggaggcttaaacactacaccagatcctcacatctctgacgggatacctgtgacgggcaatcaaaatggtcactgatgaccgttacctctgacgggtcatacgggatgccgtcatcggtgaggcatccggctgcgacccgtcagaggtaacgagc

SEQ ID NO: 1863 - DNA, 4546 bp, Oryza sativa
cctgcagccccctcaaacggcttttaagtcccagcccgtttgagatgacttctgccactgtatatatatgtctcctctcccagcgaggcccacatgaggagataaggccggccggctccctcttctccacttctcatctatctcttccacttattctctctatctctcctctctttctctgtgccatggcgaggggaggcgcggcggcgccgggccggctagggcggcggcggcccggccgccagatccggcagggatccggcaggggcgggtggggaggtgcggcggcgccgagccggcgggggcggcggcggcggcccggccgccagattcggtaggggccggaggggaggcgtggcggcgccaagccggtgggggtggcagcggcggcccggccgctagatccggcaggggcgggtggggaggcgcggcggcggtccggccgccagatccggcagagacgaggggaggcgcggtggcggacaacggatctggagccgtggcgcggtggcggccgacggcgggaggggaggcggccgaggcccgacggcagcagcggtctccacctccgccgcctctgccggggacgcctccagccgcgcctccgcctccgccctctgccagcaagtcctctttcacccatgtattttatcttgtgttgttcatattgttccaattgttgctactgtgattgatgattctgagtcctatggtgattgagattcttatgattttgttttgtgattgggacaactgtgatggaacaaagaagaattgtgacgatttttttgatttgtgaatgccaaatgcaatcggtcgaaatgaatgtgatggtaacctaggaggacggtgtttctcttttttttcccctttttttcacaccagtgacggccccaattagttgggccatttgaggtgactctaacctgtgacgggttttggttgggaccagacagaggtaactctcacctgtgacgggttttagttggggccgtttgaggtggctcttacttctgacgggtcttcacccgtcaaaggtgactcaagtcatcagtgaccactaatctctgaccgggagctgaacccgtcaaagttgagggtttgagcccgtcagtgctgacctgatccagtgtagtgaaaaatcatgatgttttgaaacttctaataggataaatcgaaggtcttttttttgcattcttgaaaagttgtccacccggcttgtaaaagaattgataaactctatgccaaatcattgaatctatgcatacaaatagttctatacacaaagatgcactctcaataatagagaatttagtaaaggtcatgtatttatcattgtcctacgtttttttagtgtgtcctcattggtgcgtgagtgttacttgcgtgtaacatggtgtgcacgagttttccacttattttagatcaaattggcgcactttcactttttaacataagtcactaggactaccataatatattggaacatagatgcgtcatgcacattttaacatacgtgagttagcaacaacgatggtttattcaacaactcatgtatctttgaatatatacttgtcttaaaaaatattaaaccaagacactgtttgatttataaagccctttttaatttgtagagaaaacatagaaaatttaggattttaatcttatagaaagccatacaaaggcattaggaaaaaatattaaatcctatctatttcttagaaattcttatgaaatggacaatcttgtactctaacagaaaagttagcaaaagcttcgatcatcgtataaaatttcttgagcctatttttttcattgtttcttccgcgtttctcatgtggtttattcaaactaccgttcctttagttttctttgtttcgtgaatcttcagtttgtacttgtgctcgtatcaaaatcttgtattctttttctatttgtttttttttttttaatcctgtgttgccttaaaccccatttgggctgcaaagctttgttggttactttgaaatataaacatgtccttataaacttaattatcgtgaaattcattagttgtttgttcccatcggaggtcgatacagcgaaaaagaagggggagggctaatgggcgggtgatcgtccacagcaatcgcccccgtccctccctctaacacgcacgttactttctttccctactgcaccgtaaatttcccaaaaaaaactagttacaaaaaaataaaaaaaatagaaaaatctaatacccttaaaaatatattcatgtgcataaactttacacttataaatatataccgtaaacttcgtacgtataaacttttatgtatagaaatattctatatagaaaatatttaaatccaaatttaaatttgaatcgggtatataaacttttaacctataaattttaggtgcgtaaactttagatgcataaactttaggtacatcttatcttaactaattaaaagattcatattttccgatcgtcacctcgtccgtgcactttttcgtccgtcccccacccccaaaaaaaaaatcccagaacacaaatacgagtctgcatcaaatttggatccaaatcctagagaaaacacaactataagaacacaagaacaagaacaacattaacacaagaacacaagaagaaaaggggagggtgtgccaccgtcgcagggacgcatgaacgctggcccgccggcggcttccctcccactggatcctgtggaggggaggacgccgccgccgggccgccactgcctcccctccccttccgccatatccgggatgccggaactggcacaccgggttgccgccgcctcctctcctgctggatccgacggaggggagggcaccgccgccgccgtgacaccgggctgccaccgcctcccctcccctcctgttggatccgggacgtcgggtcgctgccgcctcccctcccactggatcagtggaggggagggcgccgcccgtgcccgccgcctcccctcccgccgtaagggagggcgccacccaccaccgtcaagcacctgcggggtcactggtagagggagggagagcggagaaggagagaatgagagaaggcgcgctggcggaggagatagactgagagaaagagagaaaggataagagcgagcggaagaaacgaggcatgtggtgggtggaagaaacgaggcgcgcgggtcccaccgctttctcgacggacgcagatgtaaaaatcacagtgtgactttcaggccatatccaccgtccgtctcatctgacggaggatatttcccgcatgtggttcctgccttcctggcctcattattatttgcttgctgattctaatcgaggattaatgaatctaattaaacaataactagtaatcatgcacgtgcaatgcacgttttccatgtcacatctaacatcaacgttacattttatggtctccatacatatgcaggatattcattttcatttagtgatgaaataaagttatccagcttcattttatttccattctaagtcgaaatgaaaaagaaaaatacaacatattattgcattcaactaataatacaactaacagtaaataaatcactaaaacaaagaagaaattaaacctcattttatttccatacaaaatgaagattaaaaagatattcactcattacaaccaaaacacaagtgcacatggaattctaatgcggcgatgaaattaaaaaaaaaaacaccctctaaggcatattacttttttcagcgaaaccaaggacaaatcaattcattctgtgtagagagacaaaaaaaaattgtatggatacatgcaaccaataagtaataagatggttgcccaggttctaggacatttaagtcttagatgtatgaagaatacaaatattcccatcctatttgaaaaaaaaaaatcagaaaacgaaatatggatggagggagtacgaccttacaaccgagtgaaatttgaatgagactaatgagtttcgaaactaatgagaatataaaattataaatcaatgattatttcatatgactccaaacaaaagttcatcaagatcactttaaattgatcaaatgctttgaattctttagtttgaactgaatgcttcttgaacttgaacgccaattcatataaatgggacccatgtcaaacatcaatttgaaaaatccataattaaggaacttacttagatatctacaaatgcttcttgaacttgaacgccaattcatataaatgggacccatgtcaaacatcaatttgaaaaatccataattaaggaacttacttagatatctacaaatattataacttacaaaggttgaaaatagttaggaacaggaaaaattgaaatatatagcaaccacatgcttcagacctatttagcaaaacaatatgctctagcatattccactttgaatgtcctgcttcacttgggctgcagagaagtgaaaaaagtatattaaaaactattaaaaggtggtttgaccataattaaacaaatcaaaaggctaaggcatggatcaacattaatccgttcatttgagtttagcttcagtggtgttttcc

SEQ ID NO: 1864 - DNA, 7316 bp, Oryza sativa
ttccccaccgcagcaaccgccttattccgccttgccccgctgctagcactcgcctccctccgcgcccactacatgccgtggacgatgccgccgccgatgaggatggacgatgccggcgacggacggacgccggcgcggcggtggcggactgacaacagcgctacggatggaagagactgagtggcacggaacgaaaaaaattcgtactccgatggcgtattctgaaagtagcatgaatggatggcatattctgaaaattctcgttgggcctggagagaggacaaaggtttgggaaagaggaggaaaacgaggaggggtgagcatgacatggggcccaccattttaaatttagttatttggtgtaactgacatgtgagaccatgatttttattattttccaaatcaaattgccacgtaagcgctacgtcatatgacgatcaagtcaaattagtcagatagacgtgcacgtcagcgaaaactgttgtccaaaccaccatgggacccaccggttttgtcaattgagggacccgttgtatctagttttctagttgaaggatgataatcggattcattgacaagttaagggacctcagatgaacttattctgctagagagagataggggacggaaaacggacttttctggaattggcccaagaagaagaggatttaaattattcattgaaatgatattttaatttttaaaaatacttccattgcacaaataattctaaaaaatacttggatactcaatgtattcaataaaaatttatctagctcgatttgatgttcaaatttttcatagtttttattcagacacttactttaattattaaataatttctaaaattactttttcacaacaatttataatttagcaatttttagggtgtgacaagaagaatggggaagatgtaataaaatagcggaaaaatttaaaaagtaatgccatgtcgtcgagaccggtggcaacgagaatgaaaacatgggagagtgtcatttgagcatatgcaagttgggaaggtcgccgctagagacgtcattgtcatggtctcggccatgtgctcacgcacacattgcgtcaccaagaggaaggggatgatgacgagccgctcctcgatctacttcgttgtcgactccgcgagagaggaactgtggtgcggatgacagaggtcatggaggtcaccagagctgcacgctagaaggtcaagcccccgatggaaccaaccgcacgtgcgatgtccaccactgccaagatctggaagagggagctcaaggctaatatcggagcatcgatatcgtgttagagcgtctcatgtgaagcttgtcactggtcattgccacttcacctgcatgtgggccctttagctctcatcgttgctaccgagctcgagctcaacgaggtggctatctagagcttgagctggcgatacagagaagccactcgccattgtttcctttctctcgtcaatgatgcacacgcaagagctcatggtggcggccatggcaacctcgacaaatggcagctatcttggaagaagataaaaaggaaaaaaagagaaggaaaaaaaagtgggaaacgagagaagaagcaaaaggagaaaaataaagaagaaagaagaaagaaaaaaaataggtatctggtggccaaatatggtagtcaggaccgtagagttaatgatgatatcaaatcagcgcaacttaaagattctacaggatggtgataatttggtataagtgcttgtacaatagtctttattagtggtctttctattgccatgcaagtaaaattaatgacatagaagaaatagaaatatggttgttagagcaagtataataatgagctataggtgtactataagcttatgtgaactgtgaaggagagaggtagcaaaaaaattaagagtgttggctctcatgcaagagctaacttaatacaatctacaatacaaatacattcattgtataagttagagatagagagcggagaagaaaattgtagccaaccttatagctaatctattatatatattgactttaagatgggctaataataggaagtaagctatactattatccttgctcttatgcatgacaatggtttagagtcgactcttagcatttattagcacaaattttattgcatggtggcgaaagaaaggaaagaagagtaagaaaaaatattttgatacattaatgattagagatcatattgtcttcaactgttgtagaatactggtctctaaataacgtaaagctcatacctgactctacctctgtacatgccctaaaataaagtttaacaagttttgtcatccaaatttggattttaagaatataggaactttaataatagaagcgattaagtttagtgagtggttgtctgtatagtttactgtaaaaaagtttatacttgtgtttttgacaagctaagggtgcgttctaataggcgggatggtttagccgacatagctgcacgtaaatgagaaatgtgattagtatttgattaattagataatattttataaaaaagttaataaataaatttattagatttttttaagcaatttatatatataaagttttttcacaaaacatatcgtttagtagtttaaaaacatgctgacgaaaaacgaggattagctaagcggctttagctggaaaggacgcacccactaatactggaaaatattgaaaagctagtaaaaaataattactaaattaagtttgaaaatgtaaaataaaacacaaatattttcaagggaggagaaaccgtatcgtacaggaaaaaaagaacgttcatcacattttagtatttcaactactttcaggctttcagcagagttcatggaaccgatgtgtttcgacggaaccgatgcgctatcatcccatggcctaggctgtgtgcctttctttacctagcgaaactttgtcacttttacgggagatatttaactaagtgcaagtctgcgactcttacatgtagcaattgaaaatttatcaccactaaacctatatgctataggcatataaggacccatatccacatgtcatgaactgcgaatgataaattttttaaatttttaattgccacatcacaaatagttagattccctcttttatagaattctatcaaatccaacaatccaacagtttttatttatcgatctgcctttttgtcgatcaagtcgatttcacgaaccatttttaggctgctttcctttccagccgttcctaactcagcgtgtacgtttttcaaactactaaacggtgtgtttttttaaatgtttctatacaaaagttgtttaaaaaaatcatattaatctattttttaaaaaaagatagctaaaacttaattaataacatgctaaacgctgcttcgttttgcgaggggtttttaactatttaccactcttccggagtgccactatccatatgccactcttctagatttttttttatacaaacaccataaaagagatattttctccctaattaatatgctatgtcagcaagggagacttgaaatgacctttttgcccttggtttcatataatttgagagagattatatacaaacatatgttaacaaatattgattgaacaagttcaccacaatataataatagattaaacgtagccactttcatatagaatcgaaccatccatattacaatatatattggcaacctgtcatgttcacaaggccataataagacatcgcgtacaagtaatctctcatataataaagttcattgagagatgctaggccgtacatgcaggccatgaagttcggtttagtttcaaaaatatcacatcgaatctttggacgcatgcatagagtattaaatatagattttaaaaaaactaattacacagttaggggaaaaattgcgagacaaatcttttgagcttaattaatccatgattagctataagtgctatagtaaaccacatgtgctaatgacgaattaattagactcaaaagattcgtctcgcggtttccaggcgagttatgaaattagtttttttatttatatccgaaaaccccttccgacatccggtcaaacgttcgatgtgacacccaaaaattttcatttcgcgaactaaacagacccgaagtagtttgtagcaaaataagaaggcatacgatcattaggccatacacatcatatcacaacaaaaggcgccaaaggcttatcagaccattcatcatttcataagttcatcaggccacatcacatagcaaaatcagttgaatagcttgagtggtgaagcaattttgggcttgttagctagcttttttctaggagtaagcttcttggattgctagcaaaaaggtcatttcaaatctccctactgacatagcatactaattagggataaaatctctcttgtggtgtttgtgtaaaaaaatctggaaaagtggcatatggatagttgcactccagaagagtgacaaatagttaaaaaaaaaaccccgtcggccgccgcgcgtcactccctcctcacccgccggctgctgcgtgccgctgcctcctctcccgtctccctctggccgccgtgtgccgccactcctcactcgcgcctggagagaggacagaggagaggggagagagatgaaggggaattggggagggaggaggaagaagaggagggttgagaatgatatgtggagcttccatcattttaaaattaattttttgggtgtaactgacatgccggctgacaattttttattattttcgaaatcaagttgccacataaacgccacgtctttgccatgttatatgaagaccgaatcaaattagccacgtaggcgtcacgtaaaccgccatccaatctgccatgggacctatattgtattggttttgacaaatcgttatatctagtttttcagttgaaggatgaaaattggattcgttgacaagctaagacaccttttatgaatggaaaaagtatactgaagatccctcaacttgtcatcgagttacaaaatcatcctccaaccacaaaaccacgtatgtctttagttggttttaaccccgggtttgtcatacgtgacggctgagtcagcgtgggacccacatgggtcccacatgtcagtagccacgtcagcctcctatctccttcctcatctctctttcacgctttctctcagatgggtgcccccacgcgcgtcgcatccccgccacgaacgccatggtgacgagccccatcgccgcggcccccgccacagccatatgcggcgcggcgcacgcgcggccgggacggttcgcgcccagctcgttccccacccgtgttgacacgccgaagcccagcaacgacgggaacatgtactccaagggctccgggaacacgccgaatcccggctcccgtgtcgtcgccgccgtgcttcaagggcaagaagatgtgggatgacgaggaggaggtccagagccttctcaccggtcgcgaatggcgccggccgggaggttgaggtcgaacgcccgggcggcggagtggccgttgccggagctgcgggcggagtcggcagcttgacccggtggctcgtcttgtggccgccaagcgcctgataggcttgccgcagacggagcacttgaactccgcacctgccgacggccgcaccaacgccgagagcggaggcggcgcctggacacggtggtggccgccgcgggctagcatgaggaggcagagccgcaatatgtaaattgatcaactagaggcttctgttttcttaccgtgtctgtaagcaaaggagactgaggtgccaaaacaagatgtttcggttctgtacaaatatgatcatgaaatcaatctgtgtttatgttacagcgtactgtacacgaatcaatctcccaatatgatcgaatatggtctacaatatatgaccgccaaaaaactaagtgtaaaagatacaggtacagttccagtgtacaaagaaccaaggaagagctagacatagtatctgtatgactatgtatggctatgtatcactcgtttgctatgtacaaaagcaggaacaaattaaacaatagcggcacaaaacgaatcaacgaatagtttgtttcgaccgtgaatttcactccctagaccaaaaactgtttgagagatcagatccgtgcagctgctgaattacgcggtgagaaggcgagggggctctggacctcggaggaggcaggagccaagacgggagatgcgggcggagtaggcagcttgaaccggtggctcgtcttgtggccgccgagcgcctggtaggagctgaaggacctgccgcagacggagcacttgaactccgcacctaccggcgccgagagaggaggcggcgcctggacgcggtggtggccgccgagggcgagcatgagaaggcagagcgcgaggttctcctcctccgatcgctggcggcgcgacctcttccgcttcgcccacccctgcggtaggtgcccgccctcctccccgcttgtggcgctgctgctcgtcacgaccgccgcctcctccacctcgtgctgctgctcctcctccttgagcaccgcggcgtggagcgcttccgtctcgccattcgcgacctgccgccgccgcctcaccctggcggccttcgccccagccaccggccggcttgccgagaagagtgagagagagagagatgaggaagggagaggagggggaagagagagagagggtgctgacgtggccacgctgacaggtgggacctacgtgggttccacgctgactcagccgccacgtatgatgaaaccgggttcaaaaccaccaaaggacctaaaatgaatgttttttaagttggaggatactctgtatctggttttctggttgggggacgattttgtaactcgataacaagttgagggaccttctgaaccgggttcgcgacggatggccgacgttattaatcctattttatcagtgtaaaaataattgtaaatgatatcataaatctatttaatccttttaattaggctttaattggattaaatatcgtaaaattcataactaattcatgcaaactcgaaatgaagtcgttcaagtctcaaaattcatctcaaatctcatagttaaacttatttcttttcatatggacacagatttggacaaattttatttgaaattatagctcttgacgagatttataattttataggtgatttttttttcatttgaaatgttttagatacttaaattcatgtttcaagtctcaattaagtaggctcaaatgaaaacatatctatcttctaatgagatatttcatgaaatgccattgacaagcatccaaataccagaaatgccatcgacaagtgtgagt

SEQ ID NO: 1865 - DNA, 5642 bp, Oryza sativa
ggggggaaacggcgcggacgtgggcggcgaggtcccacggacaagcgcgcgcgcgcggggtggaggaggtgggcggaaacggcggcgacgttggacggctcgggcggccatggtggttgctggcccgggctggaggttgggggtgaccccgacaggtggggcccacctgtcggcggctcggggagaggagggaggatgagggaggcgaagcggacttgcgcgaaggagggggcaagccgggccgacggcccaaagagaagggaggaggggaaaaggagggcggccgggcccgagaggatggagagggagaagatcttgggccgaaagcggcccaaagacaaagaggggaaattttattttttttctttttattttaattgatgcaatgatctttgtgctattaaaattatttctcgagctccgaaaattcgcgggaaatttcagagagtattttagggcacaaagaatattacaaaatattctcagccaatgatttttaaaggaaatttttaattccctcaataattcacttgattaagttgatttaacttttatttaatttctagaaaatgcattatttaatgatttttaatcccgaacgaaaatcggggcgttacaaatctaccccccttacaggaatctcgtcccgagattctgggatggctagaaagaaaactggggctggcgggcggtctgactgatttgcacactgcactgttcctttctgattcaactgagcgattcctcaatggtccaaacctgctcgactgaactgaccggcattgaccattctgttctttcgctccaaacaactgaactgactggcctcattggattcgaccttggaggtctggcgccccacaggactgaactctgtacgagtgatctggctggattcgacctttctgttcctttgctttgccaaaactggaccgactggttctgcttgaactgacccagactaggactgcggatgctcctgaaacttacttatcttggactgaactgttgaggttggcaattttggtaacctgagaattcaccacgctggctataagagggtgaaaatggaatctggcatttgtaaatcatttaccctatgtccgcttcgactggtcccaattcaaatgacaagtaattccaggaaaacctgcttgacctgtctttcgtctgtactacaactgtcctcgctgttgcttctctaagctgaactgttgacatgcttcacaggtgtaccttagaattgaacctgtcgacctgagattggggtgactctgctaatggttcgcaactgactcctttaattactaaccaatttgctgcactgggttgaacctacaactgaaacggcaacgaggttagccaaatctcatctctgagacctaccccccttacagtgggtagtcatactttcgcctaactggaaacacttgaactgctatcattgaaaaacaaccattacttctcggatttacaaaagaccctgactttggaaactgacacttcatcgatcaatcaaaatggagcaatgacgatgcactttcatccaggtcaagacttggaacttaacccttagttgttgataggaaactcctcataaagaaattctcatttagctcctgatcttactaactcttgactacttccccatcagttctattgctggcatatctagcatgcttcaggcccgacttcggtgtcgagttgcatagttgattcctcaaaactgaactgaccgactctgctttggaactgacacaacttgaggagttgaggtgtcgctaacaaagctcttgatgtgatgacactgatgccttactgtggaacaaccctctgagaggtgccctgtcgtacatcttccatggatggttggacactttgcaaaaactgctcttgaaaaccataaccactgtaggtagcattgttactcctgggattggtggtgggttagctgtgctgatatgctgaggacttggtggcgtactatctgaggttgcgggtgcttccttctttgaaaacaaactggctttggctctgatcctgattccagcttgcatctaggcttgtacatgttgttggagacactgttgctgcatctgttgcatcggactttgcatctcccgcatcattacatccatcatctaatcttggacaccaaatgttgatcacgagcagggttcttctggcactgggataccttgtagctttcaactgaaccattgattggtgactttaatacaccgtcgttgctcttctctctaacactgactatcttctgccagggcggaagagaggaggaagagaggggttgctaaagataaggtactaagccacttgcctactgatctgttgtgagtagatttttatttttcaagttgtttaagcaagcaacctagtatggtcgcatccccaccagtgatgcaaaccatacccctacacacaagcaaacaacacacgatctagaagctaacgaaactactcttctgggacagattgggtttaggtcatctccgggaaaactccacttgatcttcgcggaacgacgactctgggctgaacttcttgctcctgctgcacgaagcttgaggcttgaattgacttccgaacagacatgaagctgacggctggtcctctaggtatgtcaactaaaagaattggagagactgggaggagaattttgaaaaaccgtttgacaaagaaatgccgaagggcgagaggagacaatttgcaaatagggtttttagaaaacttgtccttagggtttgaccatttggctcaacctacagtcgagttggctctgataccactttgtcacgcccagaaatttagcccaaatttccagactattttgtgtattaaatccctgtccaggaccagccagggtacacaaaacgacaagtaataaacagttccaaacgtaaataaagcgtaaaaatacttacagaagaggcacttagtcctcacaccgaaacaaaagcagcagcagcggaaaaaaaaaacgatcctagcggggcttcagctccactccacaggcaaaactcaactggggtctgagccttggtcttccaactccatcttcagctcagaagcactacacttctgaaaagggggaataatagcaagactgagtacaaccaccgtactcagcaagccacaccaacgatgcggacgtgcaaagggatacaaggacggtttgtggctatttgcataaaggcagttgtaaaacattttatttagcaaacagtaaaactgttgagtaattaaagtaacattaaatctccactgatcaacgctacaccacgttgaacaggcccaaccaacccacctggactacagtgcattgggtcgatttattaggtgtgagactaatcacggtgaatctggtcgatcgcccataaccgcgggcacggctattcgaatagttttactctggccagaggtgcacagctgtacccacaagacacaacccaccgacatgtcaccgcgtcatcatgtgctcatgatgcacacgtcaccatgtcgagtgattgtgacgagacccttcgcataaccctcccctaaccatccacaccacgctaaggtttcacccccacccctcaaaaggcagtgggcggtcccctcttgcgccgcggtgaatccggcagctggacaaccggacaccctggccgacccaactccatcacgcccaccctcgccaccggtgcctaggaaagggtcgagctatacttcagatcaagcagttacccactcccgcttgtggtaagcactgtaagtcttccagggtttcccgtgaaccggtccttaattgccatgggtgcgactcgcaaaaccatgcacccacagcccaccattcagtcgcattttagttggataattacgaccataaaacatggccagatgtctcgagcacgcggctcaacaagatactagtatgtctaatactgcaattatcccatcgactgagctagtggtaattcagcatggctaagcatatagttctagctaggtcacataagtaacacgagctagtcaatttatcacccaaggttgacaaaggatagatatcaagtaaacatggcacaagcgagcagataggtaaaccctgaccccgtgtaattagcaaaacatgcatatttatttgcaaacagtaaaacatttgtaaattaggatcaacatgctcaaggggaatgtgtgacttgccttgcttcttcactttgatcttccgaactcttttccttgcgaccgcggacttccgaaacgacggattctacacgctggcacgcaaaacgaggaaaaaccctaataaaaaccaagaaaacagtacataaaaactaaacaaacatgtagagctcaattttagatgaattttgcaagttgaacggctcaattcggagttcgaatgaattagatatgaattttagaaggttttgagccattttaatggatttctagaattattaccgatttattgcgcaatttaaatcaattatgacgtcatccgacgggggagaggtagcgccggcaagcgggccccacctgtcggtgactcacgggtggcgggcgcaccgtggaccgagtccacgcacgcgctggtccgcgggcgcaccacgtggcagacacgtggcggccacgacggacggctagcggaggtggcgccgacgtggcgccacagaggcaccgacccgggcggcacgggaaggccacgtggacggcccagatcgccccgaagggggatcgggcggccacgggcgagcgggagccggctcaccggtcggccggccgggagcgacggcgcacggcccgatggtcgccggcgacgaccaccggcgcgacggcacgcgcgggaggcggcgcaaagagggaaaaggagaggagatggagggggtcctcaccgaggggcgccggcgacgggacaaccatggggaggcgaccggcggcggaaaggatggcggcggccggcacgggaggcgacgggaacggcgttccgacgacgcccgaccctggcggagccgcggccgagggccggcaagacctggggaaattattggagcggttagggagggaaataggcgaccggagcggcgagaatacacgccggagaggaatggtggggctcaccggcgaccgagagatacccgtccggtgggtttccggcgatgaacaacggtgaccgaggtgctgcccggcgctgcgaggcgagaggttaagacggagcgacacggcggcggctaaggcgacggtggcccccggctggagccggcgtatggtggaggtggctcgggatgcacggtggaagggtggttgcggtggtggaatggggaaacggagcggaggccggggtagagcttggcacggcgttgccggcggcgcaagcggcgaggtgcggcgacgactagcgcggcggcagcggccggctgaaggcggtgtgtggcggtagtggctcggcctcgcgatgggaaggtggttccggcggtggaggagggagatggagtggatgccggggtgcggtggggtggtgtgatgctataggtggtggcggcgcagcgcggcagcgacgggagcggcggtggcgggcggctggagatcgccggcgagcggcggcgatggggatcggcgtggagagctcggtagagggcgtggga

SEQ ID NO: 1866 - DNA, 732 bp, Oryza sativa
ttgaatgaaaaaggttcccaataattatctcccttgtacttgtaaaaacctcagttatgcttgaaatatgttaattccagactaaatattctcgttaccattggttcaagaattaagtggatcaaccataatacttcagggggttaattcaaccttttcctatacttttcgtggttgactacatttgtacgaagtaccttagtacttactgcaagtatattcatataaatctcaaggaagatattgtgtgttatttttgttttgtattgataattttctgtttcagtcaaactacgttactagtgttgttaatttcgatacaatgaaacatgctttctgtttcttttgagttatgttaacaaatgtgcttttcaggagtttcaattttggatagtgatagttctggtatcactatggagcttgagttgcaatgggatggcaatccaaatatagtactggacattcaaacaacacttggaatctcacttcctgtgcaggtaactcgtaatttttgtaacatgacctaaaacaatggttatatgtaaaactgctgtacaaaatatagtgtggaaacaatttttttgttatatttatttattagtgttctgttcttttgaacatcttagatagaaaaccacattcaacttcatctcctgtttgctttatgtttaactcaattaataagacagctgtttctgatattgtttttaatagtaactaaggtactgagtg

SEQ ID NO: 1867 - DNA, 2555 bp, Oryza sativa
tggacatgcatgtacagcaagctctgtccagcactgctcattttttgtacaacaaaactcatatacaacagcaattggaatgaagcaccccttgacaaatgaacaccacatacatttgtgattgtaatagtcaacaatcaaatgtacatcagcaaaacgacaatgaagttcaggagattagtcaataccgaacgattgagatactacatgatttagcttttgtggcgacgcaaggaaatgaaaacaattaagcatctacaaatgtggagtgaatagaaaacttggtatgttaagccctaatcacgtatggttgtctagcgaagtggcaggctacttaattaaggccaaatttaatattatagattttcatcttagctcaaggcatggtagctaagctacatgcaggttatatcggggacaaaagtacaacctaagcatgacagtaagaccgaccgtattcagtttggaatgcaacaagttagtttagttgagtttaaattagctgaaattgctagttgcagtattgtctcgagcaaattaacaataaatgatattttagccacatgaaggactgaaaggcagtaacctttcagtgtggaatgcaacaagttagtttagttgagtttaaattagctgaaattgctagttgcagtatcgtctcgagcaagttaacaatgattgatatttagccacatgaaggactgaaaggcagtaaattatgtgtacccgcgacatgtagttatccatgagatgtatcgttgatgatcttcgacatgtgattatccgcatggtaggactcatgaaagcgcacagtcacgcaccacatgaacaccaggacataagagagaacacagtggagacagggacaccaggtcggggtgaagaacccggggcaaaataaaatgaatagttccccgtgcgatctccaccccaacaacacaaggaaaatatctttttattgtcttgtggcctgccaagcgagcgcacccaacatggcaaaggccttcctaccctaaatctagatacatcatacatagtatatagtacaacatgattatacaacatgcacatacatgtgcattagcttaccgaggtcattaccttatcttctggttgggagatatggacatacatcatctaattagcagcacatcaatcatcaaacaagaaacatcatcaccatcacgattcctagatgaaggaatgctcatggcaccattgcaaggaaggaaagcatctgtgcatagtaggaaaatcttaggagtctggctgtaggcgacattaacgaagaaatcatcgtacatggttacagctccacacccaaaagatcaattacgcacacaggccaccagttgcaaagtgagcaacacggatgaagcaaaaatctcatcatatctgcaggaacagaataacagaattagaattaggctaaaactgtgcgtgcaatagttctttctaccatgaaagaaggtatataaatctaccaatttaacagggattattcaagtcagatgagaaaaaactaacataagaaaaaggttcagaaaaataccaattttgggttcaagtcagatctagacacaactatgaggaaaaacagatctaatctataaaacctattgagacgtgataaaattcaaccaccaccaccaccaccatcctgagaaggcaaatcagatcaagaaaagccccaacacatcaggagaggtaactaccaccaccatcctgagaaggcaaatcatatcaagaaaagccccaacacatcaggagaggtaactaccaaccatagcaagatggagaagacaatattaataaggtgcggcggcttaaatcagctaaagtaacggaaatagatcctgatctatgaaatatgtatggcgcataaaaacaaaacaggacgaaaactgaaaatcaaaatctactccatcccaaaacaaacgtaatttaatcttccaatgtaatcaaccatcaacccatcttgtactcctatactaaacgttactccctccgttcacatgtaagactttttagcattgctcacatacatatatatgttaatgaatctaaacacatatgtctagattcattaacatctaaatgaatatgagctatgctaaaaaaatcttatattatgaaacagaggaagtagtaagaagggagcggaagaacgaacgaaccttacgaatcgaagaggaccccgaggagaaatcgtgacgagacgaagagagagaggaagaggggcgagggggaagaccatatataccggcgtggctgccctggttggcggtggaaaacaagtcggttcgtgcttgctatggaaaggacgggtcggtcatggatataccaccattgggtcttcttgcgtgtcgggtgcggtttagtgcgtggctttgctgctggccacgttacgtatacttccattgacctttgctgctcgtttacgtcatcccttgcgtcacatctaggatggatcgcctgtgcccatccagccgtatggccggatttataggtgtccaaacgggcggcacggcccggcccggcacgggcacgggtcc

SEQ ID NO: 1868 - DNA, 1480 bp, Oryza sativa
ggaaaaagaaaaagaaaaagaaaaaggaatttccctggaatttaaaattgcacttgctccattttaattggttaaaattatttctagagctctgaaaattccactaaaaatcctgttagtgaatttcgacatgtagaactcaagaaaaattccacatgtcaaatccgattattatttgcattgttttcttagggttttgtcctgatttcctctgcattttcttagggtcaattataaattacaattttgacttgggaggaaaactccggggtgtgacagctgtcgagcctttgtggcgagccttcggaatgtccgttggcccccaaggttccggcccaccatcaccgaaaaatacgacggaagcgtcaaccctgccgagtttctccagatctacacgactgggatcgaggccgccgggggtgacggggttggctaatgaacttgccacctgcgtcggtccactcttgggaggatttgtgccagcagttcactatgaacttccagggcacatatccgcgcccaggtgaagaagcggacttgcatgcggtacagcgaagggacgatgagtctcttcgctcgtacattcagcggttctgtcaagtccgcaacaccataccatgcatccccgcacacgcggtgatctacgcgttcaggggcggcgtgcggcacaaccgcatgctcgagaagatcgcctccaaggagccccagaccaccgcggagctttttcagctcgcggaccgtgtggctcgcaaggaggaggcctggacctggaactcctccggttccggtgtggcagcttcggctgcccccgggtccgccgctcggtcagggcgacgggacaggaggaggaagaagaggtcggcccattctgacgacgagggtcacgtcctcgccgtcgagggtgtttcgcgggccacccgaaaggggaggcctgcgagcgacaaaaagaaggaggccggcgctcccagcagggagcgcccaaccggcaagtggtgttccgtgcacaacacctccctccacgacctcgcggactgccgcgcggttaaaagtttggctgagtggacgaggaagtgggaggaggagaggaggcaggagcgccgtgagggcaaggccccggcggctcccgccggcaaccggcgaagtgaggccaaacagaaggcccccgccgaggacatcgacgatggccacgatggcctgggttccaggagcctgaggtcaccatcgccaccgtcgatgggggagcgtgcgctcacgtttctcgccggagcctcaaggccatgaagcgagagcttttggccgcagcccctacccatgaggcgacgcggcgggcgcggtggtcggaggttgccctcaccttcgaccagaccgatcacccgccgtgcgttgcccagggaggacagatcgcgatggtggtttcccccaccgtttgcaacgtgaagttggggcgtgtcctcatagacgggggtgcagccctcaacat

SEQ ID NO: 1869 - DNA, 4323 bp, Oryza sativa
ttttttttttaaaaaaagcaaaggaaatgtataaggaaaaaaaaattaaaaatggaaataaaatgtttaaaaaaaagtaatgatttactaatgttaaaaaatgaaaaaatggtatttaaaaaatggaaataaaagtttttaaaaaaagtaatgatttgctaatgttaaaaaaaagaaaaaatggtatttttttgttgtgttgaaaaatttaaaaatatagattgtgattcattattttgaaataatttaaagataaatccacacttgcgaaaatattgcaaaagaatttgttaaaaatagtaatgacctttattgatgtttatatcattacaggatacaatgatacatgctgcctcgttaaaaactttgtcatgtaaaaactcataggggaaaatgagaaaaccatgacaaagaaaagagtacagctcaaaggtcagaactacttctaacaaaattctactggggttagtctggatccaggtagagttgctcgaactgggcggccaattcttggttgtccgcagtgtattgggcatgttgtcgagcaagctcccagtctttaacgcttagtagcatttcgacgtggtcgctgcgcagagtcgtcctccggtcttcgatgattcggccgcatagactgaaggccgattcggaggacaccgtcgacacgggcaccgtcaacacatcccgtgctagttttgaaagcacaggatatgttatcttgtggtcattccaccacccgaggacgttgaaatcttgagcttcgtggtggatggcgtcgctgtccaaataaccggacaactcttcggccacaacatgcgaagaggcgtctccacttgtagccgacgaactgccaccaccttggattgaagacgatccaccccaaatcctaccccactgtatcttcttcttacctgtagtggggataggagggggtctctgctggcgaacttcctgaaactttacttcatatcttccaaaaacctcatataatttacgtctaacctcagtataaaaagaactataatctacacctatagtatctccaataagtgataaaatagcagacaatccccttaatttacacctaggatctaaaacaaaagcaaaagcatacaacataggtatatttttccaatatttcaaatatttttgtttcatgtgaaagacaggttcagttagaacgtcatcattttcgtattctttaaataaattagcaatttcaagaaggttgtgcaaaattatattagcagttggataataaacttgtgacaaagttagagtacaatcataaaaagtttctagaaattagtgaaatttttggacaattgcccaaacatgctcgttcagtactgaagacccgtcactgtttcttgggccaccacgtgactgaacaaaatcagaaagtaaactactataaggtaaaacaacttttaacattaaatacgttgcattccaccgatgctctgcatcggtggcaaacttacgagctttcacaccggccgcattgcaaaacctcttccatgcagcaatccgtgggttagaagcagttaaccacgcgattgcttgacgaacagcatcgatgtggtcacctaccctcttcatgccagtcttaacaatcaaattaattatatgacatgcacaacgctgatggagtagaaaagattgagcatacacacaaaataaaggttgcaatatttcaatagccctagaattagcagatgcattatctagggtgacagcaaatattttatcagcaagattaaattcattaattacttccctaattctttcagctatgttttctcctgtatgtgagacatctattaacctaagccctaaaactctcttttgtaattgccaatcatcatcaacaaaatgaacaactacgctaagataatcctctctagctctactactccatatatctgaagtaacactaacagagaaagtacatgtactaaacagttccttaagtgcagttgcttccttgtgataaacattctctaaatctctagttgatgtttgcctactcacagctttaaacctagggttatgagattgctgaatgtaatgttcaaaagcaggggactccccaaagttcaggggtaaatcttgcctggcgattaaccggacaagagattcccgagcaaccatgggatcgtattcccaactgcgtaccgtaccgtctgggtttaccataagttgctgctgccggagttgtattccttgcttcttggcacacgactccgcatggcgcttgaggtgacctgtaccaccagaagaacgagcaaataaaatttgcctacatattctacaacgggctttcgatacctcccttccgtcggggcatgtttcctttatctcgtcgaagttttgccacacaccggaggttctcgatctcttcgagccggtgtgtgtcgaaacacttccgctcgcggttccggaaaatccttccgaagctgtcgccgcctgaaccggtacctcctcaacgacagccgtatgaaccggtacctcctccacagatggtggagttggagccgatccggaggtatcgtcaaaccccgacatgtagttggggtcgaaatcacccaaggtgaacgacggcgactggtatggaaagttcggatccattctgaaaatttaaaccgacataaacaaattttcgaatatttattgaattcacaaacacaatacaaataatacacaaatttgaatattacttacatctttccaaccgcgagctcttcaaacctctgcgatcaaactgttgaactacgaagctaattttgatttttgacaaaatttgagcaaattttgtcaaaatcaaaaaaaatgcacacttgagaacaaagagagcacttaaaacacttgagagcacaagatgaggagtgtgggatgaggagaaatggctggggttcatgccctatttatagggcgaaatttgagattttttggaattttttcgaaatttttatgaattttttagcctcccaacggttattttcaaatttgaacggtcaaatagccgttagtgccacgtggcgccttcccattcgaccgccgcccgccctgtcagtgcgccgctggcccgctttcggcctgacgggccgccggcgaaacgggccgtgccgtgccgtgccgtgccggcccgcgggctcggccagcggcccaagcacggcacggctactcgtgccgtgccggcacggcccgttactgtagcaggccgtgccgggccgtgcctgctacaggttcggccgtgccccgggccgcccgtttggcctggcccgtttggccacctctagccggattcgcgcgtagctggtgggcgccgcgaagttggccttcgcaaaacgggaggcgggagacgagggttgtgtggcggcctccgaggccatcgcatcattggccaagccaccaccaactccttcccaaaatcaccccaaccccggcgccctcttcggccaccatgggagatggcctgctcttgccgtagccgagctcgctgtggccccacaacaaggaggaggtcgtgttgctggtctccgacggacgcagcatagtggcggtgacgtcccagaccccgagacctgtacctactaagctcggtcttgctcttcatcttcttcacctaccacggcgcctagaacctgcagagcaccatcaacacagtagtaaacagagtcattttctcaaaactgatctacatgcacgctagcttccatggcgtcaaatttcgattgagctagtgtaggacaagaacctggggttggtgtcacttggattgttgtacaccgcattctcggtggtgggctagccgttggtacggcagatagggtccaagcgggcgttcgtgcggcgaggagcagaaagggaagaccgggcggcggcgaccttcccaccctgcccccgctcgctgtcctcctccctcctcgcccggccgctgcgcgccgcccctcctcacccgccggccaccgcgcgccgcccctcctcactcgcgcctggagagaggacagaggagagggggagagacgaaggggagtgaggccaagaactttcagaatatgctatcgaattcgcactgcttcaggatatgccatctaattcgtgctacttttaaaatacaccatcagagacgaatttttttgttccgtgccactccgtctcttccgtccatagcgtcgtcgtctttcgtccgcccggcggcaccgtcgtcagtacgccagtccgccaccgcccgcgccgacgtttgtccgtcgccggcatcgtccatcctcgtcggcgtcgtcgtcgtcccggcgtggcgtgggcgcggagggaggcaag

SEQ ID NO: 1870 - DNA, 9288 bp, Oryza sativa
ggatcccgactcctcctggcgctggaagacccttcaactgagcattctccttcttcaggcgcgcttcctcgtccttcagagcgacgatcctcatgagcttcccatcgttcaaggccttggtcgccttgtgcaggtccgagtgcatcctatccaatcccctcatcacagcacacatgtgaccgaaggtggtgtcgttctcgccagctgtcggacggaaggagctgacgccatcaccatgggctcgacgggggtggtagcggtacgccgtgtcgtggaagatgtagtcgtggcgctcccgtagtctggccatcatcaagtaggctgcctcctgacaggcgtgatctgctgtgcctcctgacgcctccaccgccatgttagcgaggcaagtccccacgtagccatggacctccaagcggacacggtaaggaagctcgccactgagcggtgggatggtcgtgtattccggcgcgtcggggtagcccaccaccagggtcatgcgtgccaactctgccacgaaatcaatcatgccttctccgcggtggttgggtgggtgaccggccatctagagaagacaaaggagtaggatcaatgcatgctcaaatccaaatttaaataaagcaataaagactcaaataaaggaatcaaataagagcaaaattttatgcatagatcattttacatgagcgcgaataaataagacagactcacataacgataaaataatgggaaattagatacataataataataacgaacaaagcataaataccttgcaacccatgataccgagctaggaccgaatgcatttcgcccatcaaaccccaactgactgacgaataaatcccaataattttactaaaaccctaaactgactcgttttgaaaaactcactttaaacgagcgaccaagatttttcccttgaaccacaagaacagatccccattttcccggaacaaaatccaattgcaaagaacatatgcaatgaaaaggattcagagggctcttaggtctttccatttggcttgtcctacggtcaaggtcggctctgataccaacttgtcacgcccagaaatttccgaatagaattccaagcagaatgtgtattaaaacccccgtccaggaccagccggggtacacaaacgacaatgttgacatacagatccacgtcttacaaacatcataaaagtcttacagaaatgcagcggaaaaacaaaagaaactggagctaagccttgacttgaacggcagcgggaacaccactccacaggcatcctcgacggcacggacgaagcctactcctcggagaacccgccatcggacacatactcgagctctgaggttggggggaaaagtagagcaagactgagtactacccactgtactcagcaagtcataccggaatagaggtatgatgcagggatttaacaagggatagctaagcaggttcatttgcataaatgctggcatttataaacaggaatttaatgcgaaaacagttgtaataattaagcagtattaaacatccgctgtccaacgctaacccacgttgcgacaggcccaaccatccacctaaactatccaagttcaacaggttacactagggtgagactaatcacggtgaatctggttgaccgcccataaccgcgggcacggctattcgaatagttttactctgatcagaggtgtacaactgtacccacaagacacagccccacgacacgtttccgtgcgccgacatgccaccacgacataccggaaagaggccgtgacaggacccttcgcataaccccctctagccaagcacaccacacctcaggtttcacccccgtccccagcgggcgacgggcagtcccctctcgtgcctaggtgaatccggaagcgacagaggccgtcgcagggcccgccccgctccatcacgcccacccttgcctggatgcgtcgactagaggaaagctacactacaagcccagccgttgcccacgctggcttgtggtaagtacgataaattcttccagggcatcccgcgaaccggtccttaactgccatgggtgcgaccagcaaaaccatgcacccacagcccaccatgtggttcattttatttaaccaacaccagagcggtggtattaaaccaacattatcatataaacctatagtctaggttttaaatgagatccccaatgtgtgctagttgaactaagcatggctaagcaattcctagtccaaagtctaatcatgttataacccaagctaacaaaggagcatgatatccaaaagcatggctgtaacaataggtatccatcccatagtgatattataaaacaatgcaatatttgaaagaaaacaatagagcatttgcaaaatgggatcaacatgttcaagtgacaagcatgacttgccttgctctgctgctggaggtacctcggcgactatctcgaagtacaccggagcgtcggagggatcggaatctagcgacatacaaagcaaacattgcaaacaggctataagactactgaaacagagaacaaaaccatttttaatggattctacacatttttcttgatttactgagacttgaatgggattaaacggagctcggatgaattagttatgaattttagaagattcactgtgtttattactataaaagaaatccttaaataatttattgcgcaatattaaccagggctgacgtcagcgaggggcgcggcgccgacaggcgggtcccaccggtcagcgaccgggagagagagaaagggggcggcggctcgcgggcccaccggtcagcgaccgggagagagagaaagggggcggcggctcgcgggcccaccggtcagcgacccggggaaaaggatggggcggcggcgccacgtggcgaccggaccgacggccccgatctacccttgggtagatcggacggcggcgcgggacctcgcggccggggcgcgcgggcgcggcgcgagacggcggcgaccatggcgccggcggcgcggcgctcacacggcggcggcgcacatgcggcagcggcgcaaagcgacgaccggcggcgaccgtccggcggcggagagcggcggctagcggctctagggggagaggaaggggaaaagaagggaggggatgcctcaccgagggtggccggcgcggaggaaggcgatggcggacggcgacggcaagccacgggaggacggcgtcggctagcggacgagcttcggcgtgccctaaggaaggagaagagagggattagagagagagagatggaccatggcgatcgggatccatggccgaaggcggcggtagaggtggcgctcacccgtgcgcgtggagatgagggttccggcgacgaacctcgacggaggaggggtggacgaggtggacctcggccgcgcgaagctaacggcggcgacggcgtgagacggcggcgagcctagcggcggctagcggcggccggagtagcaaaagcggcggcggcgggtggttgcacggcgcggaggcgttggggagctcgggagaggtcggcgcaatggggaaaaagcgagagggggtgccggcgatgcttaaataggggatgggggaaccggacgtggccgggagcggcgggattcgacggccgacgtgggggagtggggaggagagagaggcgggattcggttttcgaatcccggccatctcgggcgcgggcgcgagcgggagagagaggggaacgggcgcggggaatgcggcgcacgcgcgggcgtggtcgacgtggcccggggaaggcggagacgtgggcgcggcgtcggttgcggcggtggcggcgcgagcgggatcggcgggaggagggagacgggtccgacaggtgggccccacctgtcggcgaccccgagaggagggaggcgggcggccggctactgggctgggcctcggcctgcggccggcccagcaaggaggaggggggggaaggaaaagggaaatgggccgacggcccatttcgcaaaaaggaggaaaaagaggggaaaaagaaaaagaaaaagaaaaaggaatttccctggaatttaaaattgcacttgctccattttaattggttaaaattatttctagagctctgaaaattccactaaaaatcctgttagtgaatttcgacatgtagaactcaagaaaaattccacatgtcaaatccgattattatttgcattgttttcttagggttttgtcctgatttcctctgcattttcttagggtcaattataaattacaattttgacttgggaggaaaactccggggtgtgacaaacctaccccccttaaacggaatctcggccccgagattcggaggagctggtgaagaggtgcggatgggcggctttcaactcatcttccctttcccaggttgcttcctcttccgaatgatgactccactgaactcggcaaaacctggtgaccttgtttctggtcctcctttcgctggtatcaagtatgcgaaccggcttctccacataggtcaggtcctcctggatatcgatgtgttccgaatcagcctgttcctcaggtacccttaagcacttctttaattgggatacgtggaacacgtcatggatgccgatcatgttggacggaagttctagctgataggcaacctctccccttcgttccaaaattttgtatggtcccacgaagcgtggtgccaacttgccttttgtctggaaacggtgtactccccggagcggggtgacacgaagatacacgtaatctcctgcctcaaaagtgagctcccttcggcggttatccgcgtagctcttctgtcgagactgagcaatcctcaacctttccctgatgattctgactttctcttctgcttccgctaatacttctgttccgaacagttgacgttcgcctgtctgatcccagaagagaggtgtgcggcacttccggccgtacaaagcttcaaacggtgccatctgtagactggcctggtagctgttgttgtacgagaattccgcatatggtaagcttttgtcccaagctccaccaaaatcaagagcgcaagctatcaacatatcctccaagatttgattgacacgctcggtctgaccatcagtttgcgggtgataggccgtgctgaagtttaaacgggtccccaattcttcctgcagcttctgccagaactttgaggtgaactgactacctcggtcggatactatcttcttgggtaccccatgcaaacacatgatccttgcgaggtacaattctgccaatctctttcccgtataggtggtatgtactggtataaagtgagccaccttggtgagtcggtccacgactacccagattgaatcatgtcccgatgatgtccggggcagtcccgttataaagtccattccaatctcctcccatttccattccgggatttgtagaggttggagtaaacctgcgggtctttggtgctctgctttcactcgctggcaaacatcgcagagtgcgacgaattcagctatttctctcctcatgctgacccaccaaaacttctctttgaggtcttgatacattttagtgctgcctggatgaatggagtactgggtctgatgagcttcggtgagtatcagatccttcaactccttgtcgtcgggtacacacaatctttctcccatccagattgtgccgtgctcatcctcgtggaaatctcgagcttttccaaccctcatgttctttttcagttccgctatttccgggtcatttacttgagctgctctgacttggtccacgagcgtaggccgtgcctccaaagcggctacaaacccgtgttcaacaattcccatgttgagatgttcaaactcatgccgcaattcctcacacatgccctcgatgcatagggcagtgcagtaacttttccggcttaaagcgtctgccaccacattggctttacccgggtggtagtgaatactcatgtcatagtctttgattagctccaaccatcttcgttgtcgaaggtttaggtccggttgggtgaagatgtatttcagacttttatggtccgtatatacttcgcagcggttgccgatcagatagtgcctccagatcttcaaagcatggaccactgctgccaattccaagtcatgagttggataatttccttcgtgtggacgcaactgccgcgaggcatatgcaaccactctgccctcttgcattaggacacatccaagtccgtgacgggatgcatcgcaatagacttggaagtctttcgtctggtcgggcaggatcaaaaccggtgcggatactaatttccttttgagctcctcaaagctcttgtcgcactcagctgtccatttaaacttctcgtctttcttaagcaactgagtcatgggtcgggcgattcttgagaagttttcgatgaaccgacggtaataaccagccagtcctagaaaacttcgaatctgcgacactgtcttcggtggggtccacttggtaactgactccacgttcgatggatcaactgctacaccctgagctgtaatgacatggcccagaaatttgacttccgtcaaccagaagtcacacttgctgaacttggcgtatagctggtgctccttcaacttctcgagtactagacggagatgttgttcatgttcttcctcggactttgaatagataagaatgtcgtcgatgaataccacaacaaacttgtccagaaattccatgaacactttgttcatcagattcatgaagaatgcgggtgcgttagtaagtccgaaggacataaccgtgcactcatatagcccgtaccgagtggtgaaggccgtcttcggaatatcctcttcccggattctcaactggtggtagcctgatcgcaggtctatcttagagaacactttagctcctttcagttgatcaaataaatcgtcgattcgcggcaacggatatttattcttgattgtgacctcgttaagtgcgcgataatcgacgcacatcctctttgtcttatcctttttctccacaaaaatgaccggagcgccccaaggtgaagtgcttggtcgaatgtaccctttctgcagctgctcatcaacttgcttcttgacctctgctaattcgttggccgccattctgtacggtctcttatagattggagcggttcctggtgccaaatcaatccggaattcaatctccctcttgggtggcatggtggtgaggtcttcggggaacacctctggatactcgcagactatgggtatgtcctccaattttctcaagttcttctcttcggcgtccactgggatttccgtctcaatctgattcaacgaggctcctttctttggcgaggctagagatttgtacaccacggtttctcctttctcattggtcagggtgactgtgcgattcgcacaatcgatgactcccttaaacttggtcagccaatccatcccaagaatgacatctaagtctttggattcgagaaggatgaggttggctagaaacggtgacctttgaatttctattgttatagaagggctgaattgaaccgaagtggagctattccctggggtatgaacccgcatcggtgtgctaagttcctctcttactaacccatgcatcccgacaaatttctttgagatgaaagaatgcgttgcaccagaatcaaaaagtactgttgcagggattgagttaacagggaacgtacccagtacgacctctggtgctgcttgtgcctcctccgcagacgcgtggttgacacgagcctggataaaccttggtccggcacgcctgggcttcgggcatttgtcagcgaagtggccaagctcgccacagttgaagcaggaccctggttttgctcccgtctccttcttggcttgcgctggctggcctgactgtgccggtgccattggtgggcgtggagctgcaccgcggttgggctggcctccatggtggttctggctgccactggtgccctgatggaagttgctagggttgaacgggcggtgctggcggacgatcatggtggtaggtccaccctgctgtccgggagtgaagcgcggtcggtgctgactaccttggttggaccggaactgcgccgcctttcttttcctgtccattttgttgcgctgatcctcctgacggattgccttgtcaaccagcctttcaaagtcagcgtagtccccagatatcagttggttggtcagctcgtcatccagacccgccatgaacttctcctgcttctcggcgtcggtgcggacatcctctggtgcatatcgcgcgaggcgattgaactcatgaaggtactctgtcacagtccggttgccctgatggagtgcacgaaattccctcttcttttgtgccacgaccccatctggcacttgtgccttcctgaagctacggcagaactctgcccatgtgacttcagtacccggtgggcgggtggccatgtggttgtcccaccaagctgacgcaggaccctgaagctggtgtgtggcgaaagcaaccttctcctgatcattgcactgcaggagattcagcttcttctctatcgcatggagccagtcatttgcctccatagggttggtggtgctggagaaggtgggtggcctgacacgtagaaactcaggcagcttggactgagggggagggggaccaaactgctcatgctgctgttcggcgtgctgcatcatcctctggtgcatctgctggtgctgctgctgcatctgctgcatcatggcggccatcatctgagtctgatgtgccataacttgggcaagggtcggattctcgggaagtggtggcggaccattgccagaatcaccgttggggtgcacaccatcagcgcgttcttcgccggtgctgccctcgcctgccgtgcggttgccagtcctggtgtagaccatctggagggaagagcggacggggaaaagaagaaaaacagatgctcaagaactaagctttattacaaaggaattaaaactgcaattgttctgatctgaattaaaaacacttaaaagggcaagcaaatatccttattaagacagccatatcataggcacatgacatcgaccgtcgactgaccccaaacaagcaacctaaacacacaaactaacaagcagagactagacaatcgataaactaatgggaaaacgagcctaatgctcggaacggctcctgcggtcggtggagtcgaaagcgtcctcctgctcgtcacctggtccctctgagcgactcctagagtctgacggatcagtctcgccgctgccactgggagtagcagacaaccaacctccggtaccgctggctgaacctctggcggctgatgctggagcgaaggagagagtgaac

SEQ ID NO: 1871 - DNA, 733 bp, Oryza sativa
atcgagctccgctcctccgaccgcgacgagctcgaagaccaccttcgcgccgacgccgccgcagcggtcagcacccccaccgcctcatccactccgaccacgaccccgtcgacctccaactacaaccccctcctgcacctcctccacccgacgtctggcgccgagccctccaagtcccaccgcatcggcctccctaccaatcccaatcccaaccccaaaccctagcctctcctctccccccttcgcccgccttgatggaggtcgagatcaagctccgcctccccgacgccggcgcgcaccgacggctctactacttcctcgcgccccgctgcggcgcaccgacgcccagcgcaacctttttttcgacgccggcgcgcgccccctcgccgccgtcaccgacgcgctccgcgtccgcctctacggcctcgacgaccgcgccccctcccgcgctgtcctcgcgctcaagcgccgcccgcgcatcgacgcgggcgtcagccgcgtcgaggaggtcgaggagcctctcgaccccgccatcgccctcgcctgcgtcgacgacccggcaagcctcggcggggtcgagtccccgatcattcggctcgtctccgaagagtacggcgtcggcggggacgccgcgccgttcgtctgcctcggcgggttcagaaacacccgcgccgtgtaccagctggaggagggcgacaccctcgggctcgtcgtggagctcgacgagacgcgc

SEQ ID NO: 1872 - DNA, 1821 bp, Oryza sativa
aaagcaaatgccaagggcaataactgattgttcccatctaccccaattgctgttagtatttggccctgatactttccagtcaagaatgtcccatcaatgcagagaacaggaggatagtacacgaatgccatcttgcatgcatgtagagctaagaacgtcctttgcagcacacttttgccaggatgttcaattgaggggaatttcttcactgtgtaagagctcccagggtttctttgttggataacaccaagcaagcgtggcaaattgccatacgaggtttcgtaagttctaaatctcatctctattattttctgtttggccctccacaccttggcatagctaatagtatacttgaatgtctctttgatatgtcggattattgactttggttcatatgtcagattatcgatgacatgcacatacatctcagatgcaacaaatgcacatgtaatgttcttgtggtatttctgaacaccaggtagaaaacatgtatgcttggtaatgactgacactgtccagtaatccttccattttcccttataagcgtgcactctccagggacactcatctttttccttaacacacctaacttcatattgcgaccggttggacttggcaatacaaaactctctatgaagtgacactgcaaaatgctttaccgcctccttcatatcttctgctctagtataaatcgctccctgaataacctcattttctttgtgctcccatctcacactatcctcttcagagatgaccagaccagaaaaatcctcactagcccattcggctggattaatatcgggatcctcatcatctgacgaatcatcttcctctacacgctcgttgtcagaatcctctctctccatttcatccacaatgccactgatagtctcctcctcgtcagccactccactaggttgaatgcccactggagctactacgccaccttcctctggtgcgttgacctcttccacggaagtctccttcacttcagcacttggtccctcgctatcatccatgttcatctgcgcacttggatccttcaggtgaacaaacggaaccatagctagaggccacccgcgttgcaatgcattctccacataccatctccacattcgagagtttcgaactggcattagttcccaataaaaactctcagttgcccgacttactacaatatagattgttatgtcatttgtctgtggatcaactctcaagcccctcatcaaccatccttttatagaaggtacactcctctcagccggtctatcaattccccttggtgttacaataaattctgacaaatctaccctagtcggcccgtaacggacgtttcctgggccatggtaaacttgaaatgtatgtttgttggacatatctgtcaacgaaataactagatcattcgttcatgtaataaacgcctacaacgttgacggagctcgtggctcctcaccgggagaccgctctggcccccctttgccggttcggccgggggcttagggtgaaatcccaagctctctcggtatgtggaaagatcgcgagccaggaaggaacgcgagacacgggcgatgtatacaggttcaggccgcccggaagcgtaataccctactcctgtgtttttggtggatctgtgtatgaacaagttacaaagtatgaaccagcccttccccgctccaaaagtccaagatccgttttttttttcccctttctaagtgggcaaggtcctccttttatatctcaaggggataccacatgcacctctccctttccaaactggacttttcttctcttcataaatggacggaaatcggtacggttgct

SEQ ID NO: 1873 - DNA, 2352 bp, Oryza sativa
atcgcgcgcgtacgtgcggttgcctactagtacaaacctggcggatgcggcgtagaggaagcggaggaagacgacgacggcgccggtggaggcgccggcgatcgggacgacgccgccgcgcggcgcctgctcgatcatccgctccagcaccggcgacgccgaggccttcgccatcacatcacatcacaccaccagattccaaacagaaaaacaaagcgaaattcatcagaaattcgaaacaagaacgagaaaaatcgcatcgaagcaacggcgatctcttccttcgcttacaagaacagacgagtgcgcgcggatgccgctcccgtcggcggtgacgacccgcacgtcggccggcgaggtcgggagcgcactgaaggccgtgctgagcgccatcgaaaccaactccccgagtttctcgtccccctcgatcgatcctaaaatcctttatgcttccttaacaagaggattaaactaaagaaagtgaacaaagagaaagcgaaagaattaaagaagatcaagaaattccaattccaattccaactccaacaacagtagaacacatcttctgggttctgggttacgcctttttatataggagggattggaacgatcttccgaatcatacgcacacgcatgcgcagctacgcgcggcgtggaaagcaactgaagacttctggttctgagggcgttttgtttagtgtgacgagaggggttagcttaggatttaatttaatcatttaaaatgggcttttataattaacacatgtgggtggtcgttttatgaaccggggatgcaacgggtttgccgtgtcagcgacagattaggaaggaagcggtgcgaacaagcagccattttctttttttctaaaaaatataaaataaaggacatttgtttaaactgctgacttggaaccacgtatcatttttgtggtgttgttggctaacattatagtcggtggcggccttggtctaaaaagtttgagtagttgctcccttcgagttgataatacttgtcgttttagataagggtgaggtcaaactttaaaatctttgattatgaattattttaaaaatatttgtctttcaaacatagtgactacatgtatagattaatcttaaaaagtactttaataagatcatatattttttaacacttttatacatattataatagaaaataatggtcaaagtttttttttggagaccgtgccattattcaaaacgacaaatattatcaacctagagggagtataaggattaacacgtgatttggtcgctaaacttatgaacacttagtatttacttgtatatagggtatattataagctttttcaaaaaagaaatactcatacttttgcttttataaattgtgacaaacacgcttcaatattcctctttaactgctacgggcttaattgcatcttatacagctggaactagctctccgggacacgcggagtgaggcctagcggtttggggcctgtctagttcgcgaaatgaaaatttttgagggtcatatcggacgtttgaccggatgtcggaaggagttttggacataaataaaaaaactaatttcataactcgcctggaaaccgcgagatgaatcttttgagcctaattaatccgtcattagcacatgtgggttactgtagcatctatggctaatcatagactaattaggctcaaaagattcgtctcgcaatttcccccctaactgtgcaattagtttttcttttaatctatatttaatgctcaatgcatatatccaaagattcgatatggtgtttttggaaaaaaattttggggaactaaacggggccttgtttgatttatcttacaactggagataaccctatttgttgtatgtagtctgaggtagtgaggtccagtggattgtgctgagctagctagctaacttcggcgcatgtagttaagagttccagtgggttgtttggtttgtcgtcgtacctgagcagagcaagccattattctcacatgcacgaaatcaggaatgatctttatttaatttgtaattggcagaatgtggtggttgtttgttgaaatagctgacttggatctatgtatttttgtgttgttcttggctaacatgtagtcagatggcgttctggtagaacagtagcgaaagtttgagtactagaaggctagaagctaagggttaacacatgatttgatgggaaaatatgcagtgaaaacttggaaactaccgttggatcgagaaatagacgttcgagattcgtccacgtcaccatgagttaaaatttaactcgcggattcactcacggattcactcatgagttaaaattttggttagagttaaattttaactcatgg

SEQ ID NO: 1874 - DNA, 10204 bp, Oryza sativa
tttccaggttagatcattattctatcacattcattcttgcaaaatatctaccatgatatgaaaaataaagaatttctacctgatatgcttcttgtcaggaggatgaggaagcagcagatgatgcagatttttctaccccagcttggtagaatcactgaaggtgttgaatgataaggctgtacagattagcacaacaaattcttcatattggctcaactcagaaatgggatacccgcatacgttcgcgctcatggaatccggtaaactgtatgcctttgggggagggatcaaaggccagcttggtgtcaagctctctgagggtcaagaaagagctcagaacccagagcgagtcccgatcgatctctgctaatttcaaccagcattctggtgaccatttgcaatgacatattctgtgatctgtggttagcatgccctcctgaatttcataggaggaactcaaatgttagcatcgatgtaaatactaggggcacttacctttggttcttctctgaagtaacagtgtggttgttggtagttcttgcattttgaattgttggtgcagccaagtcctgaccgagtcttctgaattgttcgtgtgtggctttagcctcttgatttctagcctcattctgcatattgcacggttagcagtgagatcattgcatggttgaattcttttcaaactcatcacgtaggcagtcttatcaaaattagctatagttggaacaaaatcaagccttgaaatctttgctatacctgcaatttcagacttgcagtacataagtaagagtcagaaattatgaaatcccggagcaaccgtgggcaggaacaactgtgggtggtggccttggccgaatcgctgaagggataatgttgttgaccgacgacgatccttcttgtgcggattggtggtgtgggtttggacagggaatcgcgggcgaaagccttgccgagccatttggctggctgacaacggcgacgccgtttggcgtcgttcccctccttggaggcgttgttttagcatacccctttcctttccctaccatattctccgggtgaaaaccttgcttcggttctaaacaagcggtggcggcgatccacgtcgcatcctccttgggggcatcgctttggagaaacctcttcgtgcaaggatattgtcattggtctatgcattggcttcaaacttcagtcctaggccttgacaaggccttctagctccacattttgttttgcttttctcagtttgggtcctctcttctcttatttggtgtgttcaacttgtattgaactaacactctcttctggagtggatctttgtaataattggttgtagttctttttaagcaaaggccgggatattatattccattatctaaaaaatgaaatcccggagcaattcagaggaaagagattattactagttaaccttcatcctaaaatataaggaattttagaattttggctatgcatttatatgtatcgtcaaaattaggaaatcccaaagtgatcatgaccagttgactactaccttcatcccaaaatataaataattttggcttcatcccaaaatataagaaattttggctatgcatttatttgtatcgtcaaaatcccttatatttcatatttcggaatggagttaatactacgtaataagcatgagacatacaaagatcaaaaccaaatcaccaacaaaaaaaacaatgtcgtaatgctacaccgtcaccaacaaagattatacagcagcatgaaacatatattttgcccatgccgttcggtcatattgtttttgctgctaggctagcaaaaactgatgaacatgtggaatgtattaccgaaagagtggatctatctatgcgcctgctagatttgtacaactcataacagcgaggctactgcaggatccccctcggtccccaacgtcagttgtaccatgctgggcagtgcagctggatcgcgttgggggtgccactggtgatgtctacagaagctttgcgccgtggtttagtacatccctttgaaaacaggattcgtccggcagatgcttgcgccatactcttcatactctgcttttgtgtggcaagcctggttgggaaaactaccagaattagctttaatttctaaaatggaaaaaggaaaaagaaaccccgaatatggggatatattccaacaaaaaaatttaagctttggaaacaacttgcaaaagtaaacgctatgcactagtttcaagtgatatgagtgttcattactactgtacatagaaatagaagtttgaatacctcgtagaattcagcggtagaggcaagcacagaaccaccaaaccagacagcatatctttgaataggatggctaactacatttacttctataggttgggcctgaaataaacagaatgtagctgtagcttccaagttccaatatcacaataaagtttctggtttggccagtgttcttctgcaatcaggagagagccagagcaaacatgaaaagtttgtacctttgcatctccaccaagtcgagcattagatgcaaggactcgtgcatccactatcttttttaggtcccgctgcagcctcctgtggaaatccttaaacatagttgatcccccggacaagacaatattctgtccaataaaatgaaactcagaaccactgtgatattttgaatcataagacggcattttgataacacaaaccttataaagagcccttcttgtgtcaattggggatgattggatgcacttgtcaataactacatgcaaaggagtggtgaagtcattgttgtaaatctcagggtggaagaaaatctgcatggttcacagcaacgtggggaaattagattaaaatgatagtgcaatcaaaatgtttagttagaaaatgcatcagaactactagagatatcatgtacaaagcagttatatttatgaacataaagcctgaactcaaactggtttatccatgaattggagttaaattatgatcgcagttaagttttgaacctaaatcaaatgttacattgtagaagccacagttaatggtgaacacattaatgcaaaatcaattacctcaggccctaggaagcgttcatatccaatgtcgcaggtgtatttggcaccagtttttggtttgatgccactccagtgctttatgtacttattgggctctctgtcatgcttattaaattcctaaaaaggcaacaataaagttatattattatttttcttttcatctcttagggactctattttttgtcgtacaaataacaaagtcaatggttcaaagctgggaagaaccgagacaacatattcgatactgaaaacaatcaccagttgcaggaaaaagtgaatcagaggaaagcagatgcattgtttgacatcaagcatgctggaacagtgctttacaaaattagattccaggcagggtaagccttaaatgccaatgcctaggctgctataactgtgacagtcagtcaactgcaatgctattatgaggtaaaagcaatccttccttttgaagtaacactcatcctagaataaacgagaacatatactatccatgtttcaataattgacagttcatgtatttattgtagtagttaataccttcacaatatctgaacatgtatagcagtacatttctttcactctccttgccacatcaaaagattcttctggtggaatgtgctcacctctttcctgcaagaactaattggctcagtgacttataagtgcactgccattatgcagattcgctatataaaatatgaaaatctcaagaaaattatgaggtaaacttgttatatatttatatatcctttcttgatatatcacactcccaagtcccaagtcaatttcacatgcaggttaaatggcacaagaagagaagttgtctctctcatcacatacaggtaacgataatttcagcttgtcctctagtcttaaccatgtgtattcatttgttcagaatgatatacttgatatgcttatttgacaaccacggtgaggtgactcaaataatctcaggtgtgtttacaaaatttgccatggcgcatgattgcagctgcaggctggagttgcttgtaaaactttgagtggaatttattgtgcatcattagataaaaattgacagttactttccaccaattctacctctatttcatgcattttatccctttcattatttgtggctgttattttcatgaatctttgatttccttgtgcagttatgatggacatttggactctcaaaggcatagatccacagtaatgtaagatcagtgacatctgttgacaaatagaaggttaagtactatcttgtgacggcccacaagaaagcaatggtaactacctttaagagttgctgaataaactgggtaacatccttgcctgtaattggaattgatctgatgctgcttcctataacataaccatcagcaacaggaacaatgtgggtagccccatcacccacatcgactacaacacctgtcatttcacactgaaaacaaagcatgaaattcctcataaatatatctctcaacatagacgaaaggaaaaagaggggcaaataatgtagtacttcctccgtcccaaaatagttgtctctttagggtttaaaatttatcccacaatacttgtcacttaagagtactatatgtccaatcaatcacctcctattcaaatttctacacattctatcctcaacaacctcacaattccattcaaatgagaggcactttagtctttgattgctaaaccttaatttgtgctaaacaaaccagaaagacagtattgtgggatggaaggagtattgtagagcaaactaagcacaactacgaagctcaagagtccatgcatggctagaaataagatgccaacacaatgagctttcaaatgaaacagaaaaaccactatagaattaaaatttattggaaacgtaaatatttcaataatgtagtctctttcacctatcaaattaaggttaagcagaaatattgcatattgaaagcgtgtaataaaacagttcaactacaacataaacatggccttgagaacgaaattcatgttctcatctcaaggaattcttgctctactaacctttgtggtggtgtatcctgctgcgagggcaagaaccggctggcacgctatgtacagaccaggcacattgaaagtctcaaacatgatctccccggtgtactcgcgggtctcgggaggagtcagggggctctcggtgagcagaaaatagtgatcctccggatcacaccgcaggtaattgaaaatgcactgctgccagaacctctccatggtgtcccaattctcaacctgaatatctagcccatatcagcttgagtaaatgaagctccgcaaactaagatagcaacgcagagtgtcagaagaggaaattaacgctcgctcgcgcgcgcgcgcacaaacctggccattgtgaattggatagctgaggttgtaggtgttgctggagcgggagcgggccagggcgtcctccccgatgaagaagtcgagatcggccatgacgccggcgctgtgctgcgccatccagttccccttggtggtgttggccctggtctggccggcgaaggtgtcgttgacggcgacgacggtgggggtgatgaagcagggctccacgttcccggcgaaccccatcttcgtgtacctgcgcgcgcgcgccacccattctcatcacccgcctcagattcgccgcggcgcacgctctccgcgcgcagatctggaaagagagagagagagggaggcttacccggtgccgttgtcgatgacgacggcggggcgggaggcggcgtccatggcgtcgcgcgtggtcccaccgcaccgcggcggcgcagtcggtcagtcagccagtcagtcaccggcagcggcgaggcttcccccgtccgctttaaccaccaccggccgcggccgcaacgcggggaagaggaggcgagagcgggtcggcgtcgcggcgggcatcccacacccaccgccactagcttctgccgcccccagcagcagcagcagcagcaaccacctccacgcgcgcccgaagcggccggcaccgaccgaggaatggaagcttgtagaagaagcgaggtatcggggcggcgcggcgcggcgggaggagaagggagtgagaggggggcttggcttttgcttttctcggggtatcgtgggatttgtctcggcgtgcgtggtggtttccgtgtttggcgtcgtaggcgtaggctctcgcacgcacacgcacgcacgcaggctgcggcggccgggagtaggaggagacttgggggacgttggtattggtgttggtgttgctcctcctcggattggtgtggtggtgtggggttgtgggggtggggggcgtgcgggatgattgcgacaccgccaccgacgccaccgtgtccactctgcggtctccggcacgggtgtgggcgccactgacgtactcctacgcagggagttcccggttgagaaatgtgggtcccatgtgacagagggtgatcgtttttttttcccccgttttaatgccaaccgttttagctgatacctgaagaaaatgacccctacttggcccgatttctgcccgtcattcagcaatacggagtacttcatcttcagaaatggagtaagttaattttgtccacggatatagtaataagatatgtcacatatcatactagattaacttatcttaaaacagataaattatattttgcccatcctaaaatgccaatttctatatgtcattcggtaattcttcctcctagaccatgcagtactgagtttcaattttaagatggagatagtatgagttattttttcttttctgcggcagaaattgataataatgagtaatgaagagttatagtgatagctacttggttctgccaaaataaaacaatgcttcgttgaagaccccaaacaaaacacaatgagctttcctaatccctccccaagaaaaatgatcctccgactcctccgagtgcgtgccgtggacacgtacgaaatcaaatgccatagcgtacagagctcgcacggggagacgttgccgaggctcgtagggataaaactagctctgcagctgctcttggccccaggaaaaaaagagaatgcaaccgcgcgtaggaaaggctcgaatttttctctctctgttttttttaagctcatcgatgagctccagaaacaagagattcttctcgtaggacatcttgagaacactaatgaaattcaaccaaggcaaagagaggccaaatggtagaggtgtccaccaaaaatttcctactatctttttgacctgtctgtctactctgaaatgctctgacatgaggcatggcctatatatccattgctctagccacaactgctcagtgttacggtgcaaggtaattaatttgcagaggcaaagcaagatgaggttccttggtctcctgagcttggttgctctcatcttcctcctcagcttcaggtctctgattcatcagcaagttcttgttggtaagttttactactactactaactttctgccagcttttatgaatgctactgcctatctgaagagcattcagtgagattgctactggagggaagagtatgaaactgatcttgttctttccgtggaaggagaaggcgcagcagccagcgggttcctccatggcagcggcgacgacggaaggaggcagcatgcgagggagtgggaggaggagaggaagaagatgaggtggttcatggtcagggactacgcccacgcgcggcgccacgagccgaggaacaaccggctggatccttagcgtgatgttgatggcttgatgccttgatggcgctggatataatggctagtcctaagctcatgtttaatctgtcccctagcaagtgtgcagcaattttcacacaaattttgcaacccctgaccatagaattcccttatgattgtagaaatagttctatcttttgtgaggttttgtaaggagtattcaggttttgtagttttgaaactgttttagtatatgttgggtaaaaatacaagtcttttttatactttctagttcccttttctgcattcatctttagaggtgtttgcagattgtaaagccgctggtgaacagtagtactgatcatggataactaaactgcagcctgatggagaaatggtaagcaaagattagtgtccctatagcactgcaaatgctccttaattattttgggttttaggattttcaaagttcgaaggagaaatgaaaatgatcatgagggaacttcaatctgaatatcctcatttctggtgccaccagtgctatcctacaggatgtggcaatctgaatagtaaaaaaagtgtcattgatgttagtgaaatgcaatcacatggttcatctagggctccgtagtacttaggagtcaatgaagacttgaccaagggttgttcacacaaactctaccggtaattattcagatggttagtacggcttgttttgttagtcgtagactcgtagcttgtatatagcatttgtcggtgaagcagctaaaactgaggtctacttacagtacctgggcttgttgcaactcagcaactgatagtactacataatactgctagtactgatttacgcatgatttatgcattgatagacagaagggagtagtactttaatacggctactccgctactgatttatacattcttcaaagttaggcgtgaaaactcatggctgcacttattatgggatagaggtagtagcagttggatacacatgtactaatgactagtacgggccgaactctgcactgtacaaatgtatacaagctggttggtaaagaactggccacacaatttgattgcggtttgcaggttgcaaaatttcagcatttcctcctctcaaaaatttgcaggagcaatacaacaaaagaatgtcctcccagactgctaaatccttttttcctgaaagaagcttatacccaaaaaaaaaaaaaactatgctttgccttcctgaacttgtatcaaatctgtattttttttttccttctatctatctgaatctggctgctctactcctactgctgctgttgtactttgcccatgacttctgcactatctccggcgctggcaccggcctcttggcccatgcagacatcaccctagctctcatcaccttcttcacaaggagcttccatgtcttgtccactttccctttttccatgttagtcttgaagttgctggagcaaagggaagaacgtaaacaaatgaacggaagggttcattattagcttttgacatggcaatggcatgtggcatcaatcaatcaatctatctatctaataatatgtatctatctatctattataaaaacaactagaaaaaaagggtacaaattacttaggtagtcagagaagaaggaaaatatttgattcattagatcttggtgggtgtagattgatcgtatacaatgtacaactgtatctatagaacataaaagttaagagttgtgtgaaatatatttcatttaaatttgtggagtagaaaatacagttgtatctattgaaatggaatataatttaagtgttatatatatcaaattcagtcataccttaaaaatctagccttaaaaatctagcaccgtgtcatttgcaaggaccatcccaggttttattaggttatattataaaatagcgccgaaagaaggcatcatgtttgttgtatagacttagaaattaccacattataatagaaaaaagttagccgtaagatcttgatggaccaaattataacagtgtaaattgatagctatgcaaagtacaattgtctatatatagaaatagaagaaatgagttaaatattaaatttaatcctacttttaacatccatatagtactccagtatatagagtaggagtttagagtcgtatacgatgaatccaattcaacaaacacgtactgtaaatttgtacggggatatttcctagctgttcttcatgtgtgattatcctttatttttgtttattgtttacctgcaaaggggaactccgcaagaatcgtcgtcggacttgtcgcagacggaggagtgtagccggaggagcaggaagaagcgccggcagggcgtgcagcctccggcgactctcctgccgcagccggcgaagaagtgcctcgcgagctgcaggaggccccgccggtgcgcgcagggggaggccatcctgcagcactggccggtgcgc

SEQ ID NO: 1875 - DNA, 1692 bp, Oryza sativa
tgcgcggtgtccgtggactcccactagttggtatagtggagttcattttacatgggacatgtaggtattttagggatcggttccaggcagttcttccctatatgccgaacaacaacattttattcggaactttcatgcagaaaaagctagaggagtggcgtaaaaaggccatgaaacatcgagctctagtgcaaggtacccaacagcacaggtttgagatactctgtcaagataaggcaggcacgggtatataccgcaagagagtgaagcaggaatgtgttctcaaagccgacggcacatgtcattgctcatgtgcaaagccgaagctgctccacaggccatgcacccatgtcattgctgcggcatcggagtgtggcataccagatggagtatatgtgtcacagtactcagtaagcaagcaatatatcatacatggagtggagagatttatggcttcagcatagctggggagttcacagagactaacgatcaagtaatcaatattcctgacccatcgaagctccgaggtaaggctggaaggaggaagactcgtcgcatccgcaacgatatggacgagtcggaggcaggcagggtgaagcgctgcagcaaatgagatgaacgtgggcacacctacaagcattgtcctaaagacaaggaaaatccaagtacggcggaggcaggactatcaggatcagcagcagatagagctcgccctacgggtgaaggcactacctcaacttgaccccgtcctatacatcgttgtgccacgttcggctacgtggtgtagttcttgtgttatatgttggcatgtggctttgcttgtaatttggttcgaacttatcgatgtgtttatgtttcgtcgtgtaatgtcagacttcggcatgtaatgtctttaggtcgcatgatgtaatgtcagacttcggcatgtaatgtctttaggtctcgtgatgtaatgtcaaacttcagcatgtaatgtctttagttctcgctatgtaatgttagacttcggcatgtaatattatgttctggtatattattgaactctacttatatgttaaatcgcaccccccttccacgagtaggcctcttgttgtgcccccccataggtacttaaaaaaaaccacactacatcgacaatcaatttacatgcattttatgtcttagcttacaagggtctcgttgtcgatgtgtaggtttcgcccaattcactacgacacaggccacccacttctcccaggctacagggtcagcgtctcaggcagttgcatcgacctcgcactctgcacagttctggcagtacaccgggacttcgtcacaggcagccgacacgtcgagtcggggtccaccactggaccatgccgggacctcgtcgaagtacagggtggcttccgccttgctcttcgacatgtgcgacttcgacttccaggtcacgacagaggacgtcatcggcccctcacagctgggaggcgcaccgccggtgcagacgcaggactagtcgccctccactccgcggctagacactcgtgctacccgtgttgtgccactggatcgtttcacgtactcccaggaccacgtgcgagaacaggcccggaggaccaagcttggttgcggcgcggggcagagccagtagagtagacttctctttgtttatttactttacatgctagtactgtatgcttgtataatgaatac

SEQ ID NO: 1876 - DNA, 15085 bp, Oryza sativa
acatgcatgtttgcccttcttcatgtagcatcttgcctgtaatggttgggatgaagcctggtataaatctaaccagggctaacgtgccatctctaagagataacacgctagctccggcttgagacgagtgcctagaggctttcgtcttgacgggatggggcaaggcgtgcgtcagaccgccagtcgccacctaacccgtgatctgaccggtctgtgactggtcacagaccggataaaggaacgcgctgcactgcgctgcatgcagcgtgacacgcttgaccagactgcaataaatgtggttaggtgagcactaccgtgttcacctatcccatatatgtggcgcaaacctcctcaaggggtcggggtgcctcggccctcggggccggggcaggagtaacccgacccccctcggggaaatcaggaggagagcggacacctcaccctcgggcccgacgtccccgaaggtgccaggccacgtgggtgattgtgtctgcctcaagcctcaggtcacgatactcccggtcccatatcaccgacagtagcccccggcgttatgccagggcgatcgcccttctcaagggaagcggtcgggcgtgacgccactcctaaagcctggtgacaggtgggaccggtctccatggttgggcagaaacccaacggtctcaaatcatgcacatcggtaatggtaatcttggctgtcaataatgggcggtctcttcaagactgccacatcacttgagcagcgcacgaatctgggcgagccgatttgcttcgcctggagatatggcaacgtcgcttcgatcggcgagcgtaattaacgcgcgcacgatacgatctgcctcgactgccacaaccgcatatccacctcatgcgccgcaagcgggcgaatgggattagtggaagcgtgggcacgagaaacaagggagcgagatagtgagaaacgagggagcgaaatagtgggcgcgagaaacgaggagccgggctcatcgatggcaagggtataaagataccgaggaaaagatttgctcccttcctttcgccattattccccttgccttcgccgcttgagccctaactctttctctgctgcaccttaccttcgccacacgcgctcgttctcaatcatcccttcctccggcgccatggcacggggttccgctctgctcgacggtagcgtacttccgccttcccgcatcgtgagcgagaggcatgccgggctgccgcgccacttcatgccggaatctgccaccggccgggagatagtgatgctgggcgagggacgcccggcaccagactacccggggcggtccgtcttcttcctccccttcgcaatggcggggctggttccgccattttcttctttctttatggatgttctggagttctacgatctccagatggcgcacctcacccccaatgcggtgatgacattggccatcttcgcgcatctgtgcgagatgttcattggggtgcgcccatctcttcggctgttccggtggttcttcaccgtgcagtcggtgtcgccgccgtcggtggttggtggctgctacttccagccgcgggggccggtgttgaaccgctacatcccctgcgccctccgcaagaagtgggacgactggaagagcgactggttctacacccccctcgccaacgaagcgcgcctccgacttccaagccagcccccggcgcaggtctccagctggcgggcgccggtagatctgggggatgattatgacgccgtcctcgaccgcctggcgggcctgcgatcccaggggctcacaggggccatggtgtacggcgactacctccgtcgccggattgcgccgcttcagcggcgcgcccggggcgcctgggagtacaccgggtctgaagactacatgcggacccaccagggagtcagatgggattgggctcccgaggacttcaagatcgtggtccaaagggtgctgaatctcagctccgtggaggcgtccctcattcctcaaggaatcctccccctctgcagcgatcccgaccgcgcctccattctgaccattatgatgggggtcggggcctcagaggaggaaactcctaagggccacgacggcgcgggcgagagccgccggggggaacaatctaccccaggagggggtcgtgcttttgggccccgcgtcgggggctcggggagcagccgccctgccgacgcctaggggaagaggaagctgggaggaacaccttccccatctcctccccgagggggcggggcggtgcgtgccagcagtcggcgcccggagggggccgcgccgacatcgcagcccgagggggagcgcaagaagaagcggctccgcaagatgggggagacggaaccatcccggggaaacctaatttcccctccaaggtggtcatttaaccgaccccctcgcaggttcgtcccactctcattgcgaccgtctttcttctatcccaaaagcaagttttctcttacccatcttgtttgtcttctggttttttcttctgcttcagcgatgtcccgtcgcgttcctcccgccatcccaaatccggccagtccgaggccgaagatccggcggccgcagaggaacggaggcgagaatctgaccggtgagaggccgcagatcgccttcgggaagctgaagaggccgcccgggaggccgctcgggttcgccatgcagaggataccgctcgggaggaggccgcccgggctcgccaagccgaagaagccgctaaggaggaggccgcccgggctcgccaggctgaggcgatggcgtcttccgaggcagcccacgagaaggctgctggcgcgtcgcttgggcccactccctcgggcgacgctcaggcgacagcctccggggcggctcgcgacgaggccgcgggcgcatcgcctaggcccacttccccgggcgacgtccaagaccaaacgggtccgggggacatccccgagcccagcgcgtcctccggcgggccgagccgcgtcgcattctctccaaggcggctcttctcctcgtcttctgtcgccccgctgagcgccgagccccttctgcaagccttgaccgccgcaaacaccgcggtgctagatgggttcaacgccaggtggaggccttgcaagcggaacgagcagagctcgaggccgcatgggcgcgtgtcgaggaggggcggcgctcggtggatgtcatggtggaggtgggccgtaaggctcaccgccgtcacgtctcggagcttgaagcccgctaagcggcactggcggagatcgcccgagaggtggaggaggagcgggaggccgccctcatcgccaccaccgcgatgatcgaggcgcaggacagcctccaccttcaacacgggagctgggaggcggagctaaagaaaaagctcgacgccgcccaaggggtccttgacaccgccgctgcccgagagcggcgggcaacggagatcgaagcggcgtcccggcggcgcgaagaggcccttgaggcccgtgccatggcgctggaagaacacgccggcgccgtggagaggagcttggcggaccgcgaggccgccgctgctatccgggaggcaacactggcggtgcacgaggccgcctgcgccgaagaggagtccgcgctccgcctccgcgaggacgcaatcgctgagcgggagcgagctctccaggaggccgaggccgcggcgcaacggctggcggacagcctgtccctccgcgaggcagcgcaggaggagcaggcgcgccgcaatctggaatgcgtccgcgccgagagagccgcactggagcagcgggctgctgacctcgaggcgcgggaaaaagagctggacgcgagggcgcgcatcggtggggcggctgcgggcgaaagcgacttagccgcccgcctcgcagctgccgaacacaccgtcgcggacatgcagcgcgccctagactcatccgccggggaagccgaggccctccgcttggcgggcgagatagggcccggcatgctttgggatgcggtctcccgtctggatcgcgccggtcggcaagcgggcctctggaaaggccagacaatgacgcactccaccaatctggaaggcctcgctccgcacctcacgaagatggcctgggctctccaacaactccccgaggagctcgagaagaccgtcaagtcatcctcgagggacctcgcccaaggagcggtcgaactcgtactagcgagttaccaggccagggaccccaacttctctccatggatggcgctggatgagttccctcccgggaccgaggacgacgcgcgcgcgcgggtccgggatgccgccgaccacatcgtccacagcttcgagggctcggcccctcggctcgcgttcgcccccaactccgacgaggagggcgacgccagcggtgcagacgacggtgacgacgaggccggcgacccgggcgcaacggaatgagcccccaggcccccgccaatctccagttttttctttttctttcttctaaggccttcatgcctcttttttgtatagatcaacttaatctgcaatcaaaaatgatgaaaaaattctttgtgtcaatttttttttgctatgcgtatgagatgaggatgatctgtgccgtggcccttttgcgtcttagcttgatttaagggctcgtgctcaagtcccagtcctcaaatggctcgggtcggggctagtgcctggggagatccacatgtcgagactggccaggccgggaacgtggtgaccgagggttatgggtgacccgattgtgggtttttgccgattccccccccccccggagttcaccacgccccggggcacggctcggttctgggccccgtttggcgattttagctgaccgaaccgagcccccgagggcaaggttgagcacgagtgaccttatttcaagtcaagattcttcaaaagaaaaaaacgacatagacacagcctttaggaaattgaaactgcttttattgaaatgctgaaataagagaaatgagaatgtgcatgtgtggtagcccccggccaaccctgcacacccgaggggggtgcggggttggcccgagcccgaaacctgacacccgacccccccctcaggggtagaagcgacgaaggtgttcgatgttccacgggttaggcagctccgtgccgtcgcccgtggccagccgtatggagcccggccgggggacaccgatcactcgatacggaccctcccacatcggtgagagcttgctcaatccagcacgcgtttggacgcggcgtaagacgaggtcgtcgacgcagagtgatcaggcccggacgtggcgctgatggtagcgccgcaggctctgctggtagcgcgcggctcggagggccgcgcgccgccttcgctcttccaagtagtcgaggtcatctctacgaagctgatcttgatcagcttcgcagtacatggtggcccgaggagacctcagggtgagctcggatgggagaaccgcttctgcgccgtagacgaggaagaaaggcgtttccccggttgctcggcttggtgtggttcggtttgcccagagcaccgctggcaactcctcgatccaagaatcgccgtgcttcttgagaatattgaaggtcttggttttaaggcctttgaggatttctgcattggcgcgttccacttggccattgcttctggggtgggcaggtgaggcgaagcagagcttgatgcccatgtcttcgcagtagtcgccgaagagttcactagtgaattgggtgccattatccgtaataatacggttaggcactccaaaacgggccgtgatgcccttaataaatttaagtgcagagtgcttatcgatcttgacgaccggataagcctcgggccacttagtgaacttgtcgatcgctacatacagatactcaaacccgcccggggcccgcttaaacggtcccaggatatcgagcccccagacaacaaatggccatgaaagtggtatgatctgtagggcctgggccggctgatggatttgcttggcgtgaaactgacacgctctgcatcgccggaccagatcgactgcatcattgagagctgtcggccaatagaatccttgacgaaaggccttgccaaccaaggtgcgcgaggcggaatgggctccgcactcgccttcatggatatcggcaagaagctcaacgccttgttcctgaggaatgcacttcaggaggattccgttagccgcgcgccgatagagggtcccttctaccagcacgtagcgtttggaaatgcgttggacgcgttcactcccttcgcggtccttaggtagagtcttatctgtgaggtatgcttggatctcagagatccaagcaatcaatctaagggagcttggagcgctcccttcgggtcccgaggcctggactccgacgggcctcgggggccggtcaagcgcatccgtctcccctaaggggttgggtcgcgccgacggctgggtaagcctttcttcaaaggcgcccggtggggtctgggctcgcgaggacgcgagccgtgagagttcgtcggcaatcatgttatcccgtctgggcacgtgccgaagctctatcccgtcaaaatggcgctccatgcgccgtacttggcgcacgtaggcgtccatctgcggatcagagcaccggtactccttacagacttggttaacgaccagctgggagtcgcctaataccaggaggcggcggatccccagtccagctgccactctgagtccggcaaggagtccctcgtactctgccatattattggtcgctcgaaagtcgaggcggaccaagtatctgaggacgtctccgctcggagaggtcaacgtaacccccgcaccggcgccctgaagagatagggagccgtcaaactgcatcacccagtgggctgtgtgagacagctgcgaggggtccgtgctggtctcagggatcgagacggtctcgggagccggggtccactctgccacaaagtcggcgagggcctggctcttgatagcgtggcgtggttcaaagtgcaaatcgaactcagaaagctcgattgcccatttaaccacccgtcctgtaccctctcgattatgcaagatttgaccgagggggtaagacgtaaccacggtgacccggtgcgcctggaaataatggcgcgttttctttgaggccatcagaatagcgtaaagcatcttctgggcctgagggtatcgggtcttggcgtcccggagggcctcactaacaaagtagacaggccgctgcacctttcggcggggccgatcctctttgctaggggccgtattcccggggcgttcttcgtccaagtggcctctcggggcgcactcgtcttctgtgccgatgacctcggggtcggaggatgacaggggcggccttcccacagtggcctcggggccgtcctgggggtcgggggctcctggcgtcgtcggacaagcgggcaaaaggccaactccggtcgtcaggggccttaggccaccgttcggctcgggggcctcttctccctgcttcctcccgggtcgagtcagcacagggttagcctcggggtcaaagggtgataggtgcggccttcccgcagtggcctcggggccttcctgagggtcgggggcacccagcaccgtctgacaagcgggcaaggggccgactccggtcgtcgggggccttaggccaccgttcgactcggggacctctcctccctgcttgctcccgggccaagtcagcacagggtgggggtgcgcggaatgaggattgtcctcatcgcgctccacaaccaacgctgcgctaactacttggggggtcgccgctaagtaaagtagcaggggctcatttggctccggggcgactagaaccggaggagagctgagatacgccttcaactgggcgagggcattttcagcttcttccgtccaagtaaacggcccggagcgtttgaggagcttaaataagggtagcgccttctctcccagcctagatatgaaacgacttagggcggccatgcaaccagtgacgcattgcacatccctaagtttgctgggggggcgcatccgctctatagctcgtatcttctcggggttagcctcgatgcctcgggcagagaccaagaacccgagaagcttgcccgcaggtacaccaaacacgcacttatcggggttcagttttatgcgggcggagcggagactctcaaaagtttccgctagatctgagagtaaagtctcttggttgcgcgtttttacaaccaagtcatcgacataagcctcaacattacgccctatttggctacccaaagaaattcgagtagtacgttgaaaagtaggacctgcattctttaacccgaagggcattgatgtataacaataggttcctacgggggtaatgaacgcagttttttcctcatcctccctagccatgcgaatctgatggtaaccagagtatgcatctagaaaacacaaaaggtcgcaccccgcggtggagtcgacaatctgatctatgcgaggcagggggtaagggtccttaggacatgccttgttaaggtcggtgtagtcgatgcacatccgaagcttgccgttcgccttgggaacgaccaccgggttcgccagccactccggatggatgacttcacggatgaatccggcctccagaagcctcgccacttcctcgcggatgaaggcttgacgttccggggcctgccgccgcactttctgccggaccggccttgcgcccggccgcacggcgagacggtgctcaatcacctccctggggaccccaggcatatccgccggtctccatgcgaagacgtcagcgtttgcccgcaggaaggagacgagcgcgtcttcctatttgccatccagaagaccaccgatccgtgtggtcttggatgggccgtcgcccagggcaacctccttgaccgggacctcgtcgcatgtgacaatccgctgcctcggggcggtgggggcggaggtgccaagcctctcgtcaccaccctcgggcttggacgcagcagcgaggtggtccgcgcgctgctccatgcaggcgagcgcgactttcaggtcgccatggacagagatggggccaccggggcccggcatcttcatctggaggtaggcgtagtggaccgccgccatgaacttcaccaacgcgggcctccccaggaccgcgttgtagggcagactgaggtccgccacatcgaagttcacccgctccgtgcggaagttggctgatccaccaaaggtgaccggtaggtcgatgtgacctaacggccatgtgtgccccggcgtcacaccgataatcggttgggacggctggagcaccatccccggggccttgatggcatcaaaagccgcgggggaaaggatgttgagggccgctcctccatctatgaggacacgccccaacttcacgttgcagatggtgggggaaaccaccatcgcaatctgccctccccgggcaacgcacggtgggtggtcggtctggtcaaaggtgagggcaacctccgaccaccgcgcccgacgcgtcgcctcatgagtaggggccgcggccagaagctctcgcttcatagccttgaagctccggcgagaaacgtgagcacacgctcccccatcgacggtggcaatggtggccccaggctcttggaaacctaggtcatcatcgccatcatcgatgtcctcggcgggggccttctgcttggcctcttttcgccgattgccggaaggaaccgccggagacttgccctcacggcgttcctgcctcctgtcctcctcccacttcctcgtccgctcagccaagcttttgactgcgcggcaatccgcgagatcgtggagggaggtgttgtggacggagcaccacttgccggccgggcgctccctgctgggagcaccagcctttttctctttgtcgctcgcaggcctcccctttcgggtggcccgcgaagcgccctcgacggcgaggacatgaccctcgtcgccggaatggaccgacctcttcttcctcctcctgtcacgccgccctatctgagcggtggacccgggggcggccgaagctgccacaccggaaccggaggggttccaggtccacgcttcctccttacgagccactcggtccgcgagctgaaaaagctccgcggtagtctggggctctttggaagcgatcttttcgagcatgcggttgtgccgcacaccccccctgaacgcgtagatcaccgcgtgtgcagggatgcatggtatggtattgcggacttggcagaaccgctgaatgtacgagcgaagtgactcatcatcccctcgctgtactgcgtgcaagtccgcttcttcacctgggcgcggataagtgccttgaaagttcatggtgaactgttggcacaaatcttcccaggagtggaccgacgcgggaggcaggttcattagccaaccccgcgcctgtcctttcagggccatgggaaagaaattcgccatgaccctgtcgtcacccccagcggcctcaatcccggtcgtatagacctggagaaactcggtggggttgacgctgccatcatacttctcggtgatggtgggccggaaccttgggggccaacggacattccgaagactcgccacaaaggctctacagccgacaccaccaaccgggggcacggagggctggtcctcacgtccatgtcgaggtgacactctggacgaagaggcgccctccgttgcgcggggagtacgccggctattacgccggcgctcgatgtcgaagcgggcatccggctctccatgctgatcctcccgagtcggaggcgccgacgagggagtggcagccgaatggcgtgcaacagccgccgctcgccgcgccctccgcctgacgacacggagccggtggtggcggcgccggaggtcctggtggtggcggaccgtccaccagcacccaggcgctgctgtgccgtcatgaccaagttggccacatcgtccagccatcgctgggctggagactccgggtcagggacgacgggcgggtgacgtaggagcgcgccagcagcctgaagcgcgccctgaggcgtgctgccgtcgcagtagacgagtaggcgacgctccccatctcgccgttctcctgcatcacccgcgactggtgatgctgcggatttttcgaccctctcgagcgcctccccctgcttaggactttggtgtggaggaggtgggggagtacgagctcgacggcgtgggtttggctccccgtcgtcgccgctcacactcggagagaggtcgtgcgcctttgcttgctcggccattaggctgaacaagaaaaacttggcgcacacggaagagtgcgagagctcagaaaacacacgctgagccccctacctggcgcgccagatgacggagctcgtggctcctcaccgggagaccgctctggcccccctttgccggttcggccgggggcttagggtgaaatcccaagctctctcggtatgtggaaagatcgcgagccaggaaggaacgcgagacacgggcgatgtatacaggttcaggccgcccggaagcgtaataccctactcctgtgtttttggtggatctgtgtatgaacaagttacaaagtatgaaccagcccttccccgctccaaaagtccaagatccgttttttttcccctttctaagtgggcaaggtcctccttttatatctcaaggggataccacatgcacctctccctttccaaactggacttttcttctcttcataaatggacggagatcggtacggttgctgtccgagtgcccttctgacgggacggcccatacctacccccacttccgccggaaacaggtgcgacgtgggattatggctgtctgttgatgacgcgaccagtgtctgaccggtcacaaatcagtcatccttgtccaccacgtgtcagctgggcaaacatgcatgtttgcccttcttcatgtagcatcttgcctgtaatggttgggatgaagcctggtataaatctaaccagggctaacgtgccatctctaagagataacacgctagctccggcttgagacgagtgcctagaggctttcgtcttgacgggatggggcaaggcgtgcgtcagaccgccagtcgccacctaacccgtgatctgaccggtctgtgactggtcacagaccggataaaggaacgcgctgcactgcgctgcatgcagcgtgacacgcttgaccagactgcaataaatgtggttaggtgagcactgccgtgttcacctatcccatatatgtggcgcaaacctcctcaaagggtcggggtgcctcggccctcggggccggggcaggagtaacccgacccccctcggggaaatcaggaggagagcggacacctcaccctcgggcccgacgtccccgaaggtgccaggccacgtgggcgattgtgtctgcctcaagcctcaggtcacgatactcccggtcccatatcactgacaaacgtaatatcttgttatgtatgctaatgtaatggtaaagtgtatatttaaaactagtagatctacgcagttaccgatatctagcaatacgcagttctagattaatacaactaaaaccctagaaaatataatgcatttattcaaacaaagttttaaaaaatacacagtagttaactcaatagtcaaaaatataatgcatctatgaatattacatgaaatcggagtctcgaaccgacagagcttcgcctcttcttctcttctcctcccccttcttttttagagtggaggtgatgggaggaatgaggagggagggctgggcggcaaggggcctccatgcaaaaaagccagcccaggccggcccctttccaccctagcagtgggcggcaagggtttaatgaaaaaaaaatttcgatccgccgtcatcgcctgtccctcccctgtttgccacgtcagcttgccatcctagtggagggcagcaaagtctatttttgtaaatttttccaacgataaattatttatgtaaatattaaaaaaaattaaaaatgaaaaaaaattcgatgaaataggcggactggcccaagagcagcagcaaactcaacgacgggtcgatggctgaaggcccaaaaatccactcgcagctacaacgtgtgtggcccaaatccgacccggacacgcgggagaggccaagtccaagtccgaggccgcagcgcgtgcgcgtgggagcccgaagcggcgtgggatcctgcggcaatccgtgccggcccacgacggatcagtgcacattgtttttgtggtcgggagtgtttgaaaggagggaaaatagaaggtggagaaatacctaaaacgatatgagtcatcaacacatgattaattaagtattaactattttaaattttaaaaataaatcaatatgattttttaaaacaactttgctatagaatttttctttctaaaaacgtaccatttagtagtttgtgaagcctgcgcgcgaaaaagaggtactgtctctctcaattaccctggaacgagagagcctcgtcgcccatgcaccactatcaactattttgaaaagtttaatattacagtcaaccgttagctctaaaattgatatatcatctgctgtcaacctaatagcatatttgtataatagttttatataaatataaattgcaccattagtacttggctcacatatgtaacgtgtttttcatttctcttctccatggatgtttatagctatttataatatgttattggacttattattagttgatggctttcttctctctcatgctttctctctcctccacttagcttttttaacgtattaaatttagaaatcaaaacaatatgaatatatttatgtttatgtatcttcaaaatcaatgttaaataaaactattagcactgttaggcggttttctcttggaaatatcttttttatgtgatatcttattattattactttatttttagtaggctggctgcatatatttaatataaatattaaattaaactaaaaaagaaaatctcgtagtattttgatactaagatgcgattcatgatcatacttagacttatgatcatactcccgccgggccaaaaggagcgacaaaatatgattgattaagtatttactaatttttttaaaaaaatgaaaatgtaatttttaatgtaactttcgtataaaatatttatataaaaaaaatattgtttagccgtttgaaaagcgtgcgagcgaaaaacaatggacacagcctaaaaaacaatgggctggtttggtttgtggcctaaataggacttactaaattttgtcagtgtcaaattttggtatgactaattttgataaggcaaagttgtgcttggattgaagccaaaataggctaagttcactattaaaatggcctattttcttaggcatgaaaaacttagcttcaaaccaaatagatattaaacactatattaaaattatcaaatattgataagtctaatttaggtctcaaaccaaaccagcctaaagatcctgataatgaccaatctggaccgtgcgtgttctggaaaggaaaaagaacattttccgctgttccgcctaatgagtctacgcgcaggcggcaggttagttccaagagaaaatgtcgatcaataacgcggattctagagtaacgcggattccagactattcctccgtggtctactttatccagcgttggaaacccgctcctacacacacacacacccactaccgctctccgcaattcagccagactgcagttgcagcaacagcaaggatggctggtggagtcggggaggcgctcgtgtccgccgtgctgaaggaggtgctgggaaagcttggctccgccgtcggggaacagatcgtgatgcgatggaacctgaagcaagatctggagagcatcaagagcaccctgggtatgcttcaagcggtgctcagggatgccgagaggcgctccgtgagtgacgaaggcgccagcctctggctgaagaggctcaagaacgcggcctacgacatctccgacatgctcgatgaattcgaagccaagttatcggaggtaaaaaagtgtcctcccgctaggatgtcgtccttcacttcagttttatgcttatctatgctcctcccgtcaaaaaagagttgacatttaggacaatatttagtagtctcagctagattccctaaggctttgttcggtttagagggga

SEQ ID NO: 1877 - DNA, 7470 bp, Oryza sativa
  unsure (1)..(7470): unsure at all n locations
gccaagatgcaatcttagtggccatgtcagcagaaacccaatcatatatctctagattgtaatgcgccaccttatgcaattcgtgaaggttttcagctacagtgttgtgcaatggatgcaatttgttgagttcatgctgattgcagtgagggcggtgtgtttggattggaaacatctgtttattatctaggccacataaaaaagcatcactccagaatagctcattgctggttatgattgtattgttgaggcttgaattcgtgtgttttctatttgtcttaattcgttttaggccgctgtaaaagatacccctctactagtatcacagtaggtcagtagctacttgttcttgggcatactcatcaatctactaagatcacaataaggaattgatgcagcataaaactttagttttgacttacacttgcctataataacgctataaagctcctgacactgttgatgagtatggcaagcccattgacaactgctctttctttgctgtctttgttcaggagttgcccaaatcgcttccaatcacttgtcggcaaaaaggaaggtatgaccggaacgtcgtaatcctcaaggatcccatgaggaggctatggccggtcttctaccatgacaaaccggtcttcgtaggcttcaccgcgggctggaaaccttttgctgcagcaaacaacctccaggctggggatgtctgcaagtttgtgaaagagatggacgaagatgagcttgcgttccaggtttatatcacaagaaagtgatggcaagtgctctagctgggtgcaccatcttcagtagaacatggctgctctgctccctctgtaaatataatcttaggttggtttgcttttatgcaatgttcttgctgccatatttttcgttttatccatcagggaaattcttgcagctcacatgttcacatgactctgtgcaggcatcaggaactatggcttttcttttggttgcaacgacaacaatgtgctggctggccaccaggttgtgtgaaagccgcggttctaggcgccctccactactgacgagatgatggttctttttgggttggctgttgtgctgcatacttgtcctgaccaattggtgtaatgtatatatatagccttgccgtccaagacgacaagctgacaatattgtggacttcaacaatgcaaaggtcaaggcattgaacttgtgttgaatacttgaataagatgttggcactttggaaccagactcccttccctttttttacctgtagacaagacaccacggtctaataactggctggtctaactgagtccacggtctcgcaaccaaggttcaccaaaccattttgggtggggttatcatcacactacagtttagcagttatcgtggtaaccgcgttgttaccgtgaaaaccgtgtgattaacacgaggtattccgtagttttaaaaaccgagaaaattaccgcacaagataactacgagaactgcacgaaaaccgtacggtaaacccctcgcaacgttaggcgttggccgatgccgtattgccgtcggatcggtgttcgggtcgtcgaaccaccgatggcggcgacggacgcagcgatcgatcggcacaggcgagagcccgagagctcccgttctcccggcgccgcggcagctagtgacacccgtatctcatgggatgggattactggcgtgcttcgcgcacgcaggtggcaacccgggaaaagttggcttccccggtgggggttcgctcgctcgatcggtcggggcagtcaagtgctggcggaataaaggaggattggtttgttagatggatctccctccccttgagcccaacggctcaagggggccttgacccgcgccctgatcgggggcgcccagcccaatggctggtgggccccgtcacactgtgccatataaagaggggtggaggacngnacngcataacnacacaaggaacgaggntcgnnngccgcgccgccactccaccccanaaaccctaaccgatcgagggggcgcagccagtgacgggaagactccaccgccgcgccacgacctcgccgggatcccctacgaccaccactgccgcgcagcaccgtcgccgtcacgaccgccatcgccgccgccgcccacgtcaagcagagcgacgacaacgacgatggctgggacttcctcttcatccaacgcgtcaaccggtcacatccctaaaccctttcccttattctctattgttgttcaatcatccatcgcaaatagaaccacccgactagatctaaacctaggtgatccaataggaaacactaacaatggtatcagagccatcctagcgtttatttttggttcggggatagacatccacagagaagaaagaaatccaaagcaaagaaaagcaaacgatccaacgtatcgaaaagatcgaaaccctaaccctaatcttacctcgtcgccggccgtcgttgacgccggccacggagggggagaggggcaaagaggcaccgccgaggagccactcgacagccgcgcgcgcacccgcgggtgaacgcgcgcgccggcgagggggcccgcggcggcgccaccatctccgtcgtcgccggtctctcactcttcactcgcgtggaggggtgagacggtgggggggagaagagaaaagaatagagggcgtggcggcgcgagggcgtcggccatggcgcggcggcgcgaaggctgccggcgtcggcgacgccgctcggcacggcgcacgcccgcaagagaaagaaggagggggcgccgcggcacaaccgctcgacggcagcgcactcaccctcgagtgagtgcgcgcaccggcgatggggagtgcgacggcgccgccgtgtcgccgtgccgccgccggcgctgtgctagggtttcggcgacggcgacgccgctccgtgcaaccgcaagagaaagaagagaagaggagctagggtttcggcgccggcggccgggggcggttttgtttgcccgatccgcccgcgcgaccgtccgatcgaaaccctagcgatcggacggccgacggcggccgggccgaaagcggcccaagtggggagcgcgcggcggcggctttcccggcccaggcccaggttgcggcctgggggaggggagggggcgctcgcccgcgcgcaaggtggccatgggccgaccggcaaaggccggaaaagttcactttaggtccctccgaaggaagcattttcaatatgtttaatgattgtgcttatttctaagcaatttgaaccaacgtgaaaattgtttagagaatagataaatgtgagaaatgcttctgaacatgtattttgtatattttcatgcaaattacaaaagaattttgaattgtttttacatgttttacctctgtttaaatttgaaccaacgggagaatttttacagagagtaaacaacagagttttgttattgtttatatgaattgtatatagatcttccgctgcaaatagatgaaattgatgaaaattagtgtttctaaaattaaatttcgaaccaacgggagattttaattttaggaacattaattatgtgctatgatgttgtaatttttctgaccaacgttgataattgcaatgttatagttatggctttatgtgttatgtctattttctgcccaacggtgatgtagacttaatacataataattttaatgttaattttgttctcacaatacatgattatctcaggtggctactccttgatgggttacattaaagatattccgaccctgaaaggagataactacgaagaatggaaaagagaactcgaccttgcttttatcttgggagaggtggactgggtgttgactaccccatgtcctatagaacctgctgaaattttcagaggtgaaaaagagtcagatgctgaatgacaaaagagagagagggacaatgcttccctcatcatgtcgtatgacattgagcatgcgaaatggtccttagccaacaagaattgtttggctgcggtaaagaacacgattgagccaaccatattgggctcaatcccagagtatgacactgtctctaagtacctcgaaagtataaagagccagtttagtggttcttcaaagttttatgcgacacagctgataaatcagcttgttacagagaggtaccatggaggtggtgtaaaagaccacattcttaggatgagcaacatggcttccaaattgaagcaaaaagatttgggcatctcagatgactttctggtccatctggttttgtcctcattgccaaagaactttgacaaccttgttgtcaactacaaaataagtacagagaattggaatattgaagagctcatctctaattgtgtgcaagaggaggaaagacacaaagagaccaatggtgactccattaaccttgtcaaagataacaaggaaaagagccacaggtcaccctcctcaaaagaaaaacagcctcagcatctgcctcagaaacaacagtttacagttgagacaagatcagtgtctacactgcaagaagacaagacattccaagaaagatcgtcctgacttcctgacagtgatcatggcaaagaaaggtgagaacattattacatttgtaaagaatctcattatgattggttattctagatccacatggtggattgattctggagcaactattcatgtgtgtaattgtttaaagggattccgttcaatgaggactacgcaaagaagtgaaagatccattagagttgccaatggagttgaagcaaaagttgaggctgttggagatcttcgcctagaactcgcgaatggcttcacacttttacttccagacgtttttatgtcccttctttgcaaagaaacttgataataagtgtatccaaattggattctgatatatttgaaatggcaaatgtgaactatggtataataatgaatgtattggtcttgtgttgcaagatcagctttatttgttatctctttctgagaatgtgaatgttgtgtcctcgttgacaaaagaaaagaaagcgaactcttgatgtctcatcgaaattatggcactgttgtttaggccatatttcgagggggagaattgagagactggttaagaatgtaattcttcctccattggagttctcagttttagaacaatgcatacaatgtatagattgcatcggtgcccaaaacaccatatgagctatggatcctccatgtgtgggggagtcctgcaaaggataaagtatttaacccaaaacagtaagctgccattttattggctattctgaaagatcaaaaggtcatcatttctactgtccaaacagttatacaaagtttgtagaaacgagacacgccgtcttcttggaagacgaaatgattagggggagctcggtagttcgagaaattgatcttgaggagaggcgggtgtctgtacccgctccgttgactcaggaacctttcttctctctacctgctaatgttgtgccagcaatgcatgccgttgcggtaccaacacctgttgttatctctcctgtggcaacaatgaatgaaagtgaggaacctgttctacaggattcaacagaaattattgccacatcagaggaggagctgaaacagcctcaaacagataatgtgccagaataggaggcccctagaaggcctgaaagagtcgcatatggaggatgatcccatctcatatgaagaggccatgagaagccatgaaagatgaaatgaaatcaatgaaattaaatgatgtctgggatttagaagaaattcctaaaggagccaaaacagtaggctgtaaatgggtctacaaaatcaaatatgactccagagggaatatagaaaagtttaaagtgcgacttgtggcaacagttttcacgcaaagaaaagagattacaatgagacattttctccagtctcttgtaaagattccttcatgattataatggcactagtggcacattatgatttggaattacatcagatggatgtaaaaacggaatttctaaatggtgatttgaagaaaaaaagtatacatggcacaaccgaaaggtttcgtcatgaaatgaaacgaaaatatgggatgccgtataaagagatccatttatgggttaaagcaaagcttcgagacaatgctacttgaagtttgatggaacaataaagaaatttgggttttcaagagaatgtagaggacaactgtattgattcaaagttaagaatgggagactcattttcctaattctgtatgtagatgacgttctactggctagtagtgatgtcaatctactgcaggaaataaagaaattcttgtcctcaaactttgacatgaaagacctcggtgaggcttcatatgttttgggcatagagattcaccgaaatagaacaaagtatgcattgggattttctcaaaaggcatatatatatagaaaatgtgttgaagaaattcaatatgtacagatgcagtgctacacctgctcctatagtcaaaggcgaaaagtatggggcatcgcaatgtcccagaaatcagtatgagctcaataaaatgaaaacaaagccatatgcgtcaactgtaggaagcctacagtacgcgcaagtgtgcacacgacctgacttggcatttgttaccgggttatttggcagatttcaaagtaatccaggcctagagcactggaaattggtatagaaagtcttgcgtgattgcaaggaacaaaaggcctcatgatgtcttacagaaaagcagaatcgctccacatagtggggtattcgaattctgactttgcaaaagataatacaaagttaacatcgggatacatgtttaccctgacagtaggagctatttcatggaaaagctcaaaacagactaccactgcagggtctaccatgtatgccgagtttatagcatgccatgaggctacggggcaggtgaactggctaatgaagttcatacccggttttaaaggtggttgatagtattgagaaaccactaaagttatactgcgataaagaacccacagtaatgtactctcacaacaattagtcaagtggtgctgccaaacacattgacataaagtactatgttgtgaaagacaaagtccgggatcaaacaatcagtctcgagcacataagaacagaaaggatgctcgcggatccgctcatgaaaggcctacctcccaacatgttcaaggaacatgtagcatgcatgggttttaagggaagccttatgaatcctggactatagggcccaaaagttaaagtatctgtttctgaatagagatgtgtatagtggctgtcgaatccatcggtaattaaccgtgacgatgaaacatgctctatatgtaaatctgtgatggaatagaaaaagctaaaggaaatagtgagatcaagggggagaatgttagatggatctccctccccttgagcccaacggctcaagggggccttgacccgcgccctgatcgggggcgcccagcccaatggctggtgggccccgtcacactgtgccatataaagagggg

SEQ ID NO: 1878 - DNA, 1694 bp, Oryza sativa
aaggtcttccaactgcatttgtacaatttgctgcaaatttgttgttttaacattgatgatgaatgatggtcaccctgctggtttcagttcttttgccatatggatgagaattgtggtaagcttgtatttgactattattgtttttattgtgcaggagttcagcagatatgaccgacaaattgcaaaatctattggtaaacttatgccgactactgacagtgtaaagtgagtatatatataaaacatatttttaactgcctagatccgtatagctcaatgcacataagcacattcaaataaaaaagatctacatctattctcctttttccatcatttgacgcgtgataagaactaattgccttttggtcatatagttgtttttgaagggttttaaagtgagtatttgatttgaatatttatttaatttgaaatctacccctaaacatttgttgcagagcaagggctggtgagcttattaaagctttggatggacaggattgcccacgtccaattgcttgccgtatatttgcaaacaaggtacttttatgtggtaatggcctcttttttcaaacgagtagcatcataaatatgtgtgaaatgtcaaaaagtctgagttgaacgacatgaccatgcaatatttttatccatatgttcaatataagtacgaacatacttgctaatataaacttaggcccaaacacttgctttatgaactgacttgtcggtcaatagttgaaagtcgaaacatgaaccatcaaatacctgttttatagtttagataattggtatgttaactgcctacatgatgaccttacaatttttagacacatttttttaatagaaaaaatgtgtctagaatatgtaaagtaatagcatcatgtcaccatttaacataccaatcatctaaacttcagttacatttttttagaaacatggatttaccacttcactttttggctttgcatagtctctctattgtagtgtatacctctgcagtactggtctgttgttgccaacatgaacttaagtgtgctcacataactctaactagaaatttttggccttctcatgtactagaattagagtcctaccgggctgtccattttgacatactgaattctacttgatattgttgacttacatagctgacctgatattgatttgcagattatttcaatcgtcaagagtagaaatacaaaggacaaaacatttggaaatttggcctttgcttgtggatatgtcatgcttctagtcaccagccaggtatgtttgtgttttttagttttactaggcattacttttgttaataagtgcatatcgaattgtgctcactttctggacatttaccgcactcagttttctttcttatagctctcttctgatatttcagaaggcatatgttgtgatcatgaattcttgattggtggaagtatattgatacttaaaattagtttatagtaggaaaagactatttcttccttacatgacagctcatccttaataagtggaatggaaacccacagtaactaattttcgttatgtttcatgttaagtttaaaagttgaagctgcttttgacacctcatttaaacatgaagtggcatgcaatgatgaactattgcactgttcgtcatggttagaggaagtggatattaagtgtccttaaatttgatggcaataaacagtggaaggtta

SEQ ID NO: 1879 - DNA, 6907 bp, Oryza sativa
gcacatgcacgactactttctgtcgcaccgatgcaacctcctttattcgcgtgcgatacgactgcggaatggctgacccaccatggcccgcatacgtccaatcttactttcggcgccaatcaggtgtacctaccatggtccgcaacgttgacatgtcaaggatatcactgcgatttttggtgcctatataagtcgccataacgagcgatgcctcacaatctttcataactcagtcacattcagtactctcttcctcattagcttcattataaatcccactagctttcgtcaatggctagacgcctgggcgttaaggatccgaactggcgtagcgatccttgtgtatacctactaccaccttagtgctagcggcctctctgcctatgcggtgaccgatgccaactaatggcttcgaggaatcctgatattcgaggaaggcgcttttttaggtgccctaactatgaccgtgaggtatttattatctgtatatgcttattcattctgtatgggcaaatgttttattcttcataatactactctattcgtcagacccgcactacggcttgcggatacatcgagtgggtcgatacagaaaatccagttctcgacctaaccacttgtttacaagaaggacgctggtatttcgcatccaaaagtactaagcaatacttgcagagaaaagcagcttacgaacgacaatgtcgtgaacaacagtgcgactggcgggtgctaactacggcactccctccatggaaagcccgtccaagatacagatgcggtgatcgttatcaggttcttcgttccataaagcctacgactttgggtcgaaggttctttgtttatccaaatattcttgacgacgatttcatggtaagaatattttgattataatgaatgcttattttctcacaacatttactaactttgttcgcttcacatctattcgtttctcacaagaaccaccaaggagatgtcaatacagagaatggatagacagttctaactccacctagccgtgcggtgtagcttgaactaccagaggaatataggattactaaagcgcggtttgagagaggagagagattctcacataggggttagctattatcggacaacttgccatattgaaatttgtaatgtcatgcttccttgtcccattactatatcgtcgttgtgttcaactcttgcactacctccctcctagttcgaatctaatattatctatgtaaccgcaatggaaccagatgtatcatgttcaaattctactactatatcttcatgttacataattctccttgtttaagtgtatataatgtttctatgaccgagactgcgataggcctatatcaatttcgtacactaatacgtcgaataagttacagattaatatcttacttaacagatgaaattgcgaaacaacaaacttcaatatatttttaaaacattattaacaagttttaccaataaataattatttaattattatgaacatagcagagaaaaagcatttggctgatagattttgcatctaggccccttgccgcccttttaagttgcatcaatcaagacaccatgcccaaattaaaacaccataccaattatacccttagcatgcacacattctcccttgctacattaaatatattccaatgaaattcgtgtccatgcagttatatgatgattaatttgagaaaatttagatttatttatatgatgatcaatttgagaaattttggatttaattatatgatgatcaatttgagaacaagggagtactaggtttaaagtggagttgtggagctgtggagctgcccaatttggtagggcttcaactcctaaatttaactccaaaagtttggtatcctaaatttaactccagaagtttggtactctggttagctccacctctctacttcattttaacatagcactctagccagctccactccgttttttgttggagttgaaaccgtttagttggactacagctctaggagagatggagatggagctagagttgtgtcaaatggtggatcgatcgggtttttttttcaccactttctttttttttttttggcaccatatagttttttttgggtaagtttatgtacctaaagtttataaattcaaagtttacatacctaaaatttataagttaaaagtttatatacccgattcaaattcaaaatcagatttaaatttttttatataaaatatttctatacataaagtttgtaagtacgaagtttacggtatatatttataagtataaagtctatgcacatagatatacttttatgggtattcgagattttttttctattttttttattttcttcctaacttgtttttcttttttgaaatttatgatgcagttggaagggaagaagggggactagcgtgtgttaggggtagggacatggggcgattgctgtgggcgatcaccagctcattagcccttatctctttaatttattttgtgagtacattttagccagctccatattttttatgtgaaattgaagctggagctatgctgaatgggttcttcatggaatttggacggctagttggttatttggtttgggttaatgtggcttgccatttcgcagtcaagttgcgatcgatgcgcatgcattaggcaggtgagggtgctgacgccggcgagcactccgtgccggtgccgtcgcggattatcctaaagctcaggtgtagacctgcacgacacatattgctcggatccatttgcgccttttgctgggcgaaagcaacatggaggatgcatggagctgtattcttttttgttatttggacaggttgtgccaaccaagtaagatgtcatcatcagaccattataataagtgtggttaattagtagcgagggcactggcatttcgttgtagatcagatcaggcgtccgacgcgcactgatgaaggtcacggcgacggaccgacggtgttcgggattttagtcccaatctttcacggtacaacacagcagcccgactgtatatgtggttatatatctccgtaaataaattaagcaaatggttgagctgaaagaacaggaagacgtgttaaggtatgaaaaatgttatgatgttaataccttaaaagagataccaggccacgtatatttttttatgatatgaagaaaagagaaatagacgagggaagattgtcgattgttggttaacaggcgatcaatttccaattatgaattgttcaaatagttaattgaaaggccatatttaattgccaaaattttattttagatcacccgtaaaccaacactttggacctgttgattctgccattgttgcattttagaccatcccaaacaacttattaagcacatgtcgacggctttaaataaataggcgaactttcccatctatgtgcatgccatatttttcctagatcagagatttgacatggatgaatagagagttggatcatccaaagtccaaaatggtaaaatggcaaattatttgtcgaagatgaaaagattgattcaagaatagtccaaactaaaatattggcaataatagatggtctaaattgtagttcactcttattcaaatttatttgagatagacaaataaagaaattgtcaatgagttgtctagacgtcgccaaggtataacatagaaatattataaatagctatcgtgtactacctccgtcccaaaaaactcaattctagatttgaacctgaagattcatgtgtccaggttcaaattcagaattgtttttttttttcggagggagtaagttactcatgcctatattgtcattcttgctttatggtgatttttttccctttctttcaacttaccagttttgtgtgtgatcaaattacactaaattggtcgcgtgcatcacacctgtcctatatgcttcgagcatatacattaggggtgtgtttggataatggtaaataagggatgggattgagattgagaaatgaacgaagggttaggattaaatgaaagagggagaatgaacggttaggattcaaagatgggtaggaaatcatttccctttcccatttgccatacactgtctaggtcttatttaaaacccatttacaatgtaaaaaatatatgaaatttctatgaccctacatgaaattcttacgcttcaaatccaagtcctaatccacccgatttttcaacaaaaatcaactgctttgggaagttgggatacccgactcgagtcgagtcgatcgcatctgtagttccgttgcatctggattctctggaaacagaagcatatggaacggaacggaacgaaacgaaagacgctgacgtggcgcccgctgacgtgcgtctatataacggcgaggagcttcctcttcctcctctcttttctcctccaaggtgaccacctcctccccaccgccccccacatccggttccccgaggttgcagcctctgcagccttgcgaggatcagatgaacccatcgtcaccagacgaattctccagtacgaacgatcggacactgaatctttgctcaattccgtgctgttttgattcctttactggcagctgagccggccctcaatctggattttcccggaggatttttgggggatttttttttcttttttgtggggataaggagttcaggggtgagggggaatctggtggaattggatcggtttttctgatcttgttgagccgatctgtgtgggataggaaaggttgctttttgttgttgttcttgggttcttggtttgataggagttggggggattcggatgctgtaatgggggaatttgaggcggcggatttgggagattttgtgatgcgcgcggggatcggggatggtggaactgtagactgtgtggccacgatcatcggatcatggatcgatcctcttgtttccgcttcgctcttcttctcatctgttgatcgtgtcggagatgagcggagagaaagatcattgtggtggagactgatctgtgcgttgatcttgctttggtggcatgatccggggtcaatccatggatttgtcttgtgcgtgctagtctcatctgcagttcattctgatggcattctttttgtgggggcaaaggctttgctaatttactactgaatgaaaatttttattttttatgtgttgtttgtgttgtttctgctattaactgtttttagtagtattgagttccactgtaagatggttcctgatctaacaagggttcatgtgtgttgttgtttttggattgaggttcaggctttctcctgtccatgcgctatctgacgaatatgtcactctgtctactgcagaacacagcttagaaatactgaactgccaacatgatcgaataattcaatgcttcctttaatttaacctccattgcaaatgatttgcttattagtgatgccggggtttgcactataatgtgaagtagtagtaatttgcctctcttcttttattcttgtcagactgagtactctgctcccataatcctatttatccacacagcgaggggcactgcaagaagcatgcagtgcccaatggacgcagctgcaagtggaacttcgcctgtgatgcagttccatggcattgttgatgagccaccctcccattcatctccgctgcacacggcgctggaacgttcgcagcgccattgctatggtcatgaaaccccaggagaattcccccttgctgtgagcccctccattgtgctacatgtgctctccacctgcgagctagatcctaaagatctcgctgcactggaggcaagttctacagctatgctctctctgtctcaatgctttagcaggagctgctgctactgatgagcttctcatatgtctgtcgtttcaggctacatgtacattcttcagtaaacctgcaaatttcgagccaaactttgctctatcgcttccagaggttgcggcatttgatatgtgccataaaagacccatggttaagctaatggcacagcaggaacgggagcaactgaagcagaggtgtggtggatcttggaagcttgttttcaagtatattgtggctagagaaaggaattactctcggattgtcgccgggccgggccatagtattgttgtcaccacaaagggagatgcatactcatttggggctaattgctggggccagcttggccttggggatactgaagatcggttcaagccatgccttattaggtaatgtgttgatattgataaaatatatgattgtttaccaatgtagtaaaacgttcaccttcttgttaggtctttgcaaagcatcaaaatcacacaggctgcagttggatcaaggcagacaatgcttgtgagtgacacaggaagtgtctatgcatttgggaagggtagctttgtgtgggaagagctttctgatgcagctgatcacattaccactcctaagatagtggagtcgctaaagggtgtgtttgtagttcaagcagccattggtggttacttctctgcgtttctatctagagagggtcaggtttacacgatctcgtgggggcgaaccgagaggcttggccatagttcggatccttcagatgttgagcctcgtcttctctctggaccacttgagggtgttcttgttgcacagatttctgctgggaattgctatctccttatgttggcctaccagccaactggaatgtaagtttttgctcttgcgccaacttttcatttattcttgaatgataatctttgaaacaaatttgagtgcttggtatttggagcttctcttgagacgattaacagtgctaactactttgcaggtcagtgtattctgtaggctgtggtttaggaggcaagcttggtcacggatgcaaaaacaataagggcacccccaagttgattgaacatttcctgacattgagctttaatccggtttcagttgcggctggcacttggcatgct

SEQ ID NO: 1880 - DNA, 3406 bp, Oryza sativa
tcatcccatcctaggtgctatattttgaggcggagggagtaagttctaagttctaactggtactatcctgtttgaatgggattccgttctaagttttaagcaccgtcatcatgtatcaagcctacagttggtacttgggccggcacgtcccataatgggtctagaatcttggcacgacgggcggcctggcctggcccagcctggtaaatgggccattcttgtgccagctcggtacgctgataaaccaatagcatgtgaatggctcgatagcccaacaaacacaaggcctaggctgcgaggtcaccccggccagctcaccacagcggtgtcgtgcgctcgtccgtcggccaccgcggcacactgtgtcttctctcgagacatcgacattgaaggtgctcggcggctagcggcgatggagaaataggcggtggcggtggcagcacaaggtatagcgacgacgttagcctttctttaagcaataaaatcaacaatcaatacaaaatcataggtaagtgcaaaaccattattttatggtgcagtacagagtctagtggagtgcgagtatatactccatccgtggacttgtgggcccattaccacccctagccgtgagagacggcgacctggagaagggtggtgagctagcattggaggccggctaaagcgagcttgttgttaggacgtggtgtggatggtggtggatccaactgcagggagccgttcaagatgaggaaaacggtgaggctggtgcacctcactaccaactactaaaagatgagttggggggaggggggaggggaggtccaccaagggcgcataccaacggattaaaagatgaggagagaggggaggggagggggtggaggaggagaaggtcagccaaaggggcctcgttggcgctattgacgtcttcatactaatcgatggggtcgggcaatgacgcattggtgcagaggaggcatggttgagctgatgtcatgtgatgccatggagggaagagaaaaagaacaggagggttatggtttggagggatttacacgaatcttaaagcaacccgatgatctaaaatctacaagattgtaggggctcccaaaatttaactccaattaatcttggattagggccgaaacaattgatgatacttgttcatgctgatgttgctgaaacaatgtttctttgtagaaatgaatttacatcttatgttgcttgcttcatagagtagtgcgaaagagatgcgcacgatctcgcttcaatctgatcgcattgttgtccttggaaacaagacaacgctactagaacagggaaccaactcatttacctggcgaagtatgcaaggcgacaattaatggaggggatacactgaccaggattgggcatgcagaaatatgtgttcagagcacttcgggagatgccttagcctttatggccatccagttcccaggctcccagctttgcgattggatcaggggagtgcaaatgcagtcatgtggggccctggggtcagagaggagcctgaagaacctgcatcactggctcactggctcactgcatgacaacacaatacaacgaccgcgaacatagttacacaatccacaagtactcagcaaatatgcaaaagcaggatatggtgttacactattgccttacgccagtaatctacgaagacttcattgttcccacaagagagattactagtttggcaacaagcgtacaacagattatataagacagcacatgtccagagtaacatttacttcgaataaattacaggctcgccctcaatacaggcgtacaacaaattgcatcgcatctaatctatagtattcgtacatggcatttatacattaaaattggtggcttaaaaagggagaccttgggggcgcaatccaagacatttcttcagggcgattctggccttctctgccatcatataaccgtgcaggttgctccatttggacagtatgaaatgtcttgctgcacacatagagcattatctggcaacagccattgctaaccgcggtgacaaacttggccagtgtgcagtgccacatcgccatgctgatctggtgtctgatcctcacgtgaacaactctttagatagaagctgttgcgcaaggtactggccttctggttcctcaaggtaaaccttgtcagtcagataattctgtagattacttgcagcctcagcctgaattcgtgagccttgttccttcaaagcgggtaagaagcaccgcaatattacatctagaagtttcatgaactgtgatccgtatttcttgtgaagtgcaaaaccagcaacctgaacagaaacagaatccaagttggctacaacaaacctgctacaagcacacacgcataggaggggatgggggtcttgaagcatatttttaccttgaggaaagcatgaagggcacaagcagttgctgtggtggccgggagagtattaaggaacatggcaagccatttccacccctcagctaagccatgtggatgccgcacgcccctaatttcggtctgtagaaaaaaattgcggttgtatttcaattctaaataaaacatcaatttgttgaacagaagtctgctgctcaaataaaacgatcatatgaaacggtattaacactggatgaacttatggaactgtgatagtgaattcaattaatgtgcaaagcaacacatgttacactcagagtcagtgcactgaaaagagttatctgatcactgagagtcgtatgcacaatgcactgtgctagttggagccattttggcaaactgtctttcacgttggttgtaatggtttttctgtgagctcgtcacctctgtggtggcccatgtctaaataatatcccaggaaagaaaaactgacaaattgcaattaaagagaaataataagccctttttgcaacaaccaacaagacaagaaagcaccatattagtagagagggaaccaacaaaacactcaaaaccattaaatgcatacccatttctaacaattaataaccctaacagctatttttaccacactagtaatattagaaaacaggccatacacacctgaatcattgcagcatacagcttgacgtatgcggcaacatatgtcaaataactttcagtgctctcgagttgtccattttcttcctggtagccaatcagtctgtaataatctctattccgtacttgtgcctaaacaattacaagtaaaatcaggaaaaaaaatacatgagctaaacacaaaaataattatgtgaataaaacatcattataattgttcaaaacacctaaatagaacacctcacttgttttttccattgctgctcatatataagcaagaatataaacaagctgcaaagatattgaggagtttagtggcatgaagacttacgtttaaagcatgcagatgctttggaac

SEQ ID NO: 1881 - DNA, 2087 bp, Oryza sativa
attaggggacgaagggagtagcatatatgaaataattatttcttttcccaattcctacctcctcttcagctgcttccagtcctccttgtacccagaataaattttggaaaccagcaccatagagttgctcacaagcggccaatgatctgaccgaattacgggcaaaagtgaacacaactaataaaattacacatccatgaagggcaacacaagaatgcattactgaattgactttctcaaaaggtaaacaacgcgataaagtattgatatgcaattatgcatatcaaattcagcattgataagatagtgaattacctcagtcccttctggcaaactactatgatatctgtatctttagaaaacttctcctcaacttgttgtacaaagttcctagcaatttgatctacgatcagtcaatcttactgttctgaaaatagcagatgaaagttctaaattcagtagatgttgagcgtacttgttaactgtcattgttgagctgccactccaccagccacctagggaagtcatgggagttcgatcatttggatgtcccgaattgtaggaggggtgatgtaagagttgaaaaataaattcacaggctcacagaggatagaacactaacataaaacagaaagctacacatgccttggttcaagtaattgtgtttcatgaactactactgtggttagtatgatggtaatctaaaagacgtatgtaaactggtcaaacagcccagagaaaatcatcattgcattatccattctagagtgtacacatggaaaacattccatgttacaatctcctgtgcttagtttaatgatgaacaatgagaacaaggtttgtaaagaaagcattcaagaacaagagattgacagtcaggtttgcatatggtgaccctgtttagcatacccatcacatagttggtgaatttcttgccggcgccacccaaatcaaacgatgtatccacatcaaatacaggaatccaggtagagcctttcacccaggcctaaaatgcgccaattcaaatacaatcaaggacaacgaaaaacaatcccattccgcaataatcaaacacccctttactttaagagtcttgacaggcagcgagacacaaccttttgacgctcattcgagggcctaacatcaaggaggaccttgtcagtgagcttgaatgtatagccagcttccctgggtgtaagagtcttgatcttctgctccctaatcttcaggcagagcatcattcccacacacacatgaacagcagaagatcagcatttcaatagccatagatcacgcaagatgatactgaattgaaacccaaatgtgggggaaatcgtaagaagaatttgcaggcagggagggttagggtaaggtgaagggacacaccagagtctcccatcgcctccgggcggcggccatctccttggccagcttcacctcctcgtcctcgccctcctgctcccctcccacggccgctcccatcctcaccactccactccacctctgcacccaagaaaccactcacacagttgcagtcaccgctcagtggaaatgagagcaaaggagaaggggaggaaagccaagaaaggaaaatggccgcacctttgaaggaaggagacgagggcggaggcgcctggagcggcaggaagaggaccacgccgcggccggggtggcggcgccggcgccggatacgcggcgcgcgaggccgagaggtgacggtggcgcggccatgtctgtgagatggccgtgttctttcagaacggaggttttttttagcttctagccgtagctttatccccccaatccagttccctgccctgcaattggatgatgggggtgcaactccagacttgtgggaccctcgacagcgctaagccagattgcgatgtagtggtattttctcagtcccaaaatagatcaacgtataaatacgaaaggtgaatctaaaatgaccttttttaaaaaatgaacacgtgataaatgtttatttttcacaaaaataagctacctttttaaaatgggaatgctatgagacggctgccatttgtatcatgtcctaactgatatcaggcgacacctactaggta

SEQ ID NO: 1882 - DNA, 4388 bp, Oryza sativa
tgatataccagtgttttggcaaaaaaaaataaatttagatgttttcatatggaaaaaaactcaaaaagagtccatttcactcatccaaactattttaggttcattgagcattaagatatcacattggaattattaatattgagaaggcgttcttaatggatgaaaatttgatgatatactagtgttttggcaaaaaataaatttagatgtttttcatatgaaaaaaaaatcatttcgctcctccaaactattttgccacagcatttaacctcctaacaattcctcagcttagtttacaccctgaactattgaaaacagttcaacttactctctaataatattcctcaagtactgctgtactcctacttccgaagagatgacatgcatgagcgcaagagcaggacagccatccgtcgatcgaactcgaacacgaccaagtctgcactgtgttgatcatatcagctcagctcagctagctggtggccagctccgtctcttgattgcctagtgctgcaattatatcgacccagttctagctagctttgctcaagttgtccaagcagatcgatgctttgaaacaacagcctgccgaaaataggcaatcgattcttacttaccacgatgagagtaattatcctatgaaatggcatatgatcattgaaacttggtagcagtttcgccacgacacaccgcaaaaatcctttttttaaaagtactacctttaatttaaaatatctgacgatgttgattttgaacataacagctgaaagtttattttattttaaatttatcattaaatatactttaagtataataaattttaaagtttcactaaattttgacaaatgatcaaacgcatataactatataagttaacggtacgtacatttaaaatgagtacagtacaatggacatcggctcacacaacacaaccacacccatatcatcacaaacagctctatttttttccttctaacttttacatgatactcactctgtttcacaatataagtcattctagcatttcccatattcatatcgatgctaacgaatctaaacatatatatcaatctagattcaaacatcaatatgaatgtgaaaaatattagaatgacttacattgtgaaacggaggaagtactttcggcagaggactaggagtgaggtaggagtgaggtgggagaggtggggaatcgtgtgagatgccctagtgccctaggacacatttcctctcatatctgatatgttggtctagttgattaaagccaatgtttaaccccagctagttggtaacgataatgtattgagatccaatgcagttgtcactatgactgcacaatagcaactgcacacaatttgagcccacacaatttgagcccttcttgatccaatggtccaaatctattgatacagtaaaaatcaaaattttactatttgtcagagcaaatcgctgcagtatttagatgcgtctggaattctgaatcatgtgttttaaatctggtggtgctcgtgtgactgcttaacttgtggccacactagccactgcacctcaagcggatccaacggctattcatcttaaaataagtttatttttcacctattccacacatagtaattcaaaactaaaaagactataatactcatactttatcaaatctcaatacaactatttccactttatctactctcaatacaattatttcgtacttccacaaatttcaatgcaatgattattctacaaatgaacttattttgatacaaataaaatgagctaaaaatgaacttactaggagacgtaggaagtatgctattagttcttataaaacaattaatttatgatataccagttagacatgagccctagctatatttctatttaaataatagaggggaaaatgttattaataggaaaacgagtaaatttcggaaaagcacaactattttcgttaaaactactagtttgcgacaacttcacctggttttcttacaaagtggaatggaacaatagttgatgattttctgcaactttttttttgtcttattggttttggcctatatgtcagacatacatataaatatataatacttatactgttgcaagttgggtccacatgtcagacactcataccagttaaagttgtggggttttggtaaaattgttcacaatcgttgtagttttgttagatgtcctgctatagttacagctaactgataagctaactgataatttgcagttttacgaaatccactctaggaaatactactccctccgtttcaaaatgtttgacaccgttgacttttcagtacgtgtttgatcattcgtcttattcaaaaaatttaagtaattatttattctttttatatcatttgattcattgttaaatatactttcatgtacacatatagttttacatattttacaattttttttaataagacgaacggttaaacatgtgttaaaaagtcaacggtgagtattagggtatgcagagtccaggagcaaacggtcaaatttctcatttttagaacgcccagcagatggggtcaaatttatcatcaaggagtactactcaattgttgcaaaacccagtgtcatatatatgatcatcctcggtgtatctggtaatgttgcttgatggcatgatagcaacagcatgccggcattgacatggtaaaaacaaaaataactaataattaaaagaggacacacacttcatgtggggtcatgtggctcttaacaccggttaagagttacaagaaacatcattttgtttgacttgcctctatcgattagtgtgaaaatacagagaagacgtttggcttatcaactggcgtttagatgtcatgagactatgagagtgataggaggagagtggcaggtcaggaagaatgatcgacaccgggacagatcatacttaattatataatgtcgacatgattgttgagggaatgatacgtttttaggccttgtttggggcaaattcttgtgctggctgtcattgactaggagttgtgttcttcgccctggaatttaatctttcttgggtattgcttccttatcatttgatcacctatcttattaaaaattacaattatcatttactccctccgtctcaaaatataagcatttttagtatagtgacaagtcaaacatttttaacttttaccattaatagcaaaaaaataaaaaagattaatcatgtaaaattgatgttactagatttatcattaaacaaactatcataatatcataatatgtaactctttttatttaaaacatcttacttttatagatattgttagtcaaagtagcatattagagaccgtgttagggtctaaaaatgctatattttaggaactaccatttgtaaagaactaccattaatttccttgaaacttgatagcaatgatccaggcctgtttgggaacaataaatttgaccaaattgtatacgaaagaaagagattcctacggaaattctacctcccaaacgagatgaaacctagtaacctacaggctacagccataaattcaaaacatggaaagcttgatttttcccccatacatgtacaatgggcttacattacggagccgcaacaactcacagccggaggtgctcgaaaagcttggacgtcacaagagcagtttgctcatagaccgatattcgttagcgagattgcagttcttgaagcagagggccaatcctttgagcgccaagaaataatgcgtcgacaagcacgagtgctccaacctgttgttccaggaaggaacatataaaagcatttccattggagaaaagaattgatgtgtgcctctcttgaattcagagaattaccaaacggcctgtgaagatcagacggtagcccagcccttctttcacagcctgcgctcgttgctgatccgtccagctgaaatgaagtcgttgtcagtacacaaagcttaaagatttgtaatcagatggagtgctctggagtatggaggagcgatagtgcatgcttctgtggaagtctgaaacatatttctaataagaaaatcccattataatgctcatctgcctgtgtagacacaatctgaagttttaagttgttggcgagttctagcttgcctatctcattatcacattattctgttcttgtactcaaacaactgctttgattttaatacatgacttgtgtatgtagattggacagataataatagggataataaaccactaggaggggagaatagctggggtcttgaaacctacccgaaaaattccgaaaccccaccaataccagcaagcttgaaaggctggggaccttctcgctcaaagtcctgaaggggtaaaattataaaccataattcagtaaaaagaagtactccctccatcccctaatataagggatt

SEQ ID NO: 1883 - DNA, 2561 bp, Oryza sativa
tcattcatgatttaattttggtctaagtgtgttacttttatgtgatatgcatgaatctggacattgggcattagcagtaatgcttaaacgtataattgtggctatccatggcgcacaaaaaaaaaaggatgcacgcattgattccatgattttgttataaaaaaagttaacatgtttaataccgcatacagagaacatatatcagttttcaaatattgatctatatttctatttacatagattgtacagaagaaatatttataaatttatatgagtatttgtgattttgtgtaccatgaaatgttatattaagccaaaaggacatctgatttccttgaatacatgggaggatgaactaaatgtgcttagaaaagtttcttaattaacataataaaaatctgccatactaggcaaagtgcatgcatggcaattacccttgatcaatggatggttcggatttaatactcatcttacctcatagcagctaagtggagcaccctaaaattgctcatataagtttagtagtctaatcctttttcttctattgaattaaaattcaggccctctttctattgataggtgtactttcagggtcatcctggactaatttaaacatttcaatgtacgaattttagattacacgggactacgggaggatgctaagtgttctatggtactcagcatgcatgatttgatgcatgatcttgctagatgtgttatgggtgatgagctacttctaatggataatggaaaggaatacaactctggagaaggcaattgtcggtatgcattactaatcaattgtgtcgggcaaacaaagttctcctattcatctactaaattaagagctatgcgttttttcaactgtgatggaattcagctacccttatttacaaaatctttgcgtgtcttggacataagtaagtgttcttgtggaaaattaccttcatctattgggaaattgaagcaattgaagttccttagtgctactggcatgcaacataaaacaattcccaagcatgttatgaaactttcaaaacttatttatttgaacataaatgggtctttgaacatttcaacattgccaacatcagtgaacaaactgagatgcttgctacacctggacctatctggttgtagtaacctttgttcattgccaaactcattcggtgacctgacaaatctcttgcatttgaacctagcaaattgttatgatcttcatagtttgcccaagtcttttcataggctaggtgaactccagtatctaaacttgtcacgctgtttatcattaaatttaatggttgacatcaatgctgtgtgctgccttacaaagctacagtacttaaacctgtctcgttgctcaagtctcatccacctacctgaaacaattaggggtctaaaagatctccacactttagatatctcaggatgtcaatggatagagatatttccgaaaagcatttgtgagatcaccagcctcaaatttctgctaatacaaggatgctcaccctggttagagaagcgtgtgagggagtctcagttcaagaatgatatgctagcattgcccaagtttattgttcaaagagcagcttttggcatgtgtagcaatatttcgcggcttcaatctgtacatcctgctgagctagaaattgaatgccttgagaatgtaacaagtatcggagaagtggatgttgtaaacttgacgtataaatcagcactatcaaaattggcattggcatggactcctgcagctgagcgttttgtggaggatgaagatttgctgcggaagttacaacctcctgacactctaaaagttctccagatacaaggctacatggcgacatcatttgctagctggatgatgaacttggcatcacgtctgccttatctagtccgaattgagatggtagatttaccaaggtgtgaatatttaccaccatttggtcaattacaacatctggaactgttgattcttaggagaatccttagcctcaggaaactgggaggagaaatttgtggtggtaatggagcattcaggaaattgagggaatttacattggtaaagatggataacctaaatgagtggatcaccaaagtatcggctaatggtgaattcatgttccccagtcttcacaagctggaaatttctcagtgtcctattttaaggttaaatccatgccttcctagagctcttgaatggagaatagaagcaagcgatcaaattatagcagatttctatcacacaggctcgtcatcgtctttggtactatcgaaaatgcatattagaagctgccgcctgctgcccaatgactggaaactgcttcagttccttcctgatcttcaggtgttggaacttacacactgttggttttacgaattgccaaagagcattgggtacctgacgacactccgatcactgcggatagatggctgcgatagcatgacgaaactatcaaaatggttggtcagtctgtcattgctacatgaattaattattactggttgtttgaatctggtatatttgccggcatttgtacaaaagcttagtgccttgagaaatt

SEQ ID NO: 1884 - DNA, 18257 bp, Oryza sativa
  unsure (1)..(18257): unsure at all n locations
aggggcggggctagccgccgctctgcctgagagccgaggggagcggccggccggcgcggctcgccaccagcgacgccggcggctgccgcggcgacgccctgtcgacgtggcgcctcgtgtcgggctcgacgatgcacgtggccgtcaacgcgacgacgacgacgacgccatctcgggacggcggcggcgggctgctgtgcctggacgtcggcgacgacggccggagcgtggtgacgaacccgtgcaggtgcctcgacgacgccgccgccggcgagtgcgacccagagacccagtggttcaagctcgtcaccagcacgaggtccccggccaccggcgccgccgcggcggccaccgtggcgcgagggctaattgctgcgtgaaaatcgaccgatcaatcgatcgtgtccgtgcattcgtcatcagagaatcgaaatcttatttaaaatccgcgaacacaacactatactagctgctagctgacttgcattgatcttggatggaagttagagagttcgtgtcacgcacgtggcgcgcgccaagctgcagttcatgtgtggtcgatgtatccatgtactgttactgaacagtgcgcttgagctgaaccattgaacggatcaagaactaattaaatactccctccatactggtaaaggaagtcgtttaggacaatgtttaagttaaactttaaaaatataaatcataaataactctcaagttgttgagtttgaaaatgttaaaattatatgaatagatttgtcttgaaaaataccttcataaaagtatacatatatcactttttaataaatatttctatagaaacaagaagttaaaagttaaagttatgttttgaagaccgtgtcgctatctaaaacgactttctttagtagtacggagggagtatttaattagttcttgatccgttcaatggttcagctcaaaaaagttaaagttgtacacaccagaggtcaccagctatattattactcgtatggtttaagagaacacacaccatattaagttttttttgcatgggttcgtgctggtcccacatgttcactgcaggaacgaccattgggagggtgttaattcgattagcgcgttaattaatttgggaacagtagccactagccacgcacgaacatgagatcgttgcacggtaggcattgccgcacacacgatcgacgacctaacaagcggctagacaagtcgaagaaagagctcgagatcacttttccggaaagtgttttcacatttaagggacactattcattttcttaaaaatacgcacaattgagtcatgaaatcctttttaaaaaagattaataatgttggtataatgactggctgtttgctgcatgcggctgcgctgcacagacgaacagaagaaatgctagttgggttcctgtagcagatggctgtggcgcaccgaacaagccctatagtaataaaacattccgactgagtttttacgttaataaaaaagatataggcataggttagtgtggagattatgggtatcccatatctacacggcgacggtattcgaactgggtaccggatacttaatgtagatagaatatcttatctgtatctcgggtttgtttcttaacttgtgtatcaaggaaacaccctgagacttagtcggttacgactgtattttacctctatcttcatattccgttaggaatatagattatcttttgtaatccggactccttcccatatataaggggggtccgggcacctctaggggcatatgctgatttttcccgaatcatacaattaataatacactcggcggattcatccccggacaggagtagggtattacttcttttataagaaggcctgaacctgtataaatcctttgtctccaaacccatacactttccgagcttgatagccacccccttttattattgccgaaatctagtttcgacagttggcgcgccaggtagggggagcgtcaagcttttcgccgatcagtgcaatgggttccgtctccggcatcgacgacctcgtcttcccacccgggcagacgtttcggttcggcagcctcgacttcatcaccaacaacttcggcaagatttctctcctcgactcggaatcagaccagtcgggagagaaccggctttcggtcccgtttggattcccgaacgcggctgaaagctacttcaagaccatctcaaccgagtcggcttcaaaccactcggccgagatcgcatcttctacaacgacaccagatcaagatgatggggcttacccaccggtcctgatgaagctccccgacgatttagcggccgtcttcaccatgacagcgtcttcatcccgtaggcctaggcggaagtcggcttcaacaccgctttcgcctagcttcagggaagtcggcgtcatcctccaaccactcggcacggtttcgacggatcagctggatgactacaacagctctcccaccgtcgactcacgtcctactgacatcgtggagtacgacgaattcagttctcgctacgacgacttcgacgacttcgacggaagcctagatgacaattacacccctctctactttggcgttttcatggccaataatgagacggaggagcaacgccaagcccgggagactgaagaacgtcgccgactggaggaggagcatcaagtacaagaacaagaacggctacggcgtgagcagcaggaccgtgagcggatcgccaaggaggctgaagatcgacgtcagcgagctttggaagcagggcgccgagcgcgtgatctcatcggccaacaagatgtcgaagggacaccggttttccgcacccctcaacagaatgcggttgccgcgatcacccttctcgacaccctcctcaaccaaaacgagctcaatcgttccgaccacgtcgtcaacatcttgaaccagacgaagaccatgatcgcagcatcggtcccagttaactccgaaagcgtccacacgccgactggcagccgggtcccccacttccgatctcatgactaccgtcatccaagccccagcatcactggagcaggatccaatcgcaggagcaggggccacgacgagcggtctgttcactcgcctcccgaacttcatagggagcgccgagtggaacggcctcgctcaccacctcgtcgccgccccatcgatcttcgcgacacaatcatacagcgccgagcagctcgaggctaccatcactcgccggatcggcacaagttatctcctctatgggaagggccatttattatctctgaagttacccgaccaggttcatatcgactcaagcgcgaagacggcactctcgtcgacaactcttggaacattgaacatcttcgtcgtttctacgcttaactttatcattgtatctccctattttgactgtcaacatcaagttttcttcttgccgttgtcagtcgggggctattatcacaataatggagtgtgattttttatcaattcagtttgcttacttggtttatcattgccttgtttggtttttctacttagtttgagaggactgaaagtttttaatagcttctttgggttttaggctcaacaaagcttagcaaaaacttttaagaaatcaaaaactttgcaagaatcatcaagcacagcataaatacaccagtattgtacaaattgagcctccatgtattacatccaaactcagtcagagtcagtcctttcatcatcagagtcatcattactcggctggaggtcgttgttgcgaaattgctccacaacatcactcgctattttgtcagccgcagtttgcgcactactgataagatcaagggcagcttcttcacttgtcccgtctgcaaatccatcaatggtgtcgacttcaattctcgggtacaaggattttgtcatcgccaaggccatgccagctcccatacttccagctttcttgatattcttgaaatacacttccggagcaacactcagcttgtcaaatatttcggttgcgtcgagtgcactcggaccaccattattgaggaacatggcttagatgattggagcagcagcattggcgacatcatctcttgctccttctagcctcttgatcttaccaaccaggacgtcgaattgagcttgagacttgatcttgcggtctacaaaacatatttatggtgagaatctgctgcattaaaaagagacaagttcaggccaatagctggcagtaccttcaacttccttcaaggccgagtccctctgcgcagccagttctacattgtctctctccagggcttcaacttgctttttcatttgttccattctggcggcttgcgctgtttgagatccagatggttgaggatacagttatgttggcctaaatcaatggaacagatctggatgattaccttttgatgaaccacttagttcgaagtttgcatcctggagctgagcgattcgatcccttaactccttctccgtcttcttggcgtgctccttggcctcatgtagctggtccctaaccgcttcaagagttcccaaatgaggaaccagcttttccaaagttgtggtcttggcttcattgcgaagatggattctctgcatgatggatcatagttcagttctgctaaaaagaaaaacaaagttaccgaaggctgtcgctcggaagacttacatttacaatacgagtggcctctccaagcgctttcttcagctggcacacttcttcatcttctttttgacggtttatgactataccggcggcttgtgagttctcgtcccaccatttgatcaagataggaggacgagagtcgtcggtcgcctttatgcgagggatttcttctccgtcatcacctgatggtcctgatgtgtttccaggacattagacggatacactgaggttatttaaatcaccgttgtatgagaagacaactaacctgaagatgtacctagctgagcgtgaggtgatctttgttctttgcctggagatccagttatcgagtcattaccagcttctggcccttgggaagctgtcgtctgcgcttctacttcagggatttcttgatcagggcttgcgtccaactggtttccagtcgggggctcttgagttgttgctgcttcagttgttgccgactggtttccagtcggcggctggtcactcggattggcctggtcacccgaagcatgggcgccggtcggctggcttttggcagtcggctggctttcggcagttggctcggggtctttggatatattttgctctgccatggctggatcggggtcttttccagatggatctatatcagatggtttcctgcaaagtattctttcagaatttagcatcattttcatgagagagcttaccaaagtgaaatcataccgagaggtcttatacctggaagatgttctaatttttagcattgcgcggccggccagttttttcctgggcatggtgcgctttgggggtttattaggcgagcccttatccccagatttatcatcgtcgccttcatcgtcatcaagcaccagtttcctcttgcgaggacccgtctgaccagttgatttggaggtctgaggttgcggatctggtctgatcgttggccctccacctccctgagcagtgtgttggcgaggagaccggcgctgagtgactggtggatctgatttcatcagtgcatattcctgaacaagatgcttccatagttagtcaattcagcatgaagacaaaattatgttctgatcatggtttgaagatttccgatacatacctgcggaggcggattgaatgcattatatggcacgactggcagctggtgtgagtagctgacgacgattgcatttgagaagattttatacatcctctccttcatgattctgaaatccagagagtctgattcttcacggttaggatcatacttgccgtcgaactcgaatgccgtgcgagatctttccttgattggcgctagtcggcatttgatgaaatgccgagtgatctgttctccctgtaagccttgttctttaagatttaacatacgatccaacaactccaaggcttgtactgcttcatctccgattggaagagagttccaagtatcttgatacactggaggaagacaagagtacccgggaagagcaggttcaggattctgaacatagaaccagtttgcatgccatcctttgttcgaagtcttgaagggcattgagaaatatttttggctcagagttccccttagttggaatcctgcccccccgactacacacggtttgttcttgtttggttggggcttgaggaagaagattcggcggaatagggcaaagtgaggtttgatccccaaaaaggcttcacaagcatggacgaaattggcgatatgcactatggaattcgggtttaggtgatgcaagctgattccatagaaattcaagatcccgcggaaaaattttgaggtcggaagagcaaagccgccgtagaagaaatgcgagaagaccacaatctcatgagtatccggagacgggaaagcctcaccgtgcgctggtcgccacccgatgatctccttggcagggagaacgccgtgcgccaccatctccttaagattctcctccgttacatcggatgacgcccattggccttcgaagctttctctctcttccgccatcggtttcactcaaatgtgctgatttgattcgagggatggcttgggagaggtgagggattgaggcggtggatcacgggaaggattttaatgcacttttcggaggtggatttggccggagtcgtgaaccctagttcgccggcgcagctttgcactgtagcagggaatggggaaaatggcggggaagacgaagcgtcgcttggatataggatttttcagttaagggtatcggaggtgctaatgggcctaggcctgaacagtacttcagcccaatacttttaacagcgtggcccattgtgttccttagggacttaggcatattttgctttggcaatattatgcgcacaacagtgttgcccaatgctgatgaaatcctttttatgcggtcatataattctttggaattattgcaatgcaaattaaaaaggtgcccgacagaaaggcgttatgctgtttttgcaagcttttttaggctacaaaagctgtttgggttaactagggatgacttgtttttattatagtcatttccttggcgtgttatatgcctgttttcatggtaaatagtcatggcctaggctatttgacttatttattaccataatctttatgatacttgatgggtaatctttagagtttgtatattcggatgcctgtcaagtgtgttcattcgtgaactttttagaatgtaaaccactcggatttcttttattgtggctaaaaagcagtcggctagcatgcctatttaggcgccgcgtatgcttttgtcatataatgcacaattgtgttattattttgtctttcaactatatgtttagtttgttaactaatcacatagttgggggctacacctaattaggtgcatctattcgatgcaccatattcttcatcttttcgccctttacagtccactcggcaggttttggcttgaagagtttgaagtactcgggttatcaactttgagaaggctacgatggtcgactgcaaaggactcgggggctactgtggagattatgggtatcccatatctacacggcgacggtattcgaactgggtaccggatacttaatgtagatagaatatcttatctgtatctcgggtttgtttcttaacttgtgtatcaaggaaacaccctgagacttagtcggttacgactgtattttacctctatcttcatattccgttaggaatatagattatcttttgtaatccggactccttcccatatataaggggggtccgggcgcctctaggggcatatgctgatttttcccgaatcatacaattaataatacactcggcggattcatccccggacaggagtagggtattacttcttttataagaaggcctgaacctgtataaatcctttgtctccaaacccatacactttccgagcttgatagccacccccttttattattgccgaaatctagtttcgacagttaggtacttaattaggtgggttgtattactatgaatgttgatcgaattaagaatccatgtataccatgctcgatctcttttaattacagttgttctgaaatttaataattttgaaattcagaatcaacaaatgtgagatgtactcttagtttattaatactcatgaattcaattctaaaaatctacaataaataattagcacgatgtaattgacatggacgtactcttctattaatctaagctcttatatttcagaaaaataataatcgatgtgttcatcatgattaacattttaatatttgtaacatcaataacaatagtttgtgtaagacatgattggtgactagcacatacatataatatcctagtagaacatttgaagtctaagtttgaccaacacatcaaagaaaatccaaactgcaaacagtatgtgcactgtgttaattaccaccgtatttaattaatttttcttctcactttatatacatgtcaagcttagactaggatttttgtggtgtactagtagataccaatgtactgtttttttactaattccttacaagtatttgaattatattttaaaactaaaatatacacattcagttcgttgattatggccttgttccatttgttttggtcccttatccatggaaccgattaatgttggtataaaaaaccttcaaaatcatttatatttcatcgttggacccaaaaaatggtggtttttggtacattgccccctgttgcatcttactgacaaatcaaaaataaaaacaatatctacgagatggaagatatagaaaatagataaggatgacattatttatgttctattatttgcttatacgtttctctatctttctattgtttactatcgttgattaattgatgacattattgttgtctttacgtagacgtggacgtaaaaaaaattgcaacagatgacacatgaatgattttgagaaccaattgtaaaagatggaccaaaacaattgctgatggacaaaattaaactatgcttttttctttggaaataaaggtacatacacgggcagacatcctctttgagaggtagaatacacttgtttagtatcacaatatttagtatccatccgctctaaaataaactatcttcgtactagcatacgaatttagatatagagtccacttatttcgggacggatggggtacaccagagatgaacacacatacacagtcacacaggcaagaaaaatatacggagtagtaagcagaaatgtctgatgatttgatcgatcgcgtctttttccgccacactgtagtccagcgcgagacggcaccagctgctcttcactcttgagctgtttcacagtacagcgatcagtccagtcctcgagattacgattttctaatgacaattagcgcgggaaagcaatgtgtgtgagtagtttgttaattagcaatgcggagtaacgacagagactgtttggttggttagagatggttactgttgcagcttccgacagcaacgtggcgaccggctgcaacgtcgtcgtcgtcgtcgtcgtcggcgacgacgtggcgcggcggcggcgacggtggcggcggcgacctcctcctgaagcgcaccatgaggccgttcttcatgtacagcgtcgtggtcagcttcggcttcacctcctgcccgggcaccacctcgacggcgaacctggacagcaccgccgccgccgcggtcttcatctgcgtgtaggcgaaccgcttcccgatgcacagcctcgggccggcgttgaacaccgcgtacttgaacgggctctcgccgccggcgaacgcgccgccgcgcatccaccgctcgggccggaacgcggccgcgtcgtcgccccacgacgccgggtcgcgcccgatcgcgtaggtgtagtagatcacgcgctgccgcgctcgcaccggcgtgccgtccgggagcacgtcgtcggcgagggcctccttgaagtcgacgggcaccggcgggtacagccgcatcgcctccgtgagcgccgcgtggaggtagtccatcctcttgatgtcgccgcccgcggcgaggacgtcgccgacgacgcgggactcgacgtcggggtggccggcgagcagccagaagaaccaggcgagccccacggagctcgtgtcgcggcccgcgaggatgaagctgatgcagaagtcgcggaggaactcgttggagtagtcggcgcccggcgccgatgacatgagccgcgacaggaggtcgcaccggccgcgcaggctcccgaccttgcgcatctcgttccggcggtcggcgaccgcccgctcggcgaactcgcggacggcgcgcgtggcctcgacgagccgccgctcgctgccggcgcggaggagccgcttggccttccagatgaagggcggggtgacgaaccgcaggagcgagagctccgtggcgagctcgaacgcgcgcgcgaacggcacgtcggggaggccgtcggcgaggcacccggcgtccaccccgaacgccacggcgcannnnnnnnnnnnnnnnnnnnngagcagcacctcctggaggtcgacggcggcgccgccgccactcagccgctcggccagcggcacgaggcgcccgtacaccagctgctcgatgctcctcaccgagaactccacgaaccgcgacgagtgcatctcggcggtgtccgcccggcgctgggcgcgccacgcctcgccgtcggcgttgaagataccgccgccgagcagctcgacgaagcgctcccggtagtagggccccttggggtagttgccgaagttggccctgagcacgtgctcgacgttggccggcgcggaggttatgacgccggaggagcccccgccccacgtgccgcggtacgggaacacgccgccggcgcgcagcagcgcggcggagccccactcgtagatgtcgtcgcggtggacgaacagcgtgggcacgatgcccactagcggccacagcaccggcgccccgcggcgccgcgcccgcaccgcgctcacggcggcgctgaacgcgaacagcaccgcgccggccaccgccaggtcgctcgcccgcacgtgctcccgcaccgcgccgacgatcgcggcggcggcggcggcggccatggacgcgatcgccatcgatcgtgtcgtgtctctctccggcgccggcgaagctgcgagactcagtgacccgtttcgatcgatggcgcgagagaccgcgagagactgagctaagcagctgggagtggagcgtatttatagctagggtgcatggcagcatgggggtggtgtcgcaatatgttgtttaattaatccattaattaattgacaaaaaaatagttggaggttggatttattaagtaagctagtgttgattatctttaaagaaaaaggaagagcgagcaattaatctactgtagaaatgatattgaaggttcaattctaggccccgcgcatttatacagtagctaggtaatttaagaagtgatcaacccatggatttaagaatgttaattttgtatagccgcatcgacgacgcctcacgaatctagcatgctagcattggagagaataatatcattaatttcgacggatctgcacacacactgcaacgctcatcgacatgcattggtttttcttacgacagataggtccatgagcaatccgttcgtgctgaaagagcttgtgtcaccgcaccggaaatcatcgggagacgatcgaaacgcgtctggcgtgttgggagcggattttttttttggtgtacaggccaggggcgatctcactgggcggatatataagaagtggttcttgtctctcgagactgacatcccctcatttcatacatatcgtttaaaaagttaccaatttttttaaaaaaaattattatgatagatcaatatataatatatcttttcgcaaacatgcgaattaaaattcgacttatacaattcgaaacaaaaataacaaatttgaccgtgaattacgcattatattcatagtcaaatttattgtttttgtttctatttgtataagtggaatttaaatttgcatgtttgtgaagtagcatatcacatattgttctatcctactaaattattttgatgactttttaagtgacatataaaaataataggatatccgcttaagggatgattcagtactctgggagaggaatatttttgtgtttttcttaaacatatatttctcttccatgtgataattaagacttgtgttgaatcttggtttgcatgcagtgtctcctgtgtatgcatatggcaaaccatgcattctcccaggaagaaggcctccatgccatgctgcagtaccacccggagatggatccagcataggggcgttggggtcttctgacgtaaagactgtaagaatcatcccactattttttttttaccatatccgtcaccggtaccaccggtacgatcgacatggtgcatgcaccggccggcaactcgatcatcctgggagtgtgcatgtatatatagtcggtctccatgcatgtatcgatccaccggcacgatggccagtcccagtacggccaaaattaatcgagccgcacgtgaggtgaaaaaaaaaaacacttaaattcatggctcaaatcggtttggatccttgagcgtcgtgatctcccttgggccattgtcgtcgtgcctctttcttctctctgataggactctccaggtgaaaatcagttatacgagtcattggatgaatagcgacggtactttcggtgtcacgttattcttacgagcgtcgttttaagaatattctgtttctatcctatgtcaccactaattagtaaggtcttcgacaaagctcttgggaatcgtctttgggtttgaagtttgaacgagggatgagtgaattttcttctctctcacactctccctcggtaaatccatctttgtggggatgaccacgagtgcgttggtggcttttctatttggagatgtgatagtacggtgcgtttatgccatcttggggctggcggcagccagcttggcgctagtctttttttttttctcaggaatgtgtgttacgagctatcaacatgtgatgatttgcctttgtttttttctttttgtggttgtcttctaggttataatctagtattttttttcttactacatactccctccgttacttaatataaggaatattgacattttgcttgtactgtttgaccattcgtcttattaaaaaaaatggaattattattttttttgacttactttattatccaaagtaattttaagtacaacttttcgttttcttatatttgcacaaattttttttgaataagacgagtggtcaaacaatgcaaataaaatgtcaaaatcccttataataggagacggagggagtatatttaagaaaattagtttgaatcaaatcgaacttataattgtaacgaactgagcggagccaaagttttaactcatttgcaaggctacttgcgagctactagttttactcattagtaaaagaaatatgtctattctaactaatatgtacttcctccgttcctaaaaaaaatcaactttgaatactattcttagttagtgtttattttctgttgtcgacgcatggcatatatcacatttttaaagctgatataattgggataaaactgattaacgaatctaactaggttgacaaagtcagctcacgaacctagccaaggcatggttttttggtttttttggggctgtttggaaaacagggatttgtcatgttacatccgatgtttggacactaatttagagtattaaacatagattaaatacaaaacacatttcataaccttggactaattcgcgagacgaatcttttgaacataattacaccatgatttaacaatgtgatgctaaagtaaacttttaataatcatagattaattagtcttaaaaaattcgtctcacggattaactcttatttatgaaattaattttttattagtctatattcaatactccaaattaacgttaaacatccgatgtgacagggacttaaaaagtttccccatctaaagagcgccttagcttgctagagttaatgaggctcgactggctcgttattccctcttagccgcatggacgcaagtggtcggcgcaaaccatgggagctcaccgtggatcgataaggaagtttcgcggagcccagccggcggccggtggccaagtggccggcgagtgaattccaccttccacacgagggaacggagaggcgcgcggatggggcggccgtcgagattgtgagaaattaagagcatgcccaagagatgcccaatactactcccaatcctaaaattttgaagttttatggaaaattttagctccaacagaactccaatcaagatcccaaaaaattggaaatcccaaccccgtcattctcgatctccacatgttgggaagaccgatggactcccaatccaccgatcgcacgaattcgcgcgcgctggtgaaatgtcctagccatcatgagctcgtctaccaccgccggcagcccccgagctcctccgtcgccggctcgttgcgagcttgtctggtgccgctggccctagagctcgtccgccatagcgtcaattcgcactgccgccagactcagagctcgtgtgccgtaggtctgtcgcttgttcctccgccgacttaattcgcgtagccgccggaccactattcgcgtcgccggcagccacagcaagcttgttcgccacaaacctgtcactagttcctcctcctccgacttgattcgcgtcgatgccgaacctcgaatcacatcgccgatagccgtcgcgagctcgtccgccacaagctcgattcacgctcccaatggagccctgattcgcacccacggccgagtcactccctcgtccacccatggctcgatttctattcgcacctcccggagctccgatttgcaccgcggccgcctgttgctagcttgtcggttgtcagtttgatttgtgtcaccggccaccgggatcctcctaccccagatacccccgttttatgccgccggcggtggtcgcgagctcatcggcctgcggattgattagcaacgccatcggacgtcgcgagctcacccaccaccaaaccccgatttgcgtcgccactggctgtcgcaagctcgtccgctatcggccccgattcatgccaccaccagctcgtcgtgcagccgtgcaggaggagagaacagagagaagatgaggaagaggaagaaaaggcacagctaggtgggcccacctgtctatataggaaggggaacggttgatagttttttaggtggtcccactttttattatacagaaccatgtttacatagtttgttggaagagaggatattttagatcctcaaatcctagttacaaatccctaaaaggtcattttgggagttgatttattggttatttgttggtgatgctctaagcgcgcgcccggcaaccgcctggcggggagggggggggggggggtggggtcagcattgagcctattgcctaagcattcatcaccggtcaagggccttggtgttttgttgtcgttggtggtggtgtctccatcccgcggtttactttaccgccaaactttttgctcgtttcggctgcaccgcttgcttcctcgctgccttgcaaacgttttccgagatgtccaagatgtcctcttgaagatgatggttttgtagctagaaaatggaaaaggatttgttggcctcaacaaccaggggacaaaaaccatcagaaaaagtaggctgcaggctgttgtgatgatactgtagaatagggcccggagcgatgcgatgcgatgcaaccgacgctgccggatttggtagcctttgtcgttgggctgcattttcgtccaggactcgagatcagtcaatactgcaagcagtgtgcgtgatataatatatcagtcaactaatgcacacaggagggtgcaagcagtagtagacaacatcaaaggtgaggaactaggggaagggggaaaaacaaacttacaagtacagcagcaaacatttgcacaggtgtcaatcaagagacaaaaaaacttaagctaaacgtaggcaggcttgaagcactgtgaatttgtgatagaaaagacccggctgtacttttcaaagaatgactcgaggcaatattctgttcactcattgggactattaaacagacaaaaagcaatccaactttccaagaattgataactgaaaatttgaagcaaacatatttagatgctgtacacattaaaattctgagacaacttgcgggtgtggtattacaatgaaatggcagataatttacaactcctgcagatttggcaacctggaggtccctatccaactcagttccatccccctatgcaggtaggggttcttccaaaactgtgatatcataaagtatcataaaaagaacagaaaaaaattgcataatgcacattaaatgtccatagaaacaaaaataccttttgttttttctgcagcttctggtctctctggtgccttagtgggtacatcaggaagctcaataacctcgtcaatgtcttctgcagcctcagtgacagcaggtgtttctgatttctcctcaggccgtacttcagtaactggagcatctggtagagactcaacggcaagctgcaacagacagtcatgatcaacaatagaagagataaaccgtttatggctcatgaaagttcagaattaaagcattttcatgttggtagtttgctcaaaatggaaaatgcataaaagctcctgaaaatcaataaaaacctgtgcttccaagttctcaaattcagccataacagcctcctcatcctcagcagatagctgctcacccagagcagcatttatctcctgcaatcaatattggtcgataagtaaacaatataaggaggtccatgcaattgtagttggagcaccaacacaacagaaggtaaggcaagtgcatagaccatcaatagaaaagaaaaacgatagcgctgtttgtgtaatctgacacgtcgatcacaaactcgcaaatctacaaatgttatgcaggtcagatccattcattcttaagctgttaactacatagaccaatgttacactcatgcacaactgtttccaattaaatccaattataggcacacaaatagagcacatcctatacaaaatcaggagacaactcatacattcaagaagcatatgggtgtaaacaataatgccgccattccagaaccaagactgctataatctttcagaaaacctacagagtctatttagtctggcataagttgatcaaaacagcttttataggaacccgatgtgataccaaaggtgtaactgaggatacagtaaaacaatttgagaccatgacttccagacaactaaggggataaaacaactgtaaatgtagtaacaagcaagagtgtagagtttattcaacttacatcttggtaagccttggcctcagctgtgtcgtccatcaacttttggacatcatcaatatttatctcattctggatagacttaagagcagcatttccagcttttaggctgtcaaatacagccttctgtttacttgctagttcaatgtctgacagctacaacaagcaaacaaaaagaggatgtcaatcatgcatcttaactgaacgtttcactgattatcaattccgattgtaagtaacagatattacccagtcaaattattttgaattcataaggagacagaatatgtccaatagactacgaacctgttgttcgacattcatttgccatgtgtcaacttgtttcagcagctcttcctgtgctttcttcttcttcagtgcaatcaaagctctgtctttcttcttttgttgaactagctgccgtgcagcttccttttctgcttcaatcaccttctcaagctggaagagggcaaaacaaaaaaaaaagaaaccatcataagcaaaactcattaggacctccatgattgttggtacaaaagaattgaactgatttaatgcgacatatgtgcactagcgcagtcaataatcatgcatagtcctattgtactacacacagcagatgcaacctgaagctatttcatgaacagaaaaatattctctgcggcagtgccacactacacagccagtgcaacaccgcgcagaatagtgacacgtgtttgatctcctgctacaggccaagccctctttggtgtcgagctgagcccatctcttgctgccgctgattggagtcaagctggggtgcag

SEQ ID NO: 1885 - DNA, 2881 bp, Oryza sativa
cctgcagccctgtggctctttttatttctgcaatatagaccaaatgattttacatgctgtacaaatatgatgttgtgaacctgccaacctggtttcaacaccagttgtgtttttaagttgtcaatgaacacattgtaatttttacttaagtggttgggtatagtgttagaattggttgtgttttgcaaactttcaggccttcatgtggttggtattcctgtatagctcaacactagtacaattaaagattatcggagctactccttaaatgttccgtgatttgctatgtcatcaaaatgtaatttccgagcacccgaggcatcttgataaagtctaggtaaaggacttatatattacactagaaaatctccatgtatattatcatcaacggttgcttaaaaaagctctattgaaaattgaaatcattcaggcttcacatgtagctggtagatgcggcttggtagcattttcaacgagttgacagatgtgtgggtgtaggagaccagacatcggctcggctccagagttgggctcaggctgcagcgtgctattggacacgcatcattattctacgcagtgttgcacaggctgtggcgtgcggcactgccgcggagaatttttttccttcatgaacaagacaataacatgctaatgcagaaaataaagtcgttttgtggccaaatttgcgaggacgagatagctgcaatgcactctggcgtgcactagaagcaagcctggtttctgcaataacccgaacgtgtagtggcatttaccagaagtactagacgcataatgaaatcatcaaatcatctcttactagttactgtttactactactgattgtcacctggtgctctcgctgctactacgatcccatcaatccatgatagattgaagagcttcatgaatcaggccacgagaaaaaaaaaaaactaacaaggcgacaggcgaattcacccgaaacctaatccccaaccacctctcgcacaacccgccgcgatgggcggccgcagcggagaccaaatctggcacgatcccgaaaccccccaacacgcgcgatcgaacaggagcagcaggggaggagatcagccgggtggggacgggggcgcacctgctgctggaactgcgcgagcttccggcgctgcgtcttgagggtgaggatggccctgtccacgtccgtcaccttgggcttcttcacgaagatgttccccatggccgcgtgctgctgctacctacccggcgccctcttcttccttccgacgcggcggcggcggagatggccggagaggggaggtggaaggggagggggaaaggtggactctcgaggtcgaggaggagacgggcacggtaaccgtaagctggggaagtcgggaagggaggtttggggatgatgtggatcgggttgggtgtgcgactcaaagcggatcggatctggatttgttgttagtgggctagcgctcaaagcccaggagagatgggaggcccatttctcagatcgacgttgggccgcctggtacgccgatgctgtcgcaaaaggaacgaagagatattatttaactattttgcttgtaactgaaaccacgtgccatagatataagacggtatacaccgtgagagatactccctccgtcccataaataacgaatctagaaccgaatatgacatattttaatacgatgaatctagacatatgtatgtctagattcgtagtactaagatatatcacatccggtactaagttggtttttatgtgaccgagggagtaataaatagttaaacgtaaatgtcaccaaaatgactgttactaataaccccatccataatttttttcacctaacatagcaatgcaaaactaaaaaactaaaataccactattttattaaatcctatgcaactatatccaattttatttactcccaatacaattattatctactttcacaaactttgatgtgaaaataaacttttttaaaaacacagcacgaacgcaaacgcttacaacgcgcgtatactcacccgtataaacgtgaacacacactttatccctatgagcttctccagaggactggacatatattttttgagattaaagaagccaccacatccatctcgctatcgacggttacgtcatctaccattgaaaaaataattagccttaagtctaatacttaaatttggatgggttggtttcctcgcaataaacctaaccagttgagctacgctcactttgcaacataaaatttattttagaataggttgaacaagcttgttattacgggactgagggagtactaattactgtcaataaataatttgggcacagtagattttatcatatctttcaatctttcatcacaatatatataaataaaatggattggccaaagtagcatctctcgctcacgttgctccagcctaggggcaacgcgagcgccccccgcgcaccgaccaccgccataccttcctcctcccctctagctcgccatcgctcgagtggcccaccggaaagccatctggccgcaaggacggcggcagcggggcttcttcttcaccaaaacagcgtcagctggggcacccggcacccatggtaaaggcggctagatccagcaagggcacgccggcgcccacagtggaggcggccggatctggcaaaggcacgtcggcggacgtcgtggcagcccctacaaggagtcgaaggtcgtcgagatggccgcaagcgaacggtaggcaacgttgagtaggccatgggcgacggtggccggcggcggcatggacgacgacgggccttcggcggcggtggtggaggacgcgggtccggcacggccgtgcccggatctggccgtcccgtggctgattccaacgctcccgcgatggcggcacg

SEQ ID NO: 1886 - DNA, 7442 bp, Oryza sativa
aactgtgtatcccttcaagttttgcatggttcctggatcccactacaatggattttaattatatttcaaatattgctgttaggagtaggttgtctcagtaccacaacctttgtgctaattaaggaaacatggtaaagttctaggggctgaacatgggttttgcatagttgaagatcagttaggggtgattatccttctgacatgttataatacttttacatgatatatatggcccttcatgagcctaagcccacagtctaaataagtaaatatacaagaaaaatgagaaggttaatccttaaatttacgttttagattaatatccaccatttgatgttcataagcattaagctgtgataatggctgcctgacttagtatgaaaactagtttttaagaaatatgtatatagacacaacctgattctactaagcatatcaatcagcagatcttcagaatagctccataaaacattgcgatataaacttataatggttctgtaaaagcaagaaatacctggtaattcagatttaatttcactcttgtttgccctcattgttcctgcaacgttgttctgagaattttggctggatttggaaacctcagctgctgctttctgagcttctgctgcttcctttgcagcagcctcagctgctgctttctgtgcttccactgctaactttgcagctgccttctgtctggcctgcatcatagttcatgaaatttctggtaaactggttatgcatttaagcgactaccagtgaagtaaagaaaattaggtttctgaactacgtaggttgtaaagaagttcagtgaagaagtaacatgaataacaaggtattagatataactgaactagatggaactcaatggactaagtattatgataaataccagagccaaaagaaataacaatgaattaagtctcacatattgacatatatcaaaagaaatatatcagtttatgttaacaaaaacacaccaagtgaccagcacatctaggcaaacaaacctctgcttcttgtttggctctttcctgccttattttttcgtccttcatggcttgctcctttcttttagcttcttcaagagcagcatcatctcttattctacgttccacaatttgcgatttctgttcatgatccctttggaccatagacaaatgtttatcaagtacttctgcactgcaaaaaggcaacaattataacaaggtacagaatccaacaaaagatcatcagaaaatccaagtataacttataacgaaagatcatcagagtatatgtcctttatcctgtgagaactactacaaaggaaaacaaatacaaacgctaacatgcaaagtttctgaaaaaatatttacagtgctaatgattgaactggaacataaagttactacacaaagaagtacaaaaactatataattgtgtcacagatagttaattccttatataacacaaatagagcatttaaaaaatagtcaacccttagtctcagtcgctaatcatttgaccaaacaccacaggtataagtatggaatatttgtacgttaaacccacacgatttaatcagttgtgaatagaatatataaattgctgcaaaatgtaaagagctgaaaccttgggcttggaatttctcattgatcatttaagtagcaaatttaaccaaataacgatgaggataatagcaaatggtggaggaaacattaaggatcttagtattagtccacaatcacccaataaacctttatattggaatttgtgcatataggagatgattgttttctcttcaaaactatgtgcactagaaataatccatgataaactgtgtagctactagcaaggtccgtcagccttcatgaatatataccttttccactcaggagtaataaactatattggaatgaaaaacttagcactttgtaagccctctttacaataaaataaattgagttatgacaaataaaaatggcataactttacaaagcaaccaccaataaaaattcagtcttgacaaactagtacaagaatatcttgatatgtgccacagaaaatcctccagtaacaaaagagaacaaactagtacagaagttaaccctagtcccagaaaattgcatcaccaaagaccttgtaaaacatacagtttcctcaaaatttgaaaaatcaacagtaatcatgaaatgtagatttaaaaagacacaggagaaacaattcaacaacaaaaacatacatttttctctggaagtggacatctagccttctgtctatctcttttcttgattctgcgtatttctgtagtcgagcaaatgcagaaactgttcgctggatttcactttggtggcatacctccaatgcagatagtttacttctgacttcctcctgaagaaaaaaaatcatatgaagaaaatgaacaaaaaggattcagcagatttaataaatccatcatggtaaaaaataaaggcatgcaacatcagccaaaaagataattagtactatgatacccaatacttagaaatttagtcatatgacatccctgttggctttctatgttaaacttcttggatcacaatatccaatttgaagtaaatgcagtattgtatttgaaaaatcttcttcaagtagcaactaacagaagtgatgtattgtttttcttgaaatttcatcatgtcattatccaaccatatcagtgtggcactacactaaccttaaagggaacaaacaaaagcttcattcaggaattcatatacagtataaccttagaaagatgaaagataatggaagcatccacatgcctggatagcttaaaatacctacataaaggtgaggaaaaagatataaagttgatccgtaaagtgtaacctaatgccatggtaaccctaaactagaatgaggattaatggtaatgaaaataattcaatggtctattgccaacacatcaaagaaaaatcagcccataagtactgcattcagtaagaaagatataacagtatagattgatgaatacacacttgaactttcagatgatgctcacgttccagctcaagcagaatgctcttctctaggctccgtttctccatcaggtgatatggtgcaatcctgccatccatttcatcctctgattcttcagcatcactaggaagaaaacaaaagaaggggatatctcacacaatacgccattcatttaaacttaattgcagataatgtaccgtacttcaaagcaaataaattgcaattgcagtggccaaatttcagcatcaaatcttcacctggattcaagatcattgcatgagaaccttgctccagtggccttggccacaagagcccgggactccccatcactgtcgtaatcgtcctcatccgtgtcatcttcctcttcaacccgcatcacaaaggccttctccctcacgctgccactgctagccctaaatgaaccaaaaaaaaatcatatagaagcaatgtagagggaaacgattgcagcttatcggcgaaaccataagcaagggagcgcaagggattggagaatagagataccactccggcggctgcttgaggggcgtgggctgcgcggtgcggcgagtggcctctagcgcgtcgagctcggtgaggacgtcgccgagggtccagctcgggcgggggtcgagggccctagggcaccgcagctccacgcgcgcgaagcccctgcgaggaggaggaggaagacgtagagatcagcctgcctgccattaacgaacaccaagcggtgacgagcggaaacggcgatggggggctcacatggcggccgtcgaccggcgaggtccgccccggagcggattggagccgcgccggcgcatcaaaaccccctaagttgcgggaggcggcggcggcggtggcggagaggcggtggacgctagttgggtctcccggctccagtcccacctccagccgctaatggagccgtgcagacaagacgcggtctcccttgctgccgcgcccggttggcttcctcgccgtcgccgctgcgccctgccctcccgtgccgcggtgccgctccgcctcagactggccgccgccgccggagcgcgaggccgggatgcgccgccgccggacgtagaggagagatgggccttgggccgaacactggttccggaggtttcgcttgcttattttggaagtacggttttctgagagcaaacggcaattcgaaataaaaccccagaacggaactacgataaaaaaccaaaacggagaacgaaaccgaaaagcaaagaaaaacggtagaaattcgattcggtggaccgacttggatcggcgatgcgaggaggtcggcggcgcggatagacagcggagcagatcgacgccggaatgggacggggaggcagccgtctaggccatggctgggccaatctggcgggctggggaagacgaagatgacgccaaggctgggccaacctgagcttaaaatgtcagaataagtctgtttcacctctctctctctctctctcttctttttctttttctttttctttttgcccttggtcgcatcgcatcccttaaccgtaaaaccgagtctaacattccaacttcaaaaacgggtttagattgactccttagatggttttggaagcggcttttgctgacatggcaatttgactttggtttaggtatgctgacgtggtagcccggtcatcaaaacaattgaaaatagaaatttgtcctatatgtaagtgataagaatgaaaataaaaaaatttgggacccaattgtcagctccattcctcccttcttcaatttgtatgtgcttcaagccgcactatgacacgtcaaagtgcggcggtgtggcttgcggtgtgtacagattgaagaaggaggagtggggctgacaactaccccttcccctgtttttgtttattttcatccttaccacttacatgtgagacccatttatatttttaattcttttaatgactgagataccaccttaaccaagccaaattgctacatcagcaagaaccgctttcaaaaccaccgacggaatgaaaaactggtttttgaagttgggggaggtgttatatcctgttttgtggtttaaggatgtcatttgaccaacagcaagggatgagtgaggtgaaaatagacttattcctaaatgtatgatcggacttggatgtcccattaaagaaacatttcgggcctattcagattgtagccaaaataaaccttaccaattttttttcaatttggcaatattgccaaattttgatatgatatcttatgtatttatcagagtttggtaaaaattaaattgatgcacatatttaacaactttaccaaaaaaaatggtatgatttgaaatggcatcaatcttaacaacccattcatatgatcaattgatcatgttattacaagaagcaaaacaacttaaattttgtttaaaaacacataattatatattatcccaacaaataaaacgaaagaaaaattatttttcagagataacaaaactgaagagaaaaataataatgttacgtaacatggttaatcaacaagtctcggagatcgattagccactgcatccgaagttccgaacatccgtctcgcaaagtgcatgctcccagactgacagaagaaaaattattgtatgtttagttaacatcaaaattgaaagtttggttaaaattagaacgatgtgatggaaaagttgaaagtttgtgtgtaggaaagttttaatgtgattgaaaagttgaaagtttgaaatttttttttgcaacttatcacggcgtaaggcgcaagaagtatagttaaccaacaccagtaatatcgtacagtactactccaacatgtcaccaaacttctctcggcgcgcccggggtgaactccaatctacccgggatcctaactcgccaccaaacctcctcgtcgttcttcttttaccgcggccggacacggagcaggagcacgcacgcacgtacggcgcgcgctcgcctcactgcatttctatcccggccatcggtccggccgtcacgatgcgccgccgcgtcgctctgtgcctcgtgcttttcgccttcgccggcctgcacgcggcggcggtggaggccgtgacgctgtcgacgtcgtcgcggtggatcgtggacgacgaggccggcgggcggcgggtgaagctggcgtgcgtcaactggccgtcgcacctggagccggtggtgacggaggggctcgggatgcagcccgtggacgccatctccaagaaggtggcgtcgctcgggttcaactgcgtcaggctgacgtaccccatcgcgctggccaccaacgcgtcgctgtcgtcgctcaccgtgcggcgctcgctcctcgcccacggcctcgccggcgcggtcgccggcgtcgaggccaacaaccccgggctcctcgacctcacgctgatcgagtcgttcagggccgtggtcgacagcctcggggagagcggcgtcatggtgatcctggacaaccacgtgagccggcccggctggtgctgcgccgacgacgacggcaatggcttcttcggcgaccggcacttcgaccccgacgcctgggtgcgcgggctcggcgccatggccgcgctgttcgccggcgtccccaacgtcgtcggcatgagcctccgcaacgagctgcgtgggccgaggcagaacgccgacgactggtacaggtacatgcagatgggggcggagcggtgcacgcggcgaacccggcggcgctggtgatcatgggcgggctcgggtacgacaccgacctgtcgttcctcgccgcgaggcccgtggacgtgagcttcgcggcggcggagcgggggaagctggtgttcgagctgcactggtacagcttcgccgacgcgcgcgcctgggagtccgaggacgccaacgaggtggtgcgggccgcgtggtcgcggggggcgtcgcgcggcgtgggcgaggttccttgctcgacgccgaggttcccagctctttcctcgagcgagttcgggcgccgacacatcgcggcgtgctcgcgcaaggacgaccggtacctcccctgcgccgccgccgtcgccgccgagctcgacctcgactgggcgctctgggcgctgcaggggagctacgcgctgcggcagggcgtcgccggggccgacgaggtgtacggcgtcctcgactggtcgtggagcaagccccgcaacgcgaccgcgctctcgaggatccagtcgctgcagcgcccgctccgaggtcagttcgctgtcaacggcgtcgctcgctcgcgccatcatcgccggtgcaacgtttctaattgaccgaagggttcgccggcgatgcgatgcgtgcagggcctggctacgacgaggcgaggccgtacaccgtgctgttccacccgctgacggggcgctgcgtggtgaggcgcgcggcggatgacccggcggcggcggcggcgacgctggagctgggccggtgccaggacacggactcgtgggccta

SEQ ID NO: 1887 - DNA, 727 bp, Oryza sativa
tcgcacataatttctccgcacaaaatgacttatctttttgttgagaaaaatgaaaagtttattctacttgggtagtagtactatggtggctgatctttttttttctcccttttagcggttcatgagagacgcgcacgaattgatgattagttgcttggttggatgaataatttgcagtttacaaagtgtggagaaaggttccagtttgagatgaacacggaatgtgtcggaactggaattggatggattgtttatagggcagcaaccagctaccaagtgattgctaatcaagctactcaattccattcctttcatttcaatgattgagcaataaccatatgccgaataattttgtaaaaatggagcagaaagtgcgagacaaatacacacccaatccatttgttcttcgattctttttccctcaaccacctcacatcaccattattgttacactattccttttccaccacttatcctcccgtttgcaattaaaaagaataaaaagggaaaaacaattgcgagaagagaacagcataataataacatccacaccttcaattcccaatttttttctccatttcttgctaaaacagtagattttttttttaattttgtttgcctctcagaacctaacgatcttggccgcgcgcaccaccgggttgtccctggcgatggcgtccctcgccgccgacttgtagtcgtagctgcagccgtggcggtcggagta

SEQ ID NO: 1888 - DNA, 636 bp, Oryza sativa
tgcggaagttcctggcgcggccgcagcacgagggcgtcggcgccgtcgttcgccggagcatcgggaggtttgagctgaggtacttcgatccgttcctcgtcctggacgagttctcaggtgagtgaattgcttctggctcggttttgatcatctggtttagagtgatagagatttgcattttttgatcgtcttcttgatcgaatcctgtgcagtgtctgctccggctgggttccctgaccatccacacagaggtttcgagaccgtcacttacatgctcgaggtaggcagagtcttttaccacagttcacattctgttcgtcggtagtagaacatccaactgcatatagagcggccatgaaaattccttgcttaatccccagtgatacgtacagacagcagcgtcttttgacaaccacatcacacggatcagcagaaacgaattaaacgcgtttcatttgtcaacaacgcaaacctgataggctgatacggagtagtagtttttagcaaattcagaacgtttctttccgtcaaattgaagaatctaacccatccaaacgggccctgttgccttgctctgcctttggttggtagccttcctacgtcaaccacctcgcgtcgcatatacttttccgcgct

SEQ ID NO: 1889 - DNA, 589 bp, Oryza sativa
aggtcatttcgttaatttcaaaatacgtcgatctaatcatttgaagatgcttataagtgttaaaatgttgtgggcgtctatccaaaatgtcgacacacttcacactacactagcccaagatagccacgaaccggagaaagaagaagatatttatcgcgaggttggctacctgtgacgtggccgtggaaggcgcagtcggtgggggagttgtcctcgtcgagatacaggctcccgcaccgcaggcatcgcttcctatccttctcctcgctccgactgccctgctccaccgcagccgctgctgccgcggccgcgccgtcgcctggagacgcgccgatccgcgccgtcgcaggccgacacggcggtgccgcggcgttccggtggcgagacggcccgcgcggcggcagtaccggcaccgtgcgggttggtgcgagagctgggctcgccgccatggcgtgatgaggcgacgggattggcatcttgtgctaatggagctcgcactccacacgcacacacagacattcccgctgagaattgctgcctcttttcaggttgcggctggggggtaatgggccaaatacaaacggcccaa

SEQ ID NO: 1890 - DNA, 560 bp, Oryza sativa
ttccgcggttgtcgtcggctccctccctcaagcgagaaaagcaagaagcgcgctgcctccgccaaggctgccgacgaggcctccaccaaccgcacccgcgctacctcccgacgccaacccctccgctggatccccattgctgtatcgttctcctcggtgaggtggggacttctctagggtttggggattaggggatttatagggttcctctgccctccctgcgtataggaacgaatcagaatttggtttttctttatttttttctttacttcatgcgatgggattttgcatggtggttctgctccagatctggaagcttcaatggcatgggtatcatgtgagaagctccttgctggtggatgccccttgttcttctgttccagatgtacaagctacagggcgacacgagctcctgctccctgcactccataggttagcctgcatcgacgaggaatacttgaggacgccaggggtgaagaagggtgtagcctttgggagccttgccgccagatccgccgtatccagcggccccgcgcgtccccgacatccctcttgccgtg

SEQ ID NO: 1891 - DNA, 1134 bp, Oryza sativa
gtttaccaagagaataagggattcggccagtaaaccctagagttatatgataggtagtagccactgcagttcagttgcattgcccaatgaatcagggatatgacctcccaacatgttaccacccaagtaaagttgctgaaggttaggaatgaagttgccaaggtcagatggcaatggaccatgcagcatattaagtggtagtgctatttcttggatgtgtgacagattgaagagcacctccgggatcctgcctgacagccgatttccacctagcaacaagtaggacatgttggacagcttcccaagctcctcaggaatggatccctcgagcatgttgccttgaagaatgacagtattgagcgaagtgatgttccctatttctggtgggatgatcccagtgaggttgttggagtgaagccgcatatttcgcaggttggagaggagggctatgttgggagtgatatcaccaactagatggttccttgaaacgtccaacgtcctcaatctggtgcagtttatgagtgcctccggaataataccctgcaacgagttgccactcaggtcaagaaacaccagcttccgcaggttgccaagctgaggtggcactcggccggagagcaagttgtcggggaggctcagagaagtgaggtacgacatgtttccaagggaatgggagatctgcccggtcaatgtttgcccaacgaggtccagtgccacgacgcgatgcgcccgctggtcgcatgtgacgcccttccaccggcacaagtgtgtgttggtgttccacgagctcatggctccgaaaggatcgttcgtgatcgctcgcttgaaatctaggagcgaggccaagtccgtgccattgacgtccccatcttgcgttgatgcgccgcccttgatgcctccagctccatatgacagtaataacaacaccaaggtgcacggtataaacatacccagttccatgtgctgcttgcttgtacccttatgagggatctttgctagctgaaagaactaagggcctgttcactttgctgccaaaaaaaaccttaccaaattttggcattgccaaaattttggcaactatgccaaaattttggtaacttgccaaaattttggcaggatttcttatatagttac

SEQ ID NO: 1892 - DNA, 700 bp, Oryza sativa
aattcctgcagcccatctgtcacacatccaagaaatagcactaccacttaatatgctgcatggtccattgccatctgaccttggcaacttcattcctaaccttcagcaactttacttgggtggtaacatgttgggaggtcatatccctgattcattgggcaatgcaactgaactgcagtggctagacctatcatataaccaagggtttactggccgaatccctccttctcttggtaaactccggaagatcgaaaagcttggtcttgacatgaacaatcttgaagcaagagacagttggggatgggaattcctagatgcattgagcaactgcacgcgtcttaagatgctctcactgcaccaaaatctactgcaaggtgtcctgccgaattctgttggcaacctctcctctagcatggacaaccttgtgttgagtaacaacatgctttcagggttagtgccctcgagcataggaaatcttcataggttaactaagtttggattggatttcaacagttttactggtccgattgaagggtggattggaagcatggtaaatttacaggctttatacctagacagcaacaacttcactgggaacattccagatgccattggcaacacctcccagatgtcagaattgtttctttcaaacaatcaattccatggtctcataccatccagcctaagaaaacttcgacag

SEQ ID NO: 1893 - DNA, 1539 bp, Oryza sativa
ttttaaagttaagtttctctatttttgcctcataaattgaatcatcagtgaaagaatgccaacattgggttaccaggcgtaagcacctgagatagagtaacagatatcataatgtggagaaggcacctctgttatgctgtttatatacaaggatttgtaggtacaaactgaccttaacagatactgtgcgcaatgcacacctacatctttagatatcagataatcaacaagcaccaagtgatcatagtgcagctgcagaatgacattaaaataaacaaatactattatcctcaagactcatattgtagagtggaatcagaagaagaaattggaaatctacagaaaagtaatggtgcatgagccagcaaatgcatgagactttattaagtttgtaatgtccctttacacattgtataaccctccatatgattgtctgaacttgaaagaacatggaacataaataagagtgtcttatttatttttttttgagtacaagctacggtaagaaggaatccgcaaccaaataaatagtaaaggatgcccccctatcttaaacagttttgaacactgctgattactaaagcttgctactatatttttactacatacagcagtatgcctgtgcagagaaatgaacaagaactgaaatttaaaatgccaccaatccaccatgcagagagttgtgcttcttataaacctagtgacatgaagtaaaagtattttcactgactcaccaataaaagcaagagatggaaaacatgaactgggtcaaaaatgctcgagaacagtttgccaccaatcagttcagaagcccatctattctccatgctatctctgcaagttcagaaaaaaaaagagcataacttttaactacacccagatctggataactttctaagacaaactgctttactctttgcttacattttcgaggaaatgagtggagcatcaagaagttgtaagagaacgttgaacagcatgtcatcctaaagtataaaggaacagatcagtattatgttaacacttaacactaggaaaattaacaaacttagctgacaaataacttaagcatctagatgaattggtttggaaaaacagaaagtgcagagaagacaaatacaactggaataaaagcattagcacctctctgtaataactaacatgccttttcactggggcttatgccaaacataacaggcaactctatagtagtgtagagtaatataaatgtatgagaaatatcctactgtaaggaaacaaattatgtccacaacaacccacttccgaagacaactacagcatacttgcaactactgccaaatccaagttaccaaaaactacttaaacaaaaccaacaagatgaaacatattttctaccttgaacattgatcaaggttaattagctaccaggcaattgtaacagatgcatacctcctccatatataactgcagaaagcacagagcattgtctgtagatgatttgaagccaaaaatcttatctaagaaacatctctgaaaccagtctgaaatttctgataa

SEQ ID NO: 1894 - DNA, 1214 bp, Oryza sativa
ctattactgcacctgcatgtccattcaaaactctattagtgaaagctttgtatctacaataattcattccaacacaacacatacgctcgttccgcgcatgcgcaagcgcaaccaccgctacccaaccgcctccatagcctccttctgagtgctggccgaggcgcaacacaaaggggcacgttttttctgagtctcttcttcttcttcttcttcttctcccacacccacgccaagaaaagccaggaaccacaccatgcacaaaacccacgacgaacacaccccaccgcctccgccaactcaagctctccgatcgatcgatcttccaaccatatatataacccagccgccgcccgcttcctcgatcgatcccagcgctcggagcaaaaaaaagaacggaattgcttagatcaagagcgagctgaacagagccgcgtttgcttgcttgctttggaaggaaatcatatcgatcgatcaggagatgtcgtcgcggtacgtggagatgctggacatgggggtgcgcatcgcggcgaggttccactcccactgcccgcacacggcgcgcatgtactacaagccgccgcagaccacggcggatcacggcggcgctgcagcaggcaagcaggtggcggccggcttcaggttcgaggcggtgacgtcgtcgtccgccggcgccatggcggtggcggcggcggcggcatgggaggaccgcggcttcggcgccaccgcgccgtcggggttcgacttcgagtttgacaccgcgcaggccgtcgtcgtctacgaccacgtcgccgtcgtgtgaggaggagtttcgatcgatcgtatatatagtagctttggccggagaggatttgattttctcccggaaacaattttgacacaaagggattgaatttgattatgtgaatgtaatgtacctatgtacactccgttttattgttatttttgagatttgatagctgaaattaatggaagaaacattggttgatgcttctccgattttgacgtatacaactactgtctcatacttaccagcatatttgcgttggcatctacgattgtatagaaatgacgtggattttgataaatctcaaaaaaaaaatcttatatgaagatactccctctgttcgggaaagccagtcgttttaaggttggccggataaattaaccggaagtaaaatttaccatattgctcctatttagtggttgcatttgtc

SEQ ID NO: 1895 - DNA, 731 bp, Oryza sativa
catgtgatatacgtcttaagtgcgctacagaggatatacaatgatttgaggtgatatattacttatttaatttttcataatgctttgtttcttctatttggttatgatgcataaaggataggtgtgcaagctcaggtggtgtttatttttatacagtgaaatatgaataatatagatcttaaattatttatttaattatgaatacattaacaattcaaataaacttttaaaaatcatatatgacgtaagaatcataattatttagcttttgtaattattgattatttttatattatgttgttaattagttaaaaattataagacggaagagttgagcgagagaaaagaagaagagaaagtacgcacacatataattatgttttatacattttatagtgtttatttatatgttatagttagctataaatttagtcataaataaattgaaagatatgagcggattgaaaattagtagtataggccgtgtttagttctttggccaaaacttttttgaagtatacgggcacacatttgaagtattaaacgtagactaataaaaaacaaattatagattccgcatgtaaactgcgagacgaatttattaagcgtaattaatctgccattagcaaatgtttactgtagcatcacattctcaaatcatggcgcaaccaggctcgaaagattcgtctcgcaatttacatgcaaactgtacaattagttcttttcatcca

SEQ ID NO: 1896 - DNA, 1564 bp, Oryza sativa
tagctagtttccttgctcgacctaatttatgtcttgatggggttacatttagttccttttgaactaccttagagaaactcttgagtgtcatcctatcattatccctaaagctttcaacatatctatttgcaagatacctagcagttacataattcaactcccactccttctgacatttgtggccatctatatatctttttaccataagacaattcgtcctgctgtcctcagctacatccaacatccatgagcactcttctttacatttagcctcaatttttttcttggtatttcttgtaaatttaattgcgactctattcttcacactgtattgttttattgcttgcctaacttcaatagcatcagagaacaacatcccaaccttaaagattggtgactccatgtccacagcagccacaaagttcttaaatttcaacttaatgccttcattatcttcatcagatgactctggaagcaacaagccttcatcatcagagtcatgttcaggaagcttaacaaccatcttgctgctagccacttcttctatctcaacacagttgtcaaaaacatcatcatcccccttgttagcctcataatcactgtcaacaaagtcaggatctacatcgatgtcatcgtcatcgtcaatgtcatgaccttctataggtataacacctgaatctttttgattcattgtaaacctctcacggctagccacgataggtatagaagcaggggtagaaagagcaacatcatcccaattgatggattcaagaatgtcttgggtgatccacatacaaaagcaatgtcctaaacctgggggctaatacaaccatgctgttagtgcttgcatcaaagttaattctccttagcccatcactgaatgtcttcccaggcaataaccaataaaccttggccttctcagacatatcatatcctagttgctcaataaaatcatcaagccataatgaagaccatgtgtcactgtcacaataatcaaaccaatccaccttttcattcaaataaattttgctactaccaactccagagaaaaaaccaccatgatgtagttcagttgtgaactgttcatcctcgcagcctatattacaagacaaaccattctgatgtgtcaaatcgtaaataattatctgatctattatacacaaaaagattatacagagtacatattcatgcttagagcaaaaattatttctaatcacaaactattcgtgaaggattacttatatgacacctagccttataaaacaccaaagcagtggcggaggcagcgccgggccaccataggcaattgcccaggctccatgcatacaacaacactgccccaatgcatatacaacatattactcattaatcatatacttaatcactttgtctcataggttataatggagattaattagatgaataaatagaaacgaggaagcaaggaccaaaccatcaaactgtagctacagagaccaaactatacaatcacaagattcaagaaaaaacagagaaacatgcaattaccggtacaaatcaatgacccctaactttatcaacaaca

SEQ ID NO: 1897 - DNA, 530 bp, Oryza sativa
ttttatgagtttgccaatgtgtttatcaagggggagattgtaaaatcaaaggtgtttttgattattattttgtgatgaacaattgggcattgaaagttattggttttgttatttggaatttattcacgaagtggttttggagatgattggatttacaggtagccgatccccgctgtcgccgtcgtcgcactcacccgccgccagctgccgatgttgctgccggcgttgctgctgatgttgctgtcgacgacgaagcggtagtggacgtcgttgcgctcgagccccacgccaccgagccccaggatgccgccgcggagccccggcaacatcagcccgaagtgcttcagtgggctgtacaccgtcacgccggcgcatagtagcggcgccgcctgctccggcgctagcctcgccgggattttcaccacggcttcacggcgacgacgcgggcgcggccatggacgacctggcgctgctgccatcggcttcacggcgacgagcgctacaaggaaaccccgtccctctgctccgcc

SEQ ID NO: 1898 - DNA, 7027 bp, Oryza sativa
ttcggatccagaacgaggaggggctggcttgcactttgtagcttcttcatacacagatccatcaaaacacaggagtagggtattacgcttctcagcggcccgaacctgtatacatcgcccgtgtcttgtgtgtttccactctcgcgaactttccacagattaggagcttagaatctcacccagggtccccggccgaaccggcaaaggggggccagcgcggtctcccggtgaggagctccacgctccgtcatctggcgcgccaggtagtggcctctgcgtgtgttcttctaagctctcgcgctctttcgtgtgcgcgaagcttttcctgttcagcccaatggccgaaccagcaaaggcgcacaacctctctccgagtgttagcggtgacgacggggagccgaacccacgccgtcgagctcgtactccactgccccctccacgccaaagtcctaggcgggagaaggcgctcgagagggccgaaggatccgcgacttcggcatccacgggagatggagaagggcggcgagatggggagcgtcgcctcctcgtctacggcgacggcagcacgccccagggtgcgctccaagctgcaggcgcgctcctacgtcacccgcccgtcgcccatgacccggagtctccagcccaacgttggctggacgatgtggccaaattggtcatgacggcgcggcagcgcctagatgctggtgggcggtcctccgccaccaagacctctggtgctgctaccaccggctccgcgtcgtcaaaacggagggcgcggcgagcggcggccgctgttcgccattcggccgccactccttcgtcagcgcctccgacccggaaagatctgcgtggggggccggatgcccgcatcagtatcgagcgccggcgtaatggccggtgtgctgcccacgcaacggagggcgcctcctcgtccggagtgtcacctcagcacggacgcggggatcggccctccgtgcccccggttggtggtgtcggctgtagagcctttgtggcgagccttcggaacgtccgttggcccccaaggttccggcccaccatcgccgaaaaatatgatggcagcgtcaaccccgccgagtttctccaggtctacacgaccgggatcgaggccgctgggggtgacgacagggtcatggcgaatttctttcccatggccctgaagggacaggcgcggggttggctaatgaacttgccacccgcatctgtccactcttgggaggatttgtgccaacagttcaccatgaactttcaaggcacatatccgcgcccaggtgaagaggcggacttgcacgcagtacagcgaagggatgatgagtcacttcgctcatacattcagcggttctgtcaagtccgcaacaccataccatgcatccttgcacacgcggtgatctacgcgttcagggggggtgtgcggcacaaccgcatgctcgaaaagattacctccaaagagccccatactaccgcggagctttttcagctcgcggaccgagtggctcgtaaggaggaggcatggacctggaacccctccggttccggagtggcagcttcggccgcccccggatccgctgctcagacagggcggcgtgacaggaggaggaagaagaggtcaccccattccgacgacgagggtcatgtcctcgccgtcgagggcgcttcacgggccacccgaaaggggaggcctgcgagcgatagaaagaaggaggccagcgctcccagcagggagcgcccaaccggcaagtggtgcaccgtccacaacacctcccttcatgacctcgcggactgccacgcagtcaaaagtttggctgagcggacgaggaagttggaggaggagaggaggcaggagcgccgagagggcaagtccccggcggttccttccggcaatcggcgaagtgaggccaagcagaaggcccccgccgaggacatcaatggcggcgatgatgacctaggtttccaagagcctggggccgccattgccactgtcgatgggggagcgtgtgctcacgtttctcgccggagcctcaaggccatgaagcgggaacttctggccgcggcccctactcatgaggcgacacgccgggcgcggtggtcggaggttgccctcaccttcgaccagaccgaccacccaccgtgcgttgcccggggaggacagatcgcaatggtggtttcccccactgtttgcaacgtgaagctggggcgtgtcctcattgatggaggagcagccctcaacatcctttcccccgcagcctttgacgccatcaaggccccggggatggtgctccgaccgtcccaaccgattatcggtgtgacgccggggcacacttggccgctaggtcatatcgaccttccagtcaccttcggtggatccgccaacttccgcacggaacgggtgaattttgatgtggcggacctcagtctgccctacaacgcggtcctagggaggcccgcgttggtgaagttcatggcggcggtccactacgcctacctccagatgaagatgccgggccccggtggtcccatctctgtccatggcgacctcaaagtcgcgcttgcttgcatggagcagcgcgcagaccacctcgccgccgcgtccaagcccgagggtggcgacgagaggcttggcacctccgtccccgccgccccgaggcagcggatgatcacatgcgacgaggtcccggtcaaggaagttgccctgggcgacggcccgtccaagaccacacggatcggtggtcttctggacgacaaataggaagacgcgctcgtctccttcctgcgggcaaatgctgacgtcttcgcatggagaccggcggatatgcccggggtccccagggaggtgattgagcaccgtctcgccgtgcggccgggcgcaaggccggtccggcagaaagtacggcggcaggccccggaacgtcaagccttcatccgcgaggaggtggcgcaacttctggaggccggattcatccgcgaggtcatccatccggagtggctggcgaacccggtggtcgttcccaaggcgaacggcaagcttcggatgtgcatcgactacaccgaccttaacaaggcatgtcctaaggacccttaccccctgcctcgcatagatcagattgtcgactccaccgcggggtgtgaccttttgtgttttctagatgcatactctggttaccatcagattcgcatggctagggaggatgaggaaaaaactgcattcattacccccataggaacttattgttatacgacaatgcccttcgggttaaagaatgcaggtcctacttttcaacgtactactcgaatttctttgggtagccaaataggacgtaatgttgaggcttatgtcgatgacttggttgtgaagacgcgcaaccgagacaccttactcacagatctagcggaaacttttgagagtctccgctccgcccgcataaaactgaaccccgataagtgcgtgttcggtgtacctgcgggcaagcttctcgggttcttggtctctgcccgaggcatcgaggccaaccccgagaagatacgagctatagagcggatgcgcccccccagcaagcttagggatgtgcaatgcgtcgccggtagcatggccgccctaagtcggttcatatcgaggctgggagagaagacgctacccttatttaagctcctcaaacgctccggaccgtttacttggacggaggaagctgaacgtgccctcactcagttgaaggcgtatctcagctctcccccagttctggtcgcctcggagccaaatgagcccttgctactctacttagcggcgaccccgcaagtggttagtgcggcgttggttgtggagcacgatgaggacaatcctcattccgcgcacccccaccctgtgctgacttggcccgggagagagcagggaggagaggcccccgagccgaacggtggcccaaggcccccgacgaccggagctggccctttgcccacttgtcagacggtgccaggtgcccccgacccccaagatggcccggcggccactgcgggaaggccgcacctattgccctccgaccccgaggctaactctgtgccgactcggcccgggagagagcagggagaagaggcccccgagccgaacggtggcctaaggcccctgacgaccggagttggtccttttcccgcttgtccgacgacgccaggagcccccgacccccaggacggccccgaggccactgtggtaaggccgcccctgtcgtcctccgaccccgaggtcatcggcacagaagacgagtgcgccccacgtggccacttggacgaagagcgccccaaggacgcgacccctagcaaagaggatcggccccaccgaaaggtgcagcggcccgtctactttgttagtgaggccctccgggacgccaagacccgataccctcaggcccagaagatgctttacgctattctgatggcttcaaggaaactgcgccattatttccaggcgcatcgggtcacggtggttacgtcttaccccctcggccaaatcttgcataatcgagagggtactggacgggtggtgaaatgggcaatcgaactttctgagttcgatttgcactttgaaccacgccacgctatcaagagccaggccctcgccgattttgtggcagagtggaccccggctcccgagcccgtctcagtccccgaggccagctcgggcccctcgcagctgcctcacaccgcctactgggtgatgcagtttgacggctccctgtctcttcagggcgccggtgcgggggtcatgttgacctcgccgagtggagacgtcctcagatacctggttcgcctcgactttcgggcaaccaataatatggcagagtacgagggactccttgcgggactcagggtggcagctggactggggatccgccgcctcctggtattaggcgactcccagctggtcgttaaccaggtctgtaaggagtaccggtgctctgacccgcagatggatgcttatgtacgccaagtgcggcgtatggagcgccatttcgacggaatagagcttcagcacatgcccagacgggataacacgattgctgacgaactctcacggctcgcttcctcgcgagcccagaccccaccgggcgcctttgaagaaaggcttgcccagccgtcggcgcgacccgaccccttaggggagatggacgcgcctgaccggcccccgaggcccgtcggagtccaggcctcgggacccgaggggagtgctcccagctcccttagattgattgcttggattgctgagatccaagcatacctcacagataagactctacccgaggaccacgaagggagtgaacgcgtctagcgcatctccaaacgctacgtgctggtagaagggaccctctatcggcgtgcggctaacggaatcctcctgaagtgcattcctcgggaacaaggcgtcgagcttcttgccgatatccatgaaggcgagtgcggagctcactccgcctcgcgcaccttggttggcaaggtctttcgccagggtttttattggccgacggctctcaatgatgcggtcgacctggttcggcgatgcagagcgtgccagttccacgccaggcaaatccatcagccggcccaggccctgcagatcataccactttcatggccttttgctgtctgggggctcgatatcctgggaccgtttaggcgggccccgggcgggtttgagtatctgtatgtcgcgatcgacaagttcactaagtggcccgaggcttatccggtcgtcaagatcgataagcactccgcacttaaattcattaagggcatcacagcccggtttggagtgcctaaccgtattattacggataacggcacccaattcactagtgagcttttcggtgactactgcgaagacatgggcatcaagctctgcttcgcctcacctgcccaccccagaagcaatggccaagtggagcgcgccaatgcggaaatcctaagaggccttaaaaccaagaccttcaacatcctcaagaagcatggcgattcgtggatcgaggagttgccagcggtgctctgggcgaaccgaaccacaccaagccgagcaaccggggaaacgccttttttcctcgtctacggctcggaagtggttctcccatccgagctcaccctgaggtcccctcgggccaccatgtactgcgaggctgatcaagatcagcttcgcagagatgaccttgactacttgtaggagcgaagacggcgcgcggccctccgagccgcgcgcttccagcagagcctgcggcgctatcatcagcgccacgtccgggcccgatcactctgcgtcgacgacctcgtcctacgccgcgtccaaacgcgtgctggattgagcaagctctcaccaatgtgggagggtccgtatcgagtgatcggcgtcccccggccgggctccgttcggctggcctaacccatggaacatcgaacaccttcgtcgcttctacccctaagggggatcgggtgtcaggttttggcctcgggccaaccccgcacccccctcgggagtgcagggttggccgggggctaccacacatgcatatttttatttctcttatgtctgctcttatatctgtatttcaataaaagcattttcgatttcctgaaggctgtatctgttctgttgtttccttttgaagaatcttaacttgaaatagctcactcgcgctcaatcctgtcctcgggggctcgggtcggctaaaatcgccaaacggggcccagaaccgagccgtgtcccggggcgtggtgaactccgggggggaatcggcaaaagcccacaatcgggtcacccataaccctcggtcacgacgcttccggcctggccagtctcgacacgtggatctccccaggcactagccccgacccgcgccttttgaggactgggacctgggcacgagcccttaatcaagctaagacacaaaaggaccacggctcagatcatcctcatctcatacacatagcaaaatgaaattgacacaaaaatttcttcattttgattgcagattaagtt

SEQ ID NO: 1899 - DNA, 543 bp, Oryza sativa
cagctggatccgacattagaggaagttaagaagctatgtaatacttgccgtaaatttgctagaacagagagagtcctttttcattacaatggtcatggtgtaccaaagcctacagctaatggggagatttgggtatttaacaaggtgaatgttgcaaagacactgcataagctgctgcattgtttatccatgtgtgtttttgacgaagtgccctttttttactttttgtgcagagttacacacaatatattccgcttcccattactgatcttgattcatggctgaaaacaccttctatatatgtttttgactgctcagcagctggaatgattgtgaaagcttttctggaggtatggtatagttccttctaatttttatacgtacgccagatacttgaagttgaaagtgataatgatgatttcctatctgtttctattgttagactgtttaatatattcactatgactactcatgttcactttagcgcctagactggagttctagctcgtctgcatcttcatcgaaggactgcattctccttgc

SEQ ID NO: 1900 - DNA, 1026 bp, Oryza sativa
  unsure (1)..(1026): unsure at all n locations
tccacccgtcctgccgccacgccgcaccggatccagtggaagcagcgcccagtgtcacggcctccacgctgcgttgccgcaattatgcgtcaccgcgtggggcccactcggcagtgagaccatgcaggctccgctgctgctgtcatcgcgagaaagcgattagcgggaggaggagtaacatcgaaggaaacccactaatcccggattattttgagcaattaccgctctaatccggggcgataagacgagggaaattactaattaagggaggggattaaccggtaatggtctttggagctggagagcttcgctataaaagagctccaatggcgtccctcacacctccccgcccaccattcccactttcgcccacacacacacccagatccacagccatcctcccaccgccgccgccaccatctccaagcccacgaacacccacagcccccgtgagctcgagcgaggtaagaaaagctttagatctgagcgacttcgagcgtcttcaaggtaaagttttctcgaaaccctcttcttcttcttcctcctctggctcccccacctgttcttctacggtttcttggttaggttgcttgcagagagcgagagacccagggccttttagatccagggctcccagatctgctgtttttctttcatcttctttgtgttctagtgttaggttggtagccaagaggggttctttttccacacctcacttgctagatctaccaccaaaaagccatctgtttttttactgtggctgtcgatttctccctccttcctgcctgttcttgattttggattcggaaccaggcaaatctttgttactactgttttagtatcagaaaaaaaaatcccaaaaaaaagagtgagagatggctgcagctatagatctgtcaggggaggagctngatgagagcactcgagccttttatccgagatgcctccggctcgcctccggtttgttcccagtttagtcccacctcgccattctccttcccgcacgcgttcgcgtacggtggcggg

SEQ ID NO: 1901 - DNA, 731 bp, Oryza sativa
ttttaataattttttcggatttaatgggggactggccattcttccacacatgattggctacataggcattgagaaatgtaaatattaatgaattgtttatttacgaggaatgactagtagcatgtttaaatagatgacaagtagaattatttatccttgatctgtgtgccaagataaaatatgtagatagtagtatacattgcatttcctcgtactgatgaaacatgggcagcatcagcggccggtgagtgagcgtaaagctgcctctcgccgcccacacaagttgctcagataaatactatggagcctggagagattttgttcggactaggtcgtgctattttgttattatatactccatccgtttcaaaatgtttgacgccgttgactttttagcatatgtttgaccgttcgtcttattcaaaaaatttaagtaattattaattcttttcttatcatttaatttattgttaaatatatttttatgtaggcatataattttacatatttcacaaaagtttttaaataagacgaacggtcaaacatgtgataaaaagtcaacggtgtcaaatatttcgaaacggagggagtacctgattagatgtaacgcatcctattacaacgaatttggacaagttatccagattggtcacattcaatcaaaatctcttatatttagggacatatgaaataggttttatcttgatttttatttccatattttttaaaat

SEQ ID NO: 1902 - DNA, 612 bp, Oryza sativa
taacctctgcagagggggtacactttacccacacgacattactaacccggatcacccagcccgtggggatcaaccacgtcgggagacctccaagctttcatgacaaggcatttcgaaagccgatacaggtttaccatatgccgacgagaggggtcccagaccaacaacaggttaggtcccagaccatactgtgccaggaagcccaggggtcctccccgacaccaccccggcgaatccacatgtctctcggcatcaaggctcccctgataagctagttactcagccaggggtgtcccattccacccatgtggtcgtacttgtcttatgtttggatgaaattccaaggaaatcggtccttaagtgcgagagcgggaaaccgtacacccggtacgttccccggtccgtggttttggaaattcatttagttcgcaagcaccgacccaggtgtcgggttttccaagtcttttgtaaaactccagttttacccaagttgtcactcagattttaagtttgaaggcgaccgtcgatactcgcacagagtgcacgaatatcgaggcgcaactgggtggttacaaggggacatggtataacaattaacaaaggaaggatcaa

SEQ ID NO: 1903 - DNA, 1050 bp, Oryza sativa
ccgcgcttccacccacacgcacaggtgccgccagaccgcatcagcgccctgccggacgaggtgctccgcctcgtgctgttgctgctcccggcgcacgaggcggtggcgacgtgcgtgctcgcccgtcgttggctccaccactgggaggaagcaccgggcctctccatcgattggtggggttatcaggagttggacaggttcatcagcttcgtggatcgggttttcacgctccgcaggtacaacgcgcctctgaatcactgccatttctacatgtatttcctgaggttagtgcctggaagggagcggctcttcgtccgctggatccggcaagccttgcgctgccaagctcgggtgctacgaatctgtttgatacttaggggctgtttggttcccagccacactttaccattacttgccaacaaaagttgtcacaccttacctaaggtgaggtgatcaaattgttagccacaacttactaagtctaagggaatcttgccacacttttttgagccattgacacgtgggacccaatttgttggaggggaatcttgccacaactgtggctacaaccaaacacctgtcaaatctgtctaaccttaggcgttgcaaactgtggcaaagtgtagcttgcaaccaaacacacccttactccaagatgcctaacatgactctcatctctcagcacctcacaaggtctagagcattgaccatgaaggctatcatctctcagcacctcacaaggtctagagcattgaccatgaaggctatcatctctcagcacctcacaaggtctagagcattgaccatgaaggctagtatttgggatttttgtttaaattttgtaattgcctatatttgtgattcttttttgttaaagtaaaaaacatcacaagagatgcttatatttggtcaaaatgctcatcacacaagctgaaatcacaaattaggagcaaaatcacgcaaaactgaaaaaaatagggcaaaaatacaataaccatccaggatataaatgtccttttttttaacaactagcaccgttaaaatcggccg

SEQ ID NO: 1904 - DNA, 797 bp, Oryza sativa
gattaattaactgaagatatagcttggaatgttctcacagccaattgacaaggtatttggacttgccttaacaaactagccgtgcttgcccccgacattatatttgcacatcttcttctgtgcacaggtgaacaaaattctctgccagagtcaatacctgacaaaaacaagcaaaggccaacccacacttgagcacaaatgttagcattacaaatctcgtcgatccctaccctagggtagttctcttttagaacaataaaaatggtttaaatgtccggcctatctgacatatggatacctgcaagataagctccatggacatagccattgtagcgctcgctcgtgtgctcaccggtgaagtacactctcccaaccggcgccttgtgcacagaaacagcaaaaaatacacacaaccaaaattaatctcaaatccaaaccgcatcaatttgtgaattgtgattagcatttggttggagtagtagttcgtaccctgagctggtcatactcgtagcgactgacgccgatgggccagttggagaagctgccccggaagaacctgtcggaccaccatctcgggacgaggatgtcggtggcgtcggggacatactcgtcagggaacatgcacctcacaacctccatgatctctgccttggtctggctgtaccgctgctgctcgatccgcctcgactcctcgtcggtcaccgtcaccaggagcacattggcatccgggtattgcttctcaaactcctgaagaatgttcagatcatcgcaatgtactacaattcgatgtgagtgga

SEQ ID NO: 1905 - DNA, 2329 bp, Oryza sativa
  unsure (1)..(2329): unsure at all n locations
tcaaaccgatgaatgtttgtgagtgacatgaatagattttacagcaaaacttaattaattgtgttttcagacaatagaaacaaactatgcatgcaaattattattgcatccaaaatatatatatcctactagcatacatatgcatgttgcattatattgcctgaagttgaataatttcagcggcggcctctgtcacgcaccatacgtgcagaagagaatcgacctggctgatgaagcggataagagtggggagaatctctccgccacactgcacccaagcggccgggacgacatgtcaatcctttcaatgcaacggctcaacgatcagtacgtgcctttgcccctcaagtctttacttgaaataaaaaacgttaagcacataaaagaacacttcaaaagttatttgattttttttgcgacaaaaagttattcgaattgatttgtcttactgtaagagtatagatagatataganaatcgtttgaaatttgtgtaaggactgaactaatcgtatattgggcctcgaaagatgtaggactatcaactaggcccaaaaagacactaaggcctccttcaagatttatagttggaattttgatagatcaatgaacaagttgattttgtgatagctatttgagggtatatacacaaattaattaattaactactacttacaaatttaaaaagttggttcagcaaaacagtatatagaaaactgacacaaaatatccatttagaagcttagaaaacgcgcaaatgaaaaatccaaaatccagtacaagctagctggcctgaataactggcctgacaagcagtacaacatagcactacaagctgtgaatttactttctgctgtttcgggtgcgtgcaaatgcatgcaattggcagcctacccaacggcccgtcgtcgccggtggacatgcggtggactacttcacctacgactacgagttcgccgagccgccgcgcgtgaccagcctgcagaacaccgttcccctccccactttcccgactttcggagacgacacctatttggtcgcgaaccaacgtggttagaagtccgtcgtccaccacctcgccggccagtacctcaacgccgacaagtccggcaacatcgccgacgcccgcctgaagctcaacaaggttgatcatatcacttctgatgccatgatcttttctgtcagaaaagatgaactgattaagcacgcgatcatcatggtggtatatatgatcgatgcaggtggtgcgtgagatctcctactcctcgaccggcgtcaccgtgaagacggaggacaactcgacgtaccaggcagactatgtcatggtttctgcgagcttgggagtcctgcagagcgatctcatacagttcaagccacagctgcctgtcagtttctatgtccaaatgtccttgcatgttcaacatatcctcttccaaatataaattaagatgtgcatatcgagcagtcaaatttactttacgtttcttgcatgtttccatcagtcttggaagattcttgcgatctaccaattcgacatggccgtgtacaccaagatattcgtcaagttccccaagaaattctggcccgaaggggcagggagggagttcttcctctacgcgagcaccaggagaggctactacggagtctggcaggtacaaaatatgcagcaatatatacaatccactcacatcgaattgtagtacattgcgatgatctgaacattcttcaggagtttgagaagcaatacccggatgccaatgtgctcctggtgacggtgaccgacgaggagtcgaggcggatcgagcagcagccggacagccagaccaaggcagagatcatggaggttgtgaggagcatgttccctgacgaggacgtccccgacgccaccgacatcctcgtcccgagatggtggcggacaggttcttccaaggcagcttctccaactggcccatcggcgtcagtcgctacgaacatgaccagctcagggtacgagctgttactccaaccaaatgctaatcgcaattcactacagatcatgtttttcattgctactttgatgtttctttggtcatgaacaaatgaggtttaaatttgagcttaatttggttttgtgtatgttttgctggtttctgcacacaaagcgccggttgggagagtctatttcacccggtgagcacacgagcgagcgctacaatggctatgtccatggagcttatcttgcaggtatctatgcctaatttgttagcctatgtctctaatgttagagagaccggagatgtaaaccatttttattgtcttaaaaaaatacctgctctagtgattgacgagatt

SEQ ID NO: 1906 - DNA, 801 bp, Oryza sativa
ttaaataaaacgaatggtcaaaagttacaaccaaaactcaaaataacaagtattttgagatgggggagtactaatctggtgtcacatgccaaaggttggtttattttaatacatatggagtaactgccctaatcagaatcactaccatttttccaacaaaaattctgcacggctccgaggcaacctgcaccagcatctggcaatcgcaagctcaccaaataattaacaaaacattactgcgagaagagattctaaacaactcagtaggcaccaaacgcacgagcacggaggactaaaagcaccagtgttaacttactttttggtactgaatactgatagctatacactacaggctaattctattaaggttgtgtttagatccaagggtgaaaattctattaaggttgtgtttagttaaagggtgaaaagttttgacgtgttacatcggatatacggacacacatttgaagtattaaatgtggactaataacaaaacaaattacagattccgtctgttaactgcgagacgaatttattaagtctaattaatctgttattagcaaatatttactgtggcaccacattatcaaatcatggagtaattaggcttagaagatttgtctagcaatttacacgcaatctgtgtaattagttattttttttcgtttatatttaatactctatacatgtgtccaaacattcgatgtgatagggtggaaaattttgctaggggatctaaacaagccctcagttgagtaagttaaagtgaaaaaaaggttgttgcaatattgtcaacaccta

SEQ ID NO: 1907 - DNA, 926 bp, Oryza sativa
agggagtattaccaattcattgccagatcaagaacattatttcacagctttggtttaatatgtcaactgcaaataattgaaacaaataagtaccaagagtcaagaagtatacccccaagacaatgggcagctacactagtttgttgatgatttagaagctttctggatctccaaagttatcgcctcagcaagatcagatgcctcatactctgctccaaagcatcgtgctgtctccaagcatggatctagcaagtacctgtatatttatacagtcaagtgcctgacacattacaacaaggcaagctatatagaataataccgtgcgtgcttacatgttatgagagctttctacaagatagtcctgaccaatgtcatcaacctttttgaagaaaacacggtattcctgtgcaatctgtcttactgcattgatggatcccgttagtcctattattcttgggtcaaactctgccgttcaaagaaacaaactaatcattcccaaatacagtgaatttgaaggttccaatagcatgaaaaatagagagcaacttaccactaagatatgccttaagctgagcaggtgaatcacgttgaggatcaattgtgataaagagtggtgtaatcttggtgccatattttgactctatgaaacgacaaattaagaactgtaagaaaaggaagatcacaaatgtaatacaaacaacagagttcagataaatctaattattataaggaaattatagcatacataaaaattaatattttatagggagaactactaccaatttaaaaagcccagctaacagaatctacatcagtgaaagctcaatgctttcgtgactctcagtaagccacgtaagcagataatctccagccatttgatgcaaacagaaggaaatataaaccgccagattggacaaagacactag

SEQ ID NO: 1908 - DNA, 881 bp, Oryza sativa
aaccaattttcggattcggaaaaattcggtcggaactatccggaacttttcggattcggaaaccaattcggattttttttctcggatacgaaaacgaatacagtaagggtgatatccgatggaaacgtaaactgtcggaaactatctgggatttttcatcggatatccgatattttagcaaaagagagatttttcagccaaaaaaataaaaaaaccctaaaaccctagccggccgccttcgcgccgcccactgccagccgccgcatggcgggcgatagatccgcgccgctgcggccgcctgccgctggccgtcgcggggctgagcgccgaacacctccgtaggacggcagatccggcccctcccgagggcggcgccgctggatccgccgcctgccgctgtcgcccaccgacgctgtcgccgcgcatcgaagccgtcgccgtagtcgagcccgctgccgccgcccatcgccgtgacccggccgccccaaggccggcgccaccggattcgctcatcaccgtcagttgcacgtcgtcgcctcgcgccgccgagccctcgccgtcgcctcacgacgtcggatcccgcggctccgggaccgccaaccctggatccagccaccacgaggctcgcgtcgccgttcgccgcacgccgtcgcctcgcgccgccacgccccagtcatcgccattgcctcacaacgtcagattgggccgctccggggccagcaccgtcgaatccgctcgccgccgtccgttgcacgccgtcgcctcgcgccgcggagcccacgacgtcggccaccccgaggccggcatcgccatccggcgcacgctgtcgtgggaggaagggtggcggctaggagagtgggactgtgggagtggccgggtag

SEQ ID NO: 1909 - DNA, 1235 bp, Oryza sativa
accttcaacacagccgaggaggcggcgctggcctacaaccaggcggcgtaccgcctccgcggcgacgcgggcggctcaacttccccgacaacgcgcctcccgcggcccgctccacgcctccgtcgacgccaagctccagacgctctgccagaacatcgccgccgccaagaacgccaagaagtcctctgtctccgcctccgccgccgcaacatcctccgcgcccaccagcaactgctcgtcgccgtcctccgacgacgcgtcgtcctgcctggagtccgccgactcgtcgccctccctgtcgccgtcctccgccgccaccacggccgagacgccggcgaccgtgccggagatgcagcagctcgacttcagcgaggcgccgtgggacgaggccgccgccttcgccctcaccaagtacccgtcctacgagatcgactgggactccctcctcgccgccaattaacaccaccaccacttcttggctagtactcacgccgtcgttagcctaatcgtcgccgccgccgccgccgtgcagatgggattttagacattttgcaccgcacggacgggcatggattagcagttttatagtccctaatccttttggtttggttcgtttgtgtacgtagatcgatctctctccggacttgtttcctctgtagatgctagggttggttggtgttcttcctcaaccggagacgccgatgctaccggcagccggcgtttttgtgtccggcgtgcgtctccggtgggccggtcacttggtcggttactccggccgtggcgtccattgctctttaagtctgttattaccttctactgctgatcttacaggttgtaaacagtagtagtagcattattattattattatgtcttgtaatattattagcgtgttataagaacttgtaatgtgaattacctctactactactattattattatttagcgtcgctgttaaaattgttgtgtgtaatctttttctgatttcaccttccacttgcgaagatctgcctgttgagttgcttgtgtgtgggggcaaagaaacacttcgctttccagaaaggagaagacgaacaaactcgtctgtctgactgtctctgcatcaacgtcactggatttcggctagcggatgcagatctcatctcaacggcgcgaagctttgggcgaagatgttcttcaatattttccgcttaattttctaccatgttaatccgaaagcgacgctacccgtggacc

SEQ ID NO: 1910 - DNA, 4236 bp, Oryza sativa
acacctcaaggtacttttgtgcatcaaacgaagtatacaaaggatcttttgagacggttcaagatggataattgcaagccaatttcaacaccaattggttctacagctgtgttggatcctgatgaagatggtgaagctattgatcaaaaggagtatagaagtatgattggatctttgttgtatctaactgcttctaggccagacatacaatttgctatgtgtttgtgtgcacgctttcaagcttctcctcgtgcttcacatcgtcaagcggtcaagcgaataatgaggtatttgaatcatacacttgagtttggaatttggtattctacttcatcttctatatgcttaagtggatattccgatgctgattttggtggttgtagaatttatagaaaaagtactagtggaacatgtcattttcttggtacatcattgattgcatggtcttctaggaaacaatctagtgttgctcaatcaactgttgaatctgaatatgttgctgctgctagttgttgttcgcagattctttggcttttatctactttgaaagattatggtcttacttttgagaaagtacctctcttttgtgataatactagtgctattaacattgctaagaatcctgttcaacactcacgcacaaagcacattgatattcgttttcactttttgagggatcatgttgagaaaggagatgttgaattgcagtttttggacaccaagttgcaaattgctgatattttcactaaacctttggattctaatcgctttgcttttcttcgtggtgaattgggcataattcatccttttggcatggtttgagggggagtttgtacctcatggttttatcaagctataatatgacaatgagaaaaattaagaaaagagagctttgtttatgcatatggtattttcttgtgcttgctagcaatactttgaaggtttatttgtctctagtatagcttgtatgtattctagtctttcaatgagacttagattttgtttttaagggagatgatacatgacacttaaattctatacttgaattaagaaaatatgcaatgttgatgctagcatatggtttgatctataaagcacgctttatgtatatgctttattgaattgttattcctcaactagttttaattgctcattgtgaaaagagaataaaaatatgaaaaaaaaaatgaataccgaatccttggaaatagtcttgacgacaaggacgtattcgacgtgagcaaaataatgggtgccgaatccctggaaacagtcttgacgacagggacgtacccggaataaaagagaaaaatatgagcaaaaaggctcaagaaattctcttggttgttttttgtgctaaaggttatttgggaaagagtgataaatgcaaataggtatatgtgtttggtgtatattcttcaatctatgtgcttgttaagatgttgcattataaatcgtatgaaatcatgaattttgattgttgattcaagcttaattgtaaaatctttggttcatgtttatactttaatgcatgcttgttatattatagatgggttcatcttttttttattgcgacacatgacttgatatgctatatgtatgctaagctcttgaacattaatgaatataattcctattcttgatgaaatcattgtcaaaagggggagaagagatgagtttttggagaagcaaggtgttgagaagagcatgttttttggttcagttgggaatttctttcttttaaaatggaaaaaggggaagaagttttcttttggattttttagcacgatgtgtacatttgtacgaagtgtgctttttaccacttttgtttttattttttcaaacaacaaaacatttttatgagtttgccaatgtgtttatcaagggggagattgtaaaatcaaaggtgtttttgattattattttgtgatgaacaattgggcattgaaagttattggttttgttatttggaatttattcacgaagtggttttggagatgattggatttacaggtagccgatccccgctgtcgccgtcgtcgcactcacccgccgccagctgccgatgttgctgccggcgttgctgctgatgttgctgtcgacgacgaagcggtagtggacgtcgttgcgctcgagccccacgccaccgagccccaggatgccgccgcggagccccggcaacatcagcccgaagtgcttcagtgggctgtacaccgtcacgccggcgcatagtagcggcgccgcctgctccggcgctagcctcgccgggattttcaccacggcttcacggcgacgacgcgggcgcggccatggacgacctggcgctgctgccatcggcttcacggcgacgagcgctacaaggaaaccccgtccctctgctccgcccgagcccggagccgccgctcgcccaccgcttgccgccgccacagccgcgctcgcccactgacgccgcccctccgcttgctccaaccgcgcgccgccgcccgctgccgctcgccctctgcggccgcgctcgccgacgccgcccctccgcctgctccggcctcggcgggggtgaggtggagctcggagatgaggcggtcgagcttgttgagaacgaggcaggggcggaggcgctcgaggaaggcctggcggagggcggcgtgggtctgaatgtggacgccctcgacggcgtcaacgaggatgagcgccgatcgagtcggagagcctcgcggcgccggtggaggagacctcggagcagaagtcgatgtgccccagggagtcgatgaggttgacgcggtgtcccccgtggtggagcacgaggtggcggacttcatggtgatggcgcgacatgtatagttgcagcacattgcaggattcttgctcgctttagcttggctttttttttggatgggcgacgagtgctcggctgccatttcatctcctccacttctcgctggattttgctgtgttcttcgtgtttagattctcgccgccgtccgctttagctagacacgggtgcctactgctagattgttttggagcagaagcaggtgtcaccttgcgatgaagaatcgtcagaaatgagtgtggtgactgcttggatatgcagaggggcatttggttgttgagacgaaaagatggaatactatctgcagcacattgcaggattcttgcaatgtgatggtgatggcgcggcgctgctcctcgtcgaggtagtccatgaagcggaggcgccccgcgagcctcgggttgacgtaatttttttaccgcgagcctcggctgacatgtgggccctacgtatttttttaatttttttttctgactaggatgccacgtcaacaaaatcggaaaaaaaatattaccatgagacctcctttgaacggtttgagtgagtttaggggtacatttctgattttgtagtcaagggatcttagaaaatctcgatgttaagttgagggacctccggtgaccttattccttttatgcgtacaccactctatctctatcgtggacaaaattatcatttccgaatcataaaaggcatgacggacgaaagttttgacaaaaacattttaattttttataatagtagagatagatattaaactagaaaagatgcccatgcgttgcaacgggtagagccgatttaatttgtacatatgtgtcagtggataaataattacaacctattgtttcgtctattcatgtgcttatccgaatcacttattgccaaataaaagactatttgtgtgtaaatcttttatatacatgttcttagcaaccaaaaaacaaatgttgtaaaataaagtacgataaaaaccaaaaagtcaaattcaaaggataagccaaacaatgaggcctttaaacacgagcttattttatcgtccaactttatttcaagtcgggcaggaattgatgatggacggaatcagcaacttctatcatcctttatttcagttggcatgttcttttcaaaagtaaaactgattattatggattattatggattattgtaacagtatccctaatagtacgtacgagcatgtgtggagactgacttgaaatcatgctaacatgttccaggaatcgtgtcgtgtaatacgaatagaatcagatgatctaggcaacaacgtacgtgatatccacatggactctgcgagttttattcgcttggtatctacatcacacggactctcttttgcagttcgcttgcgagtcgtggcttcacaatgaatgttacatgtgatgggaatc

SEQ ID NO: 1911 - DNA, 1305 bp, Oryza sativa
ttcgtggcagccgcaggcagcattgcagcaggagagcaaaagcaacgaaacgaggctaatcggcaaaagcagctagcaacgtcatggggcacaagaaaaattcagagagagcacctcaacgcaaacgttggttggagttggatcagtttgtcaccatcgggctggtctctaacccaaaagcagcatatgggactatggtcgtgtttagttatttggccaaaaaattttaaagtatacggacacacatttaaacatagattaataacaaaacaaattactaatttcgcttgtaaacacacccttagattcaggggtgtaaagttttgcgtatcacatcgaatatacgtacacacatttgaagtattaaacgtagtctaataacaaaacaaattacagaatccgcctgtaaaccgcgagacgaatttattaagcctaattaatccgtcattagcaaatgtttactgcagcaccacattgtcaaatcatggcgcaattaggcttaaaagattcgtctcgcaattttcacgcaatttgtgtaattagttattttttcgtttatatttaatacttcatgtgtccaaacattcgatgtgacatggtataaaattttaccaggggatctaaacaggccctctgtatcatgatagtgcacacaaccaagtgaacaagacactgcacacttaggctaagttctttgcctcaactccaaacttcaacttttttccgttagcatgtttttcaaacagtcaatgatgtgtttttttttgcaaaattttctatatagaagttgtttaaaaaattcagataaaatctatttttaagtttataattattaatatttaattaatcatatggtaatgaggtttctcgttttacgtgcactaaaaatttatctccaaaaggatagatcaaacgaggccttaaaagaagagagaaaatcataaaaactctcgagatcaaggtcttacaactcgaaaactaggtcatcacccaaatgccaggtataaaactccttaaccacttgctccaaatataaataagctgaagtgataataccatataaaccgagcttctggagaaataatcaagaaaacaacctgcaaaggaaaataaaccgttttcccataaaaaacaacatcattatttgagagccaaaattgctcggcacgttgttatcgtctctagtaaaaaaactggtctaaactttttgttatgtcgcaaaatccattacccaaagatatggacgcgtttatggatgatcaaatacgactacgagtatactccctccgattctatattaattga

SEQ ID NO: 1912 - DNA, 553 bp, Oryza sativa
gtgcttgtatgtcgatgacatactgatctttgggaccagccttaatgtgattgaggaggtcaaagactatctgtccaagagttttgaaatgaaggatttgggagaggctgatgttattcttacatcaaactacaaagaggagatgagggtgggattacacttgtgcaatcccactatgtggacaaggttttgagtcgctttggatatagtgactgcaagccagctcctactccttatgatcccagtatgctattaaggaaaaaccgaagaatagcaagggatcaactaagatactctcaaatcattggttcattgatgtacttggctagcgcaacgaggcctgacatctcatttgctgtaagcaagctgagccggtttgtctcaaatccgggagatgatcattggcaggctctggaaagagtaatgcgctatctaaagggcactatgagctatggaattcactataccgggtatccaaaagtactagaagggtatagtgactcaaactagatatctgatgctgatgagataaaagccacaagtggatatgtgt

SEQ ID NO: 1913 - DNA, 643 bp, Oryza sativa
aacccaggtatcatgtagtggccactctcgattatatggaagaatgagcaactgagtaactcgttaaggtactcctttcctacatcttccaatgtctgatcctctccaggtgttggaacaaggccttgtgccatccaagcaaatataagctcttgctcagtgaacttatagcctcttggaaatatggcacaataggtgaaacatcgctgcaagcttagagggagatgctgataactcaacaacaaaaccggcataacgtcgtcaggctcttgttttagttcccatatgtttctattcagaaacttgcaccaatgctcctcctcgtggttttccgaaaggaatctccccatggtcttggcagccaaggggttgccatacaacttgagagctattttcctgcctattcgagccaagctgtggtcctctgtgatgtttgtgcactgtaggaagaaagcccaaaattcattatcatgtaaaccgtgcagtgtcaaactgtcaaatgtgcccatggccttggcgatttttctctgtcgcgttgtaactaaaaccatgcttccagacatccccgcggagaagggaccacaaagcttctcccagtggctgctgacccacacatcatcaaggacaatcaagaacctcttcc

SEQ ID NO: 1914 - DNA, 643 bp, Oryza sativa
tacttgggaaattataggtcaaaaaataggttctatgcgacatatgagtagcttaaaaaaatgcataatagaaaaggaaagctaaaaaagatctccgaatttcctataaaaccagataatctagcttaatactaccacctaagtttgcaatcaggctgttcaaacaaatcagagaaacatgtgataactctagtgttgtgacactagcaagataatttaaaaatatataacttgcctgttctagtacagtgaagagcttcttagacttgtcggtagatcggtgaggcgaatagctgcaatatcaagtgctgccctccctgtgataggcacttctgcattctcatcaccatttgctgcagttgatttatctaggctagaaccaaaaccagaaatagaaaagttggttccaatcctggcaagagtagcccttaaagaagcttcaaaaactgaggttctgctagttaggcaatcagcaactgtaagaatctgcaaagcaccctggacaatagaccattcttcctcttcagagacatcgaccaatcgttgtgcttcttttttctctagtcctgcttcctttttagaggaatcactatgtgcagtattatccaccccacatacaatcctaagggattttaaagtttct

SEQ ID NO: 1915 - DNA, 554 bp, Oryza sativa
tggttttaggctagaagtccaataaatactcgttcttggttgtagcttactcacgcaatcagtttggatgcttttggtttcgagcttgagttatctttgagtgttctcaaagttagaattttgttatctcatatgtccaaaaccttgctaacattatggatataccttttaacttgttgcacaggtaagtgttgatgttcctgatgtacgcggaaggacagagattcttaaggtgcacggtagcaacaagaagttcgatactgatgtctctcttgaagtcatagcaatgagaacacctggctttagtggagcagacttggcaaatcttctaaatgaagcagccatattagcgggccgacgtggtcggacagcaatttcctcaaaggagattgatgattcaattgacagaatagtggctggtaggaaggaactgtgatgacagatgggaagagcaaaagtcttgttgcttaccatgaagttgggcatgcaatttgtgggtaagagataatctgcatatttgctaactgtgcttttgtttattacttgcatatcaa

SEQ ID NO: 1916 - DNA, 689 bp, Oryza sativa
agtgatagaaatcatggcagcaagtatcattattgtgatcacattctgcatggagaaatgtattttttccaagaatataagcccattcctctgctagtaaagttcccatgtcaacctattttactttaaaaccaaagaaactgtaaataaaaaaacgagatagagatttgcaattcactgggtacaaaagttagatgcacttctttaacattttagcagattgcttccaacatatgacatcaacttcccagtcagttggttattttacatcttgaaaagcaatatttttctatcagtccaactaatttgagaaaaaaaattctgaatgagatatgtcaagagcagttgtgaggctgaattgttcagggatgtatggaaagcaagcttgtgtttgacgcaacaaatatgtgtatatgtaagattgatggagtatggattctgagcgatagcagtagacaattcaatcaatattttatcacctaaagatcatgcatagtattttgacgaaacaacggcagatgtgcaccttcaagatgaagctttactgacgatccaagtcgttgagggggtctaagatccagaatccataaacactctccagaacacatgcattgcaggtgaggagccggacgggacatttcgccgagcaccccgcgttcattgtactctgaggaaaagcggcaagcgct

SEQ ID NO: 1917 - DNA, 5818 bp, Oryza sativa
gtctcatcattactcaatttactagatggcaaaaacgacgaaattcctaacattattcaacaactctgtggaaaacaactcatcttcaagttcaagctcagtgaacaaaatctgactgaaggcacaccaaactatgttgtcaaaaggacatttgtgcctgattatatgcttgagaagcaatacctcattaataaggctgaagaggtaaagcaggctactactgattttttacaacacaaaatcttgaaaattttatttctgaaatgtttccacattatgattttacaggagttaatggacgacgatgtggataacatactaaaacaagatagagagacagatcaacaggtatttgaacatataatacaaatattcatttatttataatatatagcacatatgacaaatactttattgcctttgaaggaacaaaccagcaggggccctcttattaaaaaacagatccatctcactgctacccgtgaagcaagagctagaggatagtgaccaggaaatcatgagtgaagatgaactcacttcgtcggacaaacctcccagttgcaaacaaataagacggaggacatacataatagaagacgattcagaagaggagagcaacgaaacaagtatgataaaatgtgtagatgcaaaagttcgaggcaaaatgcaaaaggcgctcatgcaaaacccacaaaggcagaaatcagaaatgacaactacagccatgaaataaacaaatcagttgttcaagaatccatcaaggcaggaaaaagacaggcgaaaaccatcaatggcataggcaaggaaagctctgttgagaaacgtaagaaaacatgtgttcaaccagacaatatagcatgcaacacaaggcctcagagaacaaggaaaatgaattctaagtatacagatagtgcttagagctcatgagaatagttcataattagcagtacctcggtagaatatcctgcagttaatgatactagctagaaagaatagctcatagtcaatacagatcattacatgtactatattataatagctgaatattgtatgtgaataaactgagatatattactatgcgatctgttattttatttatgattttttatcacctctatatatacagacctaattttgcaaccgattgcacatgaagcatccaaacatataattcatgcaaatgattagaaaagaaaaatagcgtcaaccaacctttgcctgcctgccaattcccccaggctcgccaccctggccgatccgtgacccaaccaccgcaccacctccaccttacattttgctggatgctgaaatgagacccaaaatagcagattttgttatggccaaattttttggtgaaaaccagctaaaggcgaatactaaaagagttgtggcaacatagtgagtattcgtttgaaaacctgaccttaattttcatataaaagtatttgattagcatttaacaattttcccatcatatacctcgagcagtcggcgcaaaagctctccaccgacgaagctcgccgcccgttggatctagcagcagcatgtggagttggggcaagtgggtgtcggagatctgagagctgcgcaagaactcgcgcatctggctctgcacgtttgccaccgccgtgccatcaagggccgcgccacccccgtcctcttcaactaaccggagatcgcgcacgtgcttccccgctcggcttcggcagcccccaacgacgtgagagccacacggcgctcgcgacggcgatggacgaccccgatccggcggcggtcgcggcagcgcctcgccaaaaagcgactggactcgatagagatagccggatccggcggctacgacatcgccgaccatgccgaagaaaggagcagcggtgaggaggggaatatggaccccatgctgagagagaagtttccctcaggttccacctctccctttcagttacttctcctcatcggatttgacctcacctgatcagatctggccattgaaggaggtgagaagggtgataagaggcagcacaggaagaaacgagagaagaggagaggagaagaaactagagactggctgtgaggattgggatgggcatgggcggctgaaacgagaaaaatcaacatatgtatctaccgtcccctccactttctctttctttttctttttctatttgttgagatgaaatttttgggttgtagcacaaaatttaaatcaataccttcaaagatacatatgttgattaatatataaagatttgtcttactaagtacgataaacaaaagtaagaaattatatattatttatttattatatatattataatttaaaaacatagtcaaatatatattttgaagatcgtgtcattatccaaaacatcaaagatgtgtactacatccaacatattattttcttcacacatgcaaaacaaagcaatttattagcatatagctaattaagtattagttagaaaaacttaaaaaatagatttatattattataaaaataattttacttttaagtaccctgacatgtgaaattagttgaaattaataatttaattctatacagcatttatatatagatggagttaagatatctgtaacactgattttaacggcgttgtcttatctcacacgcaaacatttaatacttttttttcatccacatttaatgctccatgcatgtgtccaaacatttgatgtgacggaagttttagaagtttgaagggaactcaacactgtctgaaatagaagtcataaaatgtaaaaaaaacgtgatacatcgaataatcaaataaaggggtgactaacgaataagagttagcgactgaaatcgcttttaaaacctataaaattgttcggccttttgaagtcccaaaataatgagacagctatttaacaaaatataagaaaactcatatgtaaaagaagataattttatatggacgctagccgcgcaattgcgcgggtcaccctgctagtttgtgtataagttttcgaagttctatatcttgaacattatatagagtggatttcgcaatattttacatatgtaagtttacatatattatttttactttgcattaattctaagcagaatgttgacatcatccataatgataaaaattagcaaatctgcctaacaagcagaatgttgggcataagaacaaagagcattaactagctgtgtcttcacctagaagcaatgtgacaaaaaccaatgcaacgttttcaatgaatagaactaaagggaagaactggtcgtgcactgaacaaattaaaccagacacttagttgaactgaaattaccggtccatagataggcggcgcataaaacctcagagagatgattaatttatgagttgcatgaagatcgaagtcagagatgtacagggaaaatacgaagataaaatagaagcaaactaaaatatattgcattgtcaaatagtcaatccaatatggcataatgaagtacattaggtcatactttataaatccgtaatttacggatgctagggttttggcggcgcccaggcgactggggcgcggcggccatcttctcctttgggagggttctttggatggagttcgtctttgttccaccggcaaagtttggtcctgtgacgtttgattctactgttcgcatctctggagatcatggaaatctctctggtggtcttcagcagtttgagaatcctctctcatctggtggggtgagacctgtcccactatggaagcggtccacgttcttaggtatttctctgttggctatcaagttctgggatgttcatgagacaatcggttccggcaggtttggtcatctacgtaacttcgtctcagttttgtcctttggaaagacgtatgtgtatgaatccaatctagactctggctcctcctataaaaacacacatgtggtttccacaacgatacgtcctttgcaaactctggagattctcctgtcaggttttgatctaggtcctgggcagtgttctctcaatatccatctcatggtgaaatctctcagtgggggcgacaaagggaccatcaatgcgatggttacccgcccgaagctgaaggatgacgccgtattggatctagggaacaaagaggtagaggattccagggctctggtgaaagctgggcaggatctggtggcggcacccccggcagatgatcaagcggtggatgtggtattgcaatctagttcaggcgtcaacttgggtcctgaagcacatatggagggtgcagttttggaggaagaagaagatgcaattgaagtggaacttgacaaggaggaagtcaagcgtgcaggacaatggactatcctagcgagattctagttgctcaaattccccaaccaggtggccttatttgaggacatgggtagagcttggcgactcagagcggagatgagttacaaatctctaaaggacaatcttttcatcgtcacctttaatgctgagggagaccataagtttgttctgcaaggcggcccatggattcacagaggagatgctctgattgtagctgatttcaatggccttttgagtccatcgatggtccccttggagtcagtgccaatttgggtaaggatatatgatctgcccttagtaatgatgaacaaagctagaggtgagctgtatgggagtaaactcggcaaggtcagggaagaggatgtgcagcaagatggcagcaacaagcatgatttcttccgcattcgtgttgatctcccggttaatcgtcccctgaaaagacagattgcaatcaaaatcaagatcaaaggtgttgaggaaatcagaaggttcaatcttcgttatgagagggtgccgcacttctgcttcttttgtggtttcattggtcactcagataaagagtgcgagaaaagattagccaatgaggctcaaccactcatgttctctgctgatctacgctgctctcttcttaaagctttcgaacggaaaatcagcaaggttaaggcaaatcagagtgccggggttcagaggaagcttgtgttcagaggcgcaggtaggctagctcttcttcagcggggaataaacagggagactacttctacactgacccaccaaccagaatcaatgcctacgatggttttgattcaagagaagaggaaggggatgagttagttgatgctcaacttgctgaaaaggtggctcgctgcatatgtctgacagtactttgtcccgtaagaaccaaacaaataagttttcagctggggatgagttagcatcacttccatcattcgagatgatcccggccattaggaacctgggcactcaacaggagtctactgaggacgtgtccaatgaggctactatcagcccaatcaagaggaaagggtctgataatgctcaactgaagataatgggcaaagtgcaacaggctctgttggagtttgatcagagtgaatctcagggaggatcggggcaggggaagacaggggcccctgctcgagcctcgaagcgtttcaaaaaggatgagaaggctgagaacacagcggtggatatggaagcaaccagtctcggggctactggtaaactggcgagacctatggctgggtctcgccaggagcaatgatttgtttagcctgaaactgtcgtggtatgggcaacactgcgacagttcgtgatatgtgctccttagttaaggaagccgatgcccgtttgctctcctgtgtgaaactaggcaaaaggtggaaaaagtgtgtcgtgtgcgtagaagattgggtcttaaaggttttgtgggtgtcagtagtgatgggatgagtggtggtttagcgttgttttggcatgaatctgtttccgtcgat

SEQ ID NO: 1918 - DNA, 543 bp, Oryza sativa
tacacagcttcaccccctatgcgtaataagctaaaggtgctcaagagatgtgctaacttacttgagccgggcccaggtaatacaatcttggaatgtctcacacttctctctctcgagacattcaataacgcgctcaagctgatccctagcctgtgcatcaccagcagttcttgctacagttgcatatccaccaggattcgataggaaggcatttacttcagtgggggtcttctcaagcaaaccctcaaactcagacctagcccaggttaggcaatgatcaatattatgaggaaatgaatgtacagtacacatcggcgcctgcttttcaggtggatctctggatgcgccatagttctctgttaggtgaggtatgaccatctgtgtgttacatttagcacccagagtcccagattccaagagtggcttctggaaatatacacatcgggagtcaatatacattcttgcggtaacattgtccaacgcattgacaacagcatccaggctctcccaaaaggcatcgttgaacacattttcagtctcagg

SEQ ID NO: 1919 - DNA, 5333 bp, Oryza sativa
tgtttcaggttggatacacccctgactacctcttcctcctccagaccattttacgtacggatccacaggtaatttattggttaagctattttgtgctagggtgaaatattctgctttgttctgtgggttgttgatttttatttgcaaaatttattatttactgtatatctcttttaccagggagctgtcaactttgcgctcatgatgtcacaaatggaggggggctgtccagttgattacaatactataactgatctcttccttcaggtatccttttaattcatttcaatgcatagtcggtatgtaatacctttgcttttttaccatgaaattcagttgtgtcttgccttaccatgcccattttttaacagagaaacatgatacgtgaggcaacagctttcctgctggatgttttaaagccaaacttgccggagcatgcttttcttcaaaccaaggttagcagttttttcccaataagttcggccttttacctttgcattgccatgttgctcagtggcttcttttacctttatactgttgtgttgctcagtagtttctgtttgaattgattgtaggttttggagatcaacttggtcacttacccaaatgttgctgatgccatccttgctaatggtatgttcagtcattatgatcgccctcgtgttgctcagctttgtgaaaaggctggcttgtacttgcgagctctccaggtcagtacctttttggtgttttggtttacttttttttttctttgcctgtctgtttaattaacattatattgtgatgcagcattacacagaattaccagatatcaagcgtgtcatggtgaatacccatgccattgagccacaggtttgttatcttaagttatgctttgttgcctgtctattattactggctggggtggtccatttacaccattattgaacaggcacttgttgagttctttggcactctttcaagagagtgggctttggagtgcatgaaggaccttctgctggtcaatctaagagggaatcttcaaattgttgtacaggtatttttgctacgtttagtttgaccttcccttttttgtcacttctcacattggttctgattattatcgaaacatgtgtcatatctgcaggctgccaaagaatactctgagcagctaggggttgatgcttgcataaaactgtttgagcaattcaaatcttacgagggcctttactttttcttgggagcttatttgagttccaggtagttaactacacctgatgttgatatgtgcgaagcaattttgtccttaacgtggcgcaccttaatatcgttctttacattcaacagtgaggatccagatattcatttcaaatacatagaagcagctgctaggactggacagatcaaagaagttgaacgtgtaaccagggaatccaacttttatgatgcggagaagacaaagaactttttaatggaagcgaaactgcctgatgcccgtccgctgattaatgtctgcgaccgctttggatttgttccagatttgacccactatctgtatacaaataatatgcttcggtatattgaaggctatgtacagaaagtatgcaactcttccaattcagtgttattggagtatcatcattctcatgtgctatgtatttaaatgcttattttcctttatattgtaggtgaaccctggaaatgctccattagttgttggacagctacttgatgatgagtgccctgaagatttcattaagggtttgattctgtctgtccgttctctccttcctgttgagccactagttgatgaatgcgagaagaggtatgattctttatattatcttgtattccacagccagcttaagggcatgtgcacatgcacacaaacatatgcttttttgtttcgttgctgatctcatcttttatatttcttttttcaggaaccgcctacggctgctgacacaatttttggagcacttagtgagcgagggtagccaagatgtccatgtgcacaatgctcttggaaaaatcatcattgacagcaacaataatcctgagcacttccttaccaccaatccattttatgactctcgcgtggtcggtaaatactgtgaaaagcgggatcctacccttgctgttgttgcttacagacgtggacagtgtgatgatgaacttattaatgtcaccaataaaaactcactgttcaagctgcaagctaggtatgcaaattgtttttattcttcataccttttaattttatttcttctgaatctttaaatccatctattgattgcttacatagaaatcgatttgaattgccaggtatgtggttgaaagaatggatggtgatctgtgggataaagttctacagcctgaaaattaattttaaagggcacttattgaccaagtgggttcttccggtttgccttaaaaccagaacccccagcaagtgtctgctggccgtcggctttcatgacagctgatcttccccatgaactgattgaacttcttgaaaagatcgtccttcaaaattctgctttcagtggaaacttcaatctgcagaaccttctcatcttgacagccatcaaggctgacccatctagggtcatggactatgtaacaggctggacaactttgatgggcctgctgttggagaagtagcagttgaagcacagctgtttgaggaggctttcgctatcttcaagaagttcaacttaaatgtgcaggctgtcaatgttctattggacaacatccgaagcatagaaagagctgaagagtttgcattccgtgttgaagaagatgctgtttggagccaggttgccaaggcccagttgcgtgaaggtttggttagtgaagcaattgagtccttcattcgtgcagatgatgcaacacatttcctcgacgtcatccgtgctgctgaggaagctaatgtatacgatgatctagttaagtacttgcttatggtaaggcagaaggcaagggaacccaaagttgatggagaactcatctttgcgtatgctaagattgatagactcagtgatattgaagagttcattctcatgccaaatgttgccaatcttcaaaatgttggtgatcgtctgtatgatgaagaactttatgaagcagcaaagatcatctatgccttcatctcaaactgggctaagctggctgttacccttgttaagctgaagcagttccaaggtgctgtggatgctgctcgcaaggctaacagtgctaaaacatggaaggaagtctgctttgcttgtgttgatgccgaggagttccggctagcacaaatatgtggtctcaatattattgtccaggtatatatacaggaccaacctgttagaactaaaacatatttcagtacaagtcttttcttatctagattttttctaacacccttttttttgtataggttgatgatttggaggaagtaagtgaatactaccagaacagaggatgtttcaatgaacttatttccctcatggaaagtggtctaggactggagcgtgctcacatgggcatcttcacagaattaggagtcctctatgctagatatcgccctgagaagctcatggaacatatcaaacttttctccacacgtctcaacattcctaagcttatccgtgcttgtgatgaacagcagcactggaaagagcttacttacctatacatccagtatgatgaatttgacaatgctgccaccactattatgaaccattctccggatgcatgggatcatatgcaatttaaggatgttgctgttaaagttgcaaatgttgagctatactacaaggcagtgcacttctatctgcaagagcatcctgatctcatcaatgaccttctcaatgtactcgcgcttcgtttggatcatacaagagtcgtggacataatgcgcaaggtttgttttttatggcagggccttctattggtctatcagttttgctccgtttcaaaattttgaactatttcattattctttgtacaggctggtcagttgcatcttgtgaaaccatacatggttgcagttcagagcaacaatgtctctgctgtgaatgaatctttgaatgagctttatgttgaagaggaggattatgagagactccgtgaatcggttgatatgcatgacaactttgatcagataggtcttgcccagaaggtaaagcgattagatgattgtactgcttattgatgttatttttccttttttttttattttgaataactaatggctggaatgccttgatcagcttgagaagcatgaattgcttgagatgaggaggatcgctgcctacatttacaagaaggctggcagatggaagcaatctattgccctgtcgaagaaagacaacatgtacaaggattgcatggagacatgctcacagtctggtgaccgcgagctgtcagaagatttgcttgtctatttcattgaacaggtttgatttaagcccataaatttctatcttatttttgggtggaatatttagcatgtagtatgctgcattaccttgtaacattgccatctcttctagttatatccaaaccatcctttttaatgctggttttaagggcattattttctggtcgatgatttttaaaaactaaccatgtagtgggggcgaatatgccttcagaaatccagtttctggagcattgccatctaaaaatagaccagctggactccaattgaagtgaaacaagccagctcacctgattttttattattatttaggcataatctgtattgcattctgatgagtaacatctataattggtattgcaaggaaagaaagaatgctttgcttcttgtctctttatttggtatgacttgatccgtgcggatgttgctcttgagcttgcatggatgaacaacatggtggactttgcattcccctatctgttacaggtatcttgtttccgttcatgtgtttgggactattcatttacgtacagttttccataacaacaaagcttgcttcatgtgcagttcattcgggagtacacaagcaaggttgatgagctagtgaaggacaggattgaatcacagaatgaagtaagggctaaagagaaggaagaaaaagatcttgttgctcagcaggtaatctatagagattgctcttcttttggttattattctgttattatttagtaggcagcatgacgagtggtattacattgtatggtgcagaacatgtatgcccaattgcttcctcttgccttgcctgctcctcctggtatgggcggtcctccaccgccaatggggatgccgggcatgcctccgatgggcggaatggggatgcctccgatgggtcctggacctatgccagcatatgggatgcctccaatgg

SEQ ID NO: 1920 - DNA, 15633 bp, Oryza sativa
caagtaaaaagtacatgaatcggggttgcatcctgaaagaaaaaggaatcgatgatttagttgtccgctccagccggtaggagtagtgtagtacgaagaaaagatgaaataataaagcagaagctgcattctgcgagaaaacgggacagcgagatgtcatccacaaaaaagctttgctaactgccatcttttcttaattagcagagtggaataatgttgattagtttaagcttgagcctcagatggacatcgacatctcatattctcatgctttaatatgtggtaatggcattggtggtagtcatgaagctagaacactcttgcattgtgtggttttttttatgaatatataataaaatacgtacattgaaaactatgtcaaagtcttagaccacgagtaaaaaagaatccagggagcaggaggttcagatggtttgatttgctaaatatatgtagtagtacttcgttgacaataatactcgatcgtataaagggttaaaaggctattttggagaactgagacttactatatactccatccgtttcacaatataagtcattctagtatttcctatattcatattgatactaatgaatctagatatatatatctatttagaatgacttacattatgaaacggaggaagtatatacagctagcactgcatcatgggctcatggcaataaaagagctcgatcacatcgaccaagatacaaaatacacgaaaatctcatacactggaatggttatctggataacaaacttgcatgagttcgatcgatctggccagggtccaatgatcccatcgcattcgctagctagctagctaagcccatgtttatatgaaatccattttaagaagaaggcagcaactaccagctgaaacggtagttaatcaccaaacatgcgtatctacatcatgcatgatgctactatgttagcgaagaatttaatattattattattggtaggaagtagtacgaaggaagaaatggaagctagggagggctccacagagacacaggtggtggatgtggttgcaaacagaaacagaaagtgtcgcgcactgccatggttgatggaactcttgataacttcattctttaaccatatagtataagctactccccctccaaaatataagcatttttagctatgaatctagataactgtgtgttcagattcacagctaaaacttgttatattttgaaacggaggtagtaatatatcttcttttcaatttacactggaatgttatataaatggtcccttcataacttcacataaaaactatcgtgggctcgtcgactctatgtatctgttatggagacccacatcgtttagagctttttatttgaaaaatgcagaattttgttttttaccgaattcagttcgattacttaaagaatgctttaaaaatcctattttacaaaggctctatgagtttctaaaatctatttatttgtacgtgactctaccatacctactatactgagatagtccacaaaactagtaatccaacggttctcgaggaagacaatagcggggaactagttttcaatcggtgccaacggtggctgcggcgttacctctccacataatcccactcctgacggggcaagaaacgatcgggttggcacaacaaggctggagagcgacgacgagtaggcgaggcgagaggatgaggaaggcatcagcggactgacaacatctcctccctttggatctgaatctggattggtggcatctcctctctttggatctagatcggcggctgttgatgaaaaaaatcgaacacaccggcctaggagatctgcttagctcctgtgcaggtccaaaagttgttgagatgagggcgtgccagtcagtttgatcctgcaactgacaagatatgcaaatagtagatcaaacagccgatcggctaacaaaccgatggagtagttccagccgatagtgataatagccgatgccgataccagccgatagcgatagcgtttaagcaatcggctatatgtccaatgtagataataatataaaggcaatcggctgatgatgatgtaataaaataacaatataatccagtataaaccaatcggcaaataatgatatgataaataagtatcgatccgaaagttaaagcacacatcggctggaggtccgatgtcatgaaatgcacaagattagattaaacagtgaaacctttgttgtcatcggctaaattcaacttatatgtatatgcaatccttatgagccgatgcaacgtccagataatttactggctgaaaccccgatgaacccttattggcagtcaaaaagcaggctagagattatggttctaagcacgacttagtagatcaaacttaactgatgcagcactaagtatgaaaagaaacacaatatctagacaatcaagccgatgactgattttcagggtggtagatgcctaagctaatctaatctaacaacgcgatttagccgataccggtagaaaccctaaagcgagaagcaaccgatagagctaaattgatatgctaagactagattaacagagacatatgataaataggtaggcaaatatatcatccaaaccagagcaatccaagaggtcgaatgtactgatgcagccttgaacgacgccgacgtagacgatacaattgcctgggccgacggaacattggacttaccccttcgccagagatcgaacatcgatgcagccccgcgtcaggtagggatgaaaacggagcggatacggacggataatgctcataccatattcgttttcatattttttgccggatacggaaacaaatacggatagctcgaatacggaaacaaatacggactatctcgaatacgaataagaatcgaatatgatcggacacgaatacggaaacaaatttttcttggaacacgaaaaccaattcaacttctaatagaaacaaatatcaacatatataattagctcattttatataaaatgtagtataatttataaatatttttaaaattttaaataatattaataatgtggactagtgttaagagatgaactactattaaaatctaaaaaggtatattgaaggtcatagagttataaagaaatggggtatgtcttgtggcttctgcggatatccgaattattattcgtatccgacggaaaccctgataccatattcgtattcgtatcgagagaaaataccgtattcgtatccgtatccgaactatccgatccgaaaggtatccgtattcgtttttatccggagcggacggaaactatccgctccgttttcatccctagcgtcaggtgccaagtcccgccggacgataaaataaagtagaaaagataaaaggtggcgatgcgccgaattgtattaatcgtgaagatagattacatagaccccgggtgtacatatttgtacccatgggttgatacaagttcttgtccgacaagaaataaactttcctaaagataaaaggcaagataaagtctttataggacactaaacacactttcctaaagataaaaggaaactaacgaactattcctaattaatagataacttgccatgccgcattctctttgaactcggtctcttctggataagctttctttagtatatcaatttccttaactgaatatagcaagaatccgacaactgacgacttgacaattctcatcggctaatctcaggacttcaaagccaatgctgactctaagccaataactattccgggcttaccaaatttcactgttaacagcggcatgcacgatttagatctggagcagtggcgaggtggctcgagcaccgacatagtgacacatgtgagagtcacacatcttcttggaggtgatgttctgacaccctctcggcctcttcctcattagtgcttggtagtgaactcttcggatgaaattctttgttctggatgccaggaattgcaccaatggcattctagatgttgcaaccttctcaaggatattgcattggaagtatcctattggtgtcgcgtctcgtgccagcatccccgtaggttgggtttggtggctatggcgatggcatgatctatatgaatgactgacttatagcttagttgctcttagtattttccgtgttggttcaacgttagttatcgactgtgatgatagcgaaatatgactgacaaggaaacaaatacagaacaaatgagtgtggcggttgccattttctgttgaactctataagagagtcagggagaccttttggaaaactacagaatgaacaaccacattatctctataattgtcatcttgtggtccaatcaatccatgtattttcttcaatattttacaatcttcagtgtttgcacttgaattcatcccatagttatatttttttccttatacattccctttttaatcattgtttcaaatagttgttctttaccacctcttcctaactttcacttgcttgtttttcatgtccacacttcccaactcattaaatagtttgttttttgaaagaaaatgcatatgaaagtttttttaataaatatattgatttatttttaagtttattttaactaataattaattaattatacagtaatccctccatcccattttgatcactctctaaaattgctgaggtattcccaaattgattgtcatctaactggtgtctatccatttacatgtgtaagagtaaatgtgttgcgtttctatccgtttatgtgtgtaggagtaaatgctatagttacatatccgtttgtttatttgtgcatgagtaaattgtattattgcatcctcacgtgcatgtctaacataatattttgatcgataaggtttaatttaagaaagaatgatgttttttttcttgatcacgataacacttatgaatatgatgatgaagaggtgtgtaaaacatagttgaagatgtggaaatgggtggttgtctctccctctcctcctttcttctccaagtcaacagttcctacgctaccaaacccgatcggacgcggacactgacagagccgacgccgacggacaccaaacttcctttcaaatcaagggttttagaaccccaccacccggttaaccttaagaaaaggaaggggccaattccgcccgcctctcccttgtccaaccacacaaaccattggcccctttcaacaacaacaacttaacttcttcaacaacggccttcaattcggcccccggctttttcttccggttccttcttttcgcgctgtgccggttcccggtcaccaccctcgtcgccgccttcttcctcctctcccttttcatgtacggcgaggaagttcgcaccctcgccgagctttccatcgacgactacctttaccccgacgccgatttttacaaagtttccggccttccccctttcctcctccccccggccacctgggaccttttccgcggccgaaggggaattgacaacaccttcctcccggcctacagggagaaggaatgcaccttcctcaccaagcaggtctcctgcctcgccaatggccgccccgacgacctatggcagtactggcgctggcaacccaacaactgctcgctccccacgtacttcccattccttctagttctagatctgccatttcatttcttccaaatggatcgatttgagttgattcgattgcaggttcgacgcgcggcggttcatggagaagatgcgggggaagaggatgatgttcgtgggggactcgctgaatcggaaccagtgggagtcgctggtgtgcctggtgcagcccatcctatccaagggcaggaagaagatcgtcaagcgcggttccttcaacatcttctacgccaaggagtatcgcgccaccctcgagttctactgggctccattcctcgtcgagtccaactccgacaaccccaatttccaccacatcgaccagcgcatcatcagccctgagcggatcgagagccatgccaacaactggaaggacgttgattacctcatcttcaacacctacatctggtggatgaacaacgaagacatcaaagtcaggtctgtacccaccaactttgatgttactacttcatttaaccaatttttagtttagctgggatttctagtgtgtttaaaatttctttcattttttttttatttttgcaggaggccaaattcaacttcttggtcagatcacgacgaggtgccaaggatcgagacctatggccgtgtgttcaagacttggtcgacctggctggaacagaatgttgatcctgccaggacttcggtgttcttcatgacaatttctcctcttcacaacaggtgatcataaaacttgcatttctgatttctctatctcttacctcctctctacttcctctctagttcaagcaatggcggttcgttacgaacatcaattagttcctccagggcagggcctaggaaaacttaatttggtaccttgaaatctttaatgttgtggaccactgtcggtttgcaataggacaccctacctatccctgataaagtggtttgttactcctaattacgttctgtacaagcaagcttcctcttgttccagtctgcagagcacagccactatgtcattgtccaccagaaaatgaggtcagttggacccgtttgttaggtttgcacgtgataaactaggaacaaatttgcctgactttctggggttttagagtctttcaaattccatagttcactagttggtcttggaataattccacactagttcactagtaggtcttggaataatcactcctgtatccgtatatgcatcagaatgacagaaagtatggtgctatgcacaaactagttacttcggaacataccaatgtctgaaatcagaaggcgtggtgctatgaacttactggattaacgcacctcattcctcaccttttatatatattatttccaaatatttaagaacaagtgaaccaattttaagtactttagtttggaaccactagtattatttcttgttttgtgtgattctcaaaggctctttgttcttttctggtttgttgcttgtgaagcacaaggtgccacaccattccatcacactatgcacgcacccatgtgaaaacaaccctccttttgttgttgtaccagatggtccaccaagaaatttgttgggttcttatattgtatatagacacacatatatatagactgggagtgcacccttggtgattcttttagtgagttttcatggtttcttcaaacaaaaatgcttctgtgcttgtgggtgtgggcaagcaatttaaatttcaaatggaacatttgggataggcacagtatagcctacaagattttgcatgctttagtgattctggcccattttgacaagacaattttcagcaaacataaaacgacgtaatgttcgaaatgttgtacctcaaggaaactgttcaccaatctcagagaaactgcaatgatgtggataactaccatacccacatacacaaatctcactattaaaaaatattgatattggctttgcctgaaagaagagtttctactgttaagaataatgatctgcaaaactaaatgcagtgtaaaaataggcttaatatgcttcttaaataagtctttgtttgatactccctctgtttcatattataagttgctttgacttcttttctagtcaaacttttttaagtttaatcaagtttatagaaaaatgtagcaacatctttaatacaaaataaacatattatcaaaatatatttaatgtttcatttaataaaactaatttggtgttgtaaattttgctaaatttttctacaatttggtcaaacttaaagaagtttgactaagaaaaaatcaaaatgacctataatatgaaacggatggagtacatgtattgggtagccatttttggaaagttgaatttgcaatcttttgagttaggttggtagttggtagatggcaaaaaatttgggggagtgttacttccaacaaaactctgatgcttttgctaggagaatttacatagaaagattagtctatgtcgatgtcacctagaccagccagaaaaaagaagctgtggtagtagattctatataaacagtaacatgaaactctcatgtatgctctttgatgtcaaaatctgatgtttgcagtagtaagatcggtataggtggccgttggttcaacactgatgctgtcatcaccttttgccaatttaatatagacgagccctgcagtgagcttcatagtcgcactctgttcagatccattgctaagacattttaaaaccaccttactgttgaagttagtgctactggaagtctggaactgtggaatatactaaaatataggcatcgtgtgaggtggttgtgagccttgtgcgtcatgacctgtgcaaagcaaagtactatgtgtactactagtatactttgtgaagttagtgtcggtgtcaaataatagtaatatttcatcttcatctgacatcttgaccccaatcctttcaaccatgagacaaagcatacatcatttggtgctttaggctttgattttattccacatcatttgtacagatattgatttgcaaatgatttgagcacagttgcttataaatcaagtcgctttcttgacatgttgggacatttacattctgatgcactcatgtaccggttgaaattaaggatagaatttaaatcaatcgtgtgtttgtgtcagcaaaagacctgctactgtttgttgttgtattgaactaatgatatctgctcttgaattaacattatggtacatgcatttctaatttatttacatcgctgaagcattttttcccctcttgtgatgctatcttaaaaacagcccagcacaatgggggaacccgaacgggatcaaatgcgtaaaggagacacttccagtcctcaactacaccaagccactggatctcaaccatgacatgcggatgtacgacctggtagcaaaagttgctaaaaacatgaagaatgttccagtgtcgttgatcgacatcacaaggatgtcagattacaggaaggatgcccacacatcattgtattccatccgtcagggtaaactgttgacaccggagcagaagggctgacccacagaagtacgctgactgcatccattggtgccttcctggggtaccagacgtctggaaccagatactctacaccaggatcctctccaaatcctcccctccatccacacatccctctctccctccacaatgacaagcagggagcatgatttttttttgccccatcgtatactatataggaaatgtatcattactattcaatttttttggtagtttggtgaagaaaatcaagctagagagagaaaggatggagtgggctgtttactggtggcatgtaaaatcgttcaattgaattgtaaattagttttgagctaaccaattgagcaaacagcactgttgtagacactcggtactctggactgtgaaatcagctggcaatacatatatacaggggggcacagtgattaatctgagatcaatttgttagtattatgtgttgatggcgtgatgcttttgtctgagaagagcagtcggtgtgagattggcccagatggccttccttttgtgtttgggccgtatgtgtgcatacgccaccttaacttccatttattcactcatcgaaataattaatttcacgtcgatcctactcctgagaaaaatatagctccttgagaaatcttttatgtattctgaagttcatgataaatcttgtctcagaaattacccatttcagttaaccgaagaaatcacctacaacgagacgataaatctttgtcttggaatcagctaactcctaacttatcagttgccattagcgaccttagcaaggtaatgtatttttaacccggagagtttaactaactcacaagaaaaaaaaaacagtcaacctcaaaacaagtctctgtataatccaaactatttctcctaatgcattttcgttgctctataagcaacaactcgcagcagcctgcctgcatctctttccagatcatacctacgttcacatgggcttaacagctcagcttcaccttatgcggctgagatttgctctaataagtgttatcagatctaagtgaagtagcagtagtagtgctaaaccaagaagatgaggccaactcccatgttgtacgaatacttaccgctagcatgtatctttgcagtggagcacccttaaatgttggtatttgcaaattgccctctaatggtagttggctagttgaagagcatagcagcgtcgtgctctttttttaaggcatataatcacttacaagccgaaaagtctaagcctaaatacataagcgtttttttcgtttggctttttaaaaactataagtcactttacactaacactattaagtcaaaagctatgtccggaaagttttttttggcttatatgagatagagatataactctaccactaaactaaggatttcaaatctatttgcttataaattatataaactaaaaaaactgacttaaaagtctaaacctaaacaatgagacccttatacatatgcttataagccaaaatttagtttattttacatcatttgcttttaatcgttaaatttatgcatataaaagttttactctcttattttttgcttgctaataagccatacggataagaaagcattggtgaaactatgagccgctaggtgttattaggcacaaatcattttgaaacaaccttttttctatgttcttttattcttaacggatttatagataaatatgcatgattttcgaacccttagacaatgtgactttgaaaaaaactttctatatatgaattttttagaaaaccatttaaacactatttttaactttataatatttaatttgtttgtttgtaaaatttataattaccacaaatcatccatccaatcagccatttagcacaaaagaaatctagcttggacaatatttagttggctacatcaatagtgacggggcaactctaaatattattgatggtagtatatcaccccttaaataaattaaacaatctagcttggacaacatttagttaactatatcaagaggcaccagaacttttgaccctttgaccatgagtttcatattataataactttagatgagaaagttaaggacctgtttagttcccaaacaaaatttctcacgttgtcacttcaaatgtttggacacatgtatggagtattaaatgtagagaaaaaccaattacacagttcaccaggaatttgcgagacaaatctttaaagcctaattgcgccatgattgacaatacggtgctacagtaaacatttgctaatgatggattaattaggtttaattaattcgtctcatagattcctgtgagtctgaaatttgttttgttattagattacgtttaatatttcaaatgtgtgtccgtatatccgatataacatgcatgggtaaattttttttgccaactaaacaaggcctaaaatgtacaaatccctttgagatgcttttaggaaactaataacttgggtgtgaagtagttaagggtgatttatgtcatcaagtaaacctgtgttagtaataaaattgatgggagtagtgggtgagagagtgaatacagggatgatggggggttattaaggaaaaagaggccatatgtttgttgcaaagcaatagagaagccaagcaggcagccactaaattgggttggggtgcctcctcctccctttctttctttcatctgcttcgtcctcagatccgatctctcttctcttgttctggggttggggtctcacgacccgccgcctttttcgtccccgtcgctctagaggggatctcaccgccagccgtctctcgccatggcggcggccaacgcccccatcgccatgcgcgaggcgctcacggtatcctcttctcctcttactcctccccgcgagatctcactcgtaaccaaggcggagctaatggcgcctgactcgtatctcttctcctcgctcgatgcagctcaccagcctggggatcgcgccccagttcgtcaccttcacccacgtcaccatggagtcggagaaatacatctgcgtccgcgagacctccccgcagaacagcgtcgtcatcgtcgacatggccatgcccgcgcagcccctccgcaggcccatcaccgccgactccgccctcatgaaccccaacacccgcatcctcgccctcaaaggttccttcctacctagatctacctgctatctactctttcggatcttcacttatttcctagcgatctactctcctactccctaatctttctactatttgcttaattcaaggagccatagactacctagcacattcattttgccatcctaccatagctggaaaccatactgttattcttaccatttgcttcatcttgttcaattcatcagaaatgtgtatgctaattgtggtttacctctataatttcgcgcacatgtataatttccagtaacaatatgttaaggactgacaaattatttagcttcgtgatctactatcaaaaaattcacgatgaatctcgatcaactgtgcattttacaacttcaagagtacttactccatagtaaaccaacagttttcatattctcatgctgctcattcctagtcacagtttccatgcccttgctagttgctactgactaggagtcgactatcatttcggttttcgcttatatttgtagccatggccacaacatcaacttattctcccataactccataagttaagcttaattttaacctcggattgggcttacatggatatttccacgctgttcttcctaattgaatacatgacgtacagatcatctggtcttgcacttgatgtttataatatatcctctccaggcaattgttcacttgttatactgtttcataccattgtcacgatttgttcatgcttcatgcttttgtatgtctatttttaggttgcttcagattggattcatactggcaataaatttttctaatgtttaccatcaccagtgtttgtctgacattcaacattcaatttaaaatgcctagtttatacattgacatcatggtgtctggctagcttactaattgcttacgtagaagcagaatgatatgtctttacttttgcaactttccagctgtttaacttttttttgttgctggaatttgcagctcaaatacctgggacaacacaggatcacctgcaaatcttcaacattgaggctaaaacaaaaattaagtcccaccagatgcctgagcaggtacaaaatttgaagttttgccaaagtatgcgtaaccactttgtttaaattgtatcctataatcttaatgtattctttgcatattttattttcttttcacaatcacaggttgtgttttggaaatggatcaccccaaagttgttgggtttggtaacacaaacatcagtttatcactggtcaattgagggtattgaactattgatctgaacttttgtccaattattattcgctgctttgcattatttggatcatatccatacaaaccaatgattttttttgcatgtatttgttgtaatacaggagattctgaaccggccaagatgttcgataggacggctaatttggccaacaatcaaattatcaactatcgatgtgatccatctgagaagtggcttgtgcttattggaattgcacctggtgctccagaggtatgtttgttaataagtgccgatataacaggctgcaatggtgtaaagatcaaaatccttttgggcatagtgtaaaagactacatatattttcgaaagttgtaggaaatatgctacacctatgctggagcagttcttaaaagtttattacgtaatgctttgttctatatcatcctaacattgatgtgctctctttttcacccatcagaggccacaactggtgaagggaaatatgcaacttttttctgtggatcagcaacgtagtcaggcacttgaagcccatgcagcatcctttgcatcatttaaggtaatgtccggtactccagttatatttgtgctggttacatattctttgttctactatttgccaaattttccttttatttttcctccacaggtcgtgggcaacgagaacccttcaactctcatctgctttgcctcaaagacaactaatgctgggcagatcacttctaagttgcatgttattgaattgggtgcccagccaggtttgtctctggaaattttcaagatttgttttgtttctattttcaagtttgtagcagagtaagaaataagtagaatgccttttatcaaacacacatttgtcatttagtgtagtcagtgctattctgcaaatggttctatattccaccccattcttctccttgtaggccattaacagtgaataaatgttcatggataaatcattcctctgttcactcgttcttcctatcatttatttcagggaaaccagggttttccaagaagcaagctgatctcttcttccccccagattttcaggatgattttcctgtggccatgcaggtgaatatcttgcactctaaaggaagtataccctgttagataccgcatagatctaatttttttaaattttctgtcaattacagatctctcagaagtatggccttatctatgtaattacgaagcttggccttttatttgtatatgacttggaaacagctgcagcggtctatagaaatagaattagtccagatcctatattcttgacagcagagtcttctgcaagtggtggtttttatgccatcaataggagaggacaggttttacatgccacagttaatgatgcaaccattgtgccttttgtcagcagtcaagtatgttctcctgcccttaaattacttggcttatgtgcttgctattatcgtttttaacacattttgttttatgcagttaaataaccttgaactagctgtaaatcttgccaaaagagctaatcttcctggggcagagaacttggtaagttccattacttctatgcttttgttgtgatgctgttacaattgcaatttacgcttgttacctatgctggttttatcagtggcatatattttcctgcaagatatgatagcgagtttaatgttttatattgcaggttgtgcaaaggtttcaagaattgtttgcacaaacaaaatacaaggaagcagctgagttggctgcagaatctcctcaaggtcttctccgaactcctgatactgttgcaaaatttcaggtgcatttctgctcttgattacagagctattaacacttcttcacctccattttacagctatttttcacattctgtactgttaaaagcttaaaattatgtgaactgatggatgatgcatcatgtttactatgctggccctagattatagagattagtgtgactcttaccatagcaatttcagcaatgcgactactatggtgacttctttataaaatcattgggctttatgaataaaaaaaatgttccttctgttttactgcataatggaaacacctggtaactacttaccgttactttcttgaggttttatttgataaatgcttcaaacatagtgaatgcattactattattattttcatttactttcctgtgttgggactgtacaactaatctttaaggcttaggttcttctgcttgactaagctttttcgtttctgtgctttaaaa

SEQ ID NO: 1921 - DNA, 671 bp, Oryza sativa
atctcccgaatgatttggcgaccaaagaacaagcgaagggactgtcatggttggtatggctgatctagccatccgccagaggtccgcttcccccatcatagccctagctatctccatccaaggtctgctcttctggttgaagacccggttgttcctttccttccagattatccatgctactagtgccgcaattgtgtcgaaccctcggcgatggtctttaatcatccttttgcgactgtcacacaaccagacatgaaaggactgctcattgagaggcagacattcagaatgaccgatagcagtaagagcaatccaccaaagctgccgagactccgggcatgcgaccaggagatgatcaatcgtttcgtcgcattgatcacagagggggcaacgatccgggtgcgacagacctcggcttcgaaggcggtccgccgtccagcatcggttgagggcgaccagccagaggaagtaacggcatcgaggaggggcgaagaactgttacagttaaactcacaagttctaagctagtagagaatggcatgcacttacatgttcagagtagcgagttttgtcttttcctttccttgcttggccatctgttgaagttcaacaagagcttcagtgagaaattcagaggaacaaattaaggaaggaagtgccactgcaagaga

SEQ ID NO: 1922 - DNA, 585 bp, Oryza sativa
ttcgtttgctcggacagggtggcttgcagctgcgttggttcccatgccaatggcgttcttcctaatgtggaaattgcatgatgtaaacactctggtagcaggaacagcactaattggtctaagctcaggcttcatctttgctgcagcagtgtcagtgacctctgagctctttggaccaaacagcattggcatgaaccataacatcctcatcaccaacatccctcttggatcacttctctacggtcagattgctgccctagtgtatgatgcaaatggcctaaagatgtcagtaatagacaaccgcaatggcatggttgacactatggtggtttgcatggggccaaagtgctactcaaccacattctttgtgtggggttgtatcacattcctggggttggtgtcaagcataatcctattcttgagaacaagaacagcttacagtgctgctggtggtcagcaagttgtaaacaccttagcgaagtttcgacttgacagaactccttgatctgttccttactgctatgaaaccatggctactttgtacaagttttgattgagttctaggtgaactaggttagtagataa

SEQ ID NO: 1923 - DNA, 2071 bp, Oryza sativa
taaacttcttacaaacgttttcaaactgtcacgtgatgttctacaaacacttctagacgtcatgtggcgctctaattaaaaataatctaaacattgatttttcttcaaattggtggaccaaataattttaactattagatcttaaaaaaaatctggctcccccacctccacccccaccgtatgtgaccatgcatgtacatgctccaccctcctactctcctctaggatcccattgtcctctcctattttctagctaacacaaaaatatataaaaaataacaatagctaaatgatgatgattctcaagttacatgtacttttctcaatttatttgatttcttgtgttattgataattaaatacataatccaagagatatattgcccatattaactatataaaagttacggcctcatcttttcgcttatgcttattagctaaaatttaaatttttaaccttaaatttggagttaattttgtggttttctatctaagtttatttttcaatatttgttttttgatcgctaagaacatgtatataaaaatttttcataaattattttttgtttgcaaatatgttgtttaacatgggaccgttagataatttggttgttttgactacaaatatttgagcaaaatagcactttaaaaacaatgaatgaattcaaatatgtgagtctaaagtccaggttcaatcaccaccaaggagcttggaaccatgatatatactctaaacccgatggaagcggagctacaagacattattagccagatagacaccgacgacagcggtagcattgacttccacgagtttctaggcctaatggcatgcaaaaggacaagtattgagaggaggggcagagggagatgttccgagtcttcggcaaggagtagaaaatggcttcatctctaacgccaagctcagtcacgtcatgtccaatgtatcaggagaggctcactaatgaggaggtcgacgagatgatccacgagaccgatggtagcaagcgtatcaactacaaggagtttgtatgtaaattcatagcaaaaaaaacaagcaaattgattaaaatatacactaaaaaatcattaaaactataaaaatacaacaagatttcatgtagaatataaaatatcaagagtccatataaatagctaaaatttggaataataaaataagtattaaaagaaaactccaaacacaacacgatacacactttaaaatccctaaaaagacaatttagaataaaacaataatttgatttgaatacatatttgaaattagacttaatcactaaattcgaaatacagtaaatatttttttaagaacttttctatctctatgcataacgaattgcatatatatgaagcaattgaagatagggttagcagggtgggaaaatatatttattatagtttgttgatatttcttcaaaaaaaaaagatgcaaggaacactcaattaaaaatagaaaacaccttattttaatttcaatttattttgttagaactattttcaaaacaaactaatacacatgcccgcgcgaatgcgcgggctatcttcctaattactcactccttcccaaattgatcatcatataatgaaatccaaaatttctcaaattgataattatataaccgcatggatacggattttaatggaatacaataaatgtagtaagagaaaatgtgtacatgctaagcgtgtaattgacatgttgttttaatcgatgcatgtattgtgggagaatatgtacatggtgtcttgattgatatgatttaaattattcttggtcttggtgtataaatatatacgatgatcaatttaggatggagggagtatataaaaggagacaataagccaaagtgataaattaatgcagtagagagagattggtgttgaagagcggatagtttactctatttaatttattactctattatattattgtgtatgtagagaatagtaaatagttaccatgaaattggggaggaattgaagttgaaggactccatgtagagggagaagagatggaggagagaaacacgtgagaattattatatcaggagtatcca

SEQ ID NO: 1924 - DNA, 1301 bp, Oryza sativa
ttgagtctaattatgtcatgattttgacaatgtgatgctacagtaaacttttgataattatggattaattaggcttaaaaaaatcgtctcgcggattagctctcatttatgaaattagtttttttattagtctatgtttaatactctaaattagcgttcaaacatctgatgtgacttgggctaaaaagttttagccccatctaaacaccccctaagcaaatccggcgacttttgctatctcgctgttctgattgccagcaaatttgatgatttggagctgctaagcaaatccggcgacttctgctatctcgctgttctgattgccagcaaatttgatgattgccactggttgcatgttgtttgctattgacttgatttgttgttggctgtgggatgtgaatccgatcgtcaaagcagtcggtttcggtgacagtcatagcagtcggtttcggtgaataatagcagtagtttggaaaagttttggctataggaatctttgcatgtcaatccgtgtgctacactgtttcagtgaaaagtagtagtatttttatgtcgtgctatgagtagtactccctccctccgtataagcatattttcaaatctgaaaattctatgaaaattctatttttgataagcatatttcaatttaacaatctatcatcttaatgactttctcggatttaatgtatgactctccattcttctatacaagattggctacttgagcatcgtgaaatgtaaatattaatgaatcgcatgtttacgaagaatgactaggagcatgtttaaatggatggtaaatagaattaattatcattggtctgtgtgccaagatgaaataagagctcccaattccataaaggctatagaaaaccgtgtaatacaccttttctacctttggacttttaaatggttctgacttttaccttgtccgacttgtccgatttctgctatatactctgtaaaactctgattaaatctttaccgttaaaatctagatctattattatccaatcgttaaaatctttttctttttttttcgattaacttgggaatttattccccacatagaacgtggtgtctcctttcaagactgttttaataatataatagatagatagattaaactgcttggggaaatactagtgatgtgatggagacgtggtacgtaccttgctagttttcacaaatattccgtacatataagtaggttttaaatagggatttactttgatgagagatgtgttgctggtttctatctcttcgagagtgtgttagggtggaaggtgaattcacgggtg

SEQ ID NO: 1925 - DNA, 1558 bp, Oryza sativa
catcacatatatactgcagcatgtctttccgcagcaattatgctgattcttgactggtatgtcgggcttgtccatcttcagaaactctgcaggaaactcgtgcatattactgttggcttagtatacttccttatgtggcctttgttcaggtaaaccagatcgatcgagttccagaccaacaatatactagcagtatctttaattttgtcatgtcatagccataccaagtgtgtttctgccttcctgacaacgtactcttcctgatgcagtgcggatgatgtctatgctccatttcttgcttcccttgtcattgcattcaacatcataaaggttaccttgattggacttggtattgtcaaagatgatggcgtcattaactccatgaccaggaacggagaccgcaggtactcatctcatttcccccctttgacaagctagtgggcaaagaaagatttggcattcttacgcattactgcaataaaaataataataatcatagttgtgttgcttctaccacttgattcagtaatccctttttgtttccagagagcttcttaaaggtccactgtactacgcttgtgctataacactcgctactgtaattttctggaggacatctcccatttcaatcgcagtgatttgcaacttgtgtgccggagatggtacggccttagcttcatctaatctcctgcagttgaaaattttctgctgatactgacactgttctatcgattttggactgctcctttcattcaccgagtgaaaagtttcagacgtcaactgacttctctacactgcttctttcaggtgtagctgacatagctggaaggcgattcggacatgtaaagcttccttacaaccctgataagtcttatgctggatccattgcaatgttcttagctggtttccttgcatcaatcctgtaagtaacaagttggagtatctaataggctaccctacatttctattgaagtcttggtagctgttaatctgaaactgctggagtacttgctaggtacatgtgctacttccacctctttggatttgtcgaggagagctggagcatggtgatcgcctttggtgtgacatcgcttgctgctgcaattgtggagtcactccctatcagcacacgcctggacgacaatctgactgtgccactcgcctctgtcctcgttggtgtccttgttttctattatactggggccagaaacctgtgttgtatgagcgctgacagcagtgacatttctgcacttgtgcagaatcagatggtcttggacaggttctagtgactactgactagtaagtagctgccctgcagagctgaaaagaaactgatttactaatatcagatttgattaatgtaacaaggatcgatacaagctacaagcatcatagttgtatcttgtaatcaagaaaaacaaaagctatctgatatactagtaaggcaaaagttgagtagaggaaaaacataccagagagctgtctacactccaaactaaatgtctattctgtatatatggtggttgtgtgcaagctgccagcgctttttgttttccct

SEQ ID NO: 1926 - DNA, 1340 bp, Oryza sativa
ttcacataactattttatttcacttgcaatgaacactggttgatctgacaaattgacaggtactactgctgatgagaaatctgtccatgaacttaactagccccaactttgcggcacatgtaagtgttctgtttttgtatttgttctccactgatattatgcatcttgtagctatctaaacatgttatgagtaatttagagtttgaactgtactagcgttaaggtttgccattttggctagttattgtggttaggttcttgttagctgaatttgtgttcgaagtttggggtagctaataatgttttaaataacaaacaattgactggctactttcatgattactgtgatcagattgcattagttgcctaccacatgcttactctcatccacctgtgttcttctggatatctagtgtcaagttgaccgcatccatgtcctctcaaacttactttgcaggatttgatcctgattgggctggctacaacagccatagaaactttatacggaactttctttttcctgaataactaaataggatattattatcatggtttcgtggtatatagtttctacagatatgaaatgcattagctatgtcaataagggcatattttatgttctacacaacacttgcatttgacttcgatttgttatagtgcaatgtcctgacattttgactctacctgattgcagctgagcttgctgtcatcatgtaattctggtggggacccaattaagtctgaaggcatggaaaatcttggatctccacagagttgccatctcccgttcatgtaatacttcagttactctcgttttctaggtgcttgtaatctgattttatcccatcttgctgaagcaacttttcgtactccagggtaacaagtgagtgagggagaactgcttgtatgcggacgaagcttcagttgtttccacaagacgttctttgttctctttgtactggagttgtggacggctgatccggcagtttaccaacgctagcacgtgttgtggccgtggcatctgtatagcttccaataatgctctaaccctaggctagttttgctcatcaatcatgttcatgtagatagccagttttgtgtgctcagcaattctttttccctcggggtggggcatggctcgaaatgtttttgtatgtgtacatctttgtatacatgtatgtaaatatgtgtgatcatgtaatgcttaaagatactgttgactgatttgaggtaataatacaataaaccagtggggcactcgggtgtagtctctagggcgccccactgttgtgaaatgtgagctctgaagttgtggactatcttcaaagctatgacctagt

SEQ ID NO: 1927 - DNA, 2046 bp, Oryza sativa
aaatttctaagtctattacgcgcggcagtttttggacttcagttcaaaattcactcgtgactgttgggcttcaaacgggatgctcgactacacatcaactccgcgattctcgcacccggaatgataacgttctagacgcccgaagtcgcgaatggtcgcatgagttcgtttttgagcaaaagtcggaggctactgtcagggttacgggtcaggcataccccctacccttcgatatacgatacgtatcgacatggcatacccacgcgcacgcggatatttcctttatgatctaaggaaacctttcacgaaatcaatagacgggaaaaagtccttctcggacaagaactgggttacctacgtatcgtgctaggtctggtatcttcgagtcctactcggagagtaccagacctgtcatataaaagggaccccccgagaagggcatagatcatcgaatctcagaatccacacagtctaagaagccggagcctgcgaggagccaagtcgccgagagctagtcgaatcaactcgactacaatctcgccggatctgacaagtttcatcttttcctttgtaacctgtgttttccaccatataatcccacatcaactggattagggctattacctgtcaaggggcctaaaccagtataattcttgtcttttgattgctcgatgtcgtactacgtagatctttgtaccagcgtaccccaataccctctatatccggtctacgggtatcacccgtcgacagtgctacacttttgaaatcggtagccaatagtctcttattccactataggtggcgtagttccattagaattgctagctaaagaacattatgtggtttaacgctagtccataataaagagaagttggagatttgtctcatcgccttatttctcattttaattttaattttatctttacccttttttattattaaacttatgactgtgtgtcttatgatagaagctggagatgtaatccattttcattatctcaaatccagtactccatacacgagtacatgtcggatgtaaataaaagcacagattgtgcactgcattagcacacccatcacaagttcacaactcgcgagtcacagatctaggttcgttgctcgtcgtgactcgtgacgaagtagcaaacaacgataagaaaagagttctcaacggttggcagcatgcagagcatgcgttacatgacagcacaatctgcactacaagcatcgtcaaatccaagcatattctcgcaaatctgcttgagcctctccagcccataccgacccgcggcttcattcaagctcatcaccatcgtcctcggcagcaggggatcagaaccatcctctctccagtcgagctccatcaacgtgtcggtgtagatgaaatggagcagcgccctgaagacgccggctctcatgtcgtccttgacctcaacgcgcaccgacccatccttcttcctcgtgccacctttcaggacggcggcggcgagggacggcgacctcgcggcgagcacgcacctgtgcgccgcgatggacacgccggaaacgatgaactcgacgtcggcgaatctcccgctccgcagcagctcaccgagctgcaggtgaaggtcgggggacggctcggccgagttgatggtgttcttgctgagcaccgtgatggtgcagcgcacggcgaaggagtcgccggtgatgaaacccgacgcctccagctccctccgcttcacgagcagaacccacggcgagctctcgttcgcggacccgaacgcgtgcgactgtcgctcttctcctcggaagcatgggagcgcgtggtcgacgggtgcaccaggcagcagctgagctacgccttgatggcgccagcgtcgttgtcgtcgtcgtcgccgccggcgcgctgcgcctgctcgccgatgccgaggaagacgagcttgaaggcgacccagtagtgccagtgcgcatcgtggcctggggtgtagtggatctcccacgcatacccggccacggtgagacgcttggaagagacatgctcgtgtttggccatggctttcgtgg

SEQ ID NO: 1928 - DNA, 636 bp, Oryza sativa
ccttggttgtctgacttgttatctggcatggtccaatcggccacgaagtcggcgagtacctgagatttgatggctgttcgcgacacaaagtggatatcaaattggcttagctcgactacccatttcgcgatgcggccgacaacgtctttgtttctcacaacttcgctgaggggaaggaggagacaactgtgactctgtgggcttgaaagtagtggcgtagcttccttgatgtcatgatgactgcgtagagcagtttttgaatctgtgggtatcttgtctttgcatcatggagagcttcgctgacgtaataaactggtcgatgtactttctctctctcgactacaatgacagtgctaacggaatatggcgtagcggcaatataaaggaataattcttcattaggttggggagcaacgagtacaggtgggtttgataggtagcgcttgagtgcaataaatgcctcttcggcttcccgtgtccatacaaatttgtcttgtttcttcaacaaagcgaagaaaggctgtcctcgttctcccatcctagtgacgaatctgcttaatgctgccatgtatccggttagcttttgcacctccttgagtcttgtgggcgacttcatgttctcgattgctttgatct

SEQ ID NO: 1929 - DNA, 716 bp, Oryza sativa
ctccacctcacggtatccaaaccaagagccatcttctcttttcaaattgaatgtgattgtagggcccattttcagaccttccacctaaaacataatacatagaaaagaatagataagtgcagagagctagcagaattcaagtgggcacttcagaatatcttattcataatggcttgttcttatatggatgacaaataatccaaaccaatggaagaaaagtaaataaagcagcagtaattcttaataagaagatagaaatataatgagatataacttagttatggaaccttggaatactgttgtccatatattgtgcaaacatttatctcattactgtgcttcaggtccagcattttgtttctcacataagtagcaagggatgtagtatgcctacaaaagaacatcagggtgtaaactatacatcatggatagggtgctaggacccaaactgtcttacgtaccgttcaattgcagaggtagtgagcatttcaatgatcttaaacccatgtcggagagaagctatgttcaagaacgagattgttccatcctctagaacctgttcgatattctttcttttttgaacaaagtcgatgtcagcaattgaagcagctacggttcctggaatttaataacaattccggaggtaagttaaaaaccaggatatagaaaatagattactcaaaaccaagtataacgagctgtgaccacaaacctcc

SEQ ID NO: 1930 - DNA, 1128 bp, Oryza sativa
cccgtctacggacgcaggctagaggtggccaaacgggcggcccggcccggcacggcacgggcacgggtccggcacggcccgtttcggcacggcccgttaggcacggctgatgaaacgggccgtgccgtgtcggcccacgtgccgagccgccggcccaagcacggcccgtggatggccgggccgtgcccgtgccggcacggcacgcccgcggcccacgggccgttcggggcacggcggcccgtgaaggcaggccgccagcccacagtgcatgcacagtgtttttttttttaaaaaaaggaaaggaaatgtataaggaaaaaaaaattaaaaatggaaataaaatgtttaaaaaaaagtaatgatttactaatgttaaaaaatgaaaaaatggtatttaaaaaatggaaataaaagttttttaaaaaagtaatgatttgctaatgttaaaaaaaagaaaaaatggtatttttttgttgtgttgaaaaatttaaaaatatagattgtgattcattattttgaaataatttaaaggtaaatccacacttgcgaaaatattgcaaaagaatttgttaaaaatagtaatgacctttattaatgtttatatcattacaggatacaatgatacatgctgcctcgttaaaaactttgtcatgtaaaaactcataggggaaaatgagaaaaccatgacaaagaaaagagtacagctcaaaggtcagaactacttctaacaaaattctactggggttggtctggatccaggtagagttgctcgaagtgggcggccaattcttggttgtccgcagtgtattgggcatgttgtcgagcaagctcccagtctttaacgcttagtagcatttcgacgtggtcgctgcgcagagtcgtcctccggtcttcgatgattcggccgcatagactgaaggccgattcggaggacaccgtcgacacgggcaccgtcaacacatcccgtgctagttttgaaagcacaggatatgttatcttgtggtcattccaccacccgaggacgttgaaatcttgtgcttcgtggtggatggcgtcgctgtccaaataaccggacaactcttcggccacaacatgcgaagaggcgtctccacttgtagccgacgaact

SEQ ID NO: 1931 - DNA, 2250 bp, Oryza sativa
  unsure (1)..(2250): unsure at all n locations
atggcgatgaatcagagggggaggcggtggcggagtgcggcagcgcgagcgtcaggttaggggcggcaccgatctgggcgacggacgggacgggggcgcgggcgcgctccatggcaatgtgcagagggaaggtgtgggaagaggcagcgattgatttgctcgcatgcgtgattttcggccggtcaccccgcgtgcgcgcaatctctctcccacagtgtgaccccgcgtgcgccggtaccgttggatctagaagcgttggatgatttggaccgttagatttgatgaatgagtaatgtaggtgtaagagtgagttggtgaattatagggtagatagactatagttcgatttttatattttcctcaattttctactattaatgtaggattttctagacaatgagagtactaaacgtggaggcttctttttctattaatttattaagttaatagatttctagtatttattaaagtaccatgtggtaagttaggagcgtttgtaggagtgtcatatggcggtttaggattatttgtaggaagtttaatggatttctagtatataatagatagatagactagttttcacgagccgagctaagccgaatcggctcgttagccccccttacatgcgcgaggttgatccgacagctaatggcagtggactgagatctattatattattaaaacagccttgaaaggaggcaccacgttcgctgtggaggctaaaaattcccacattaatcatagaaaaagaaaagaagaatccaaatagaaatccaaatataaaaatagctaacattcggaattaaaaatatgcattattgaaagaggagtccatatagcaacccaatacatgattaattaaaactcggaataaaaataaaataaattttgaaattagaaaaagaaaaaaaaacaagagttcgagaaggaatacaatttaaaaatatcttanattcagaattaaaaaagtccatacaggaatccaatacaagattaattaaatttccgaataaaaaaataaaaaacaccgaaattagaagaaagaaaagaaaagaagagttcaagtaggaatactgtcagggttattgataccacatacctaatagtagttgactaaatctcggcaggacccaccacataccatgtcttatacggaaaaaaccttcggatataggaggagttccgtataaggaaggatgaatagagttctacatgaaaacgacaaggactactcggattgtatctatattggtttccctagttctacttagacaaagggacacctatgggtataaatacaaggtcccctaggaggagaggggacacagaacaatagatcaagacacaagatcaacatacaagccaacatggcgccaagacaagacgccggatatcgacttcagagataagcatagctagtcccctacggtgtctacggatactatcaggagagacataacgatgtctttgatctcgccggatgcagattcgaggaggaaggctactctgttgtcgactacgagtcagcacttcagaccgccaagtcgacaacagttatataggctaccccaaatattgtactggtgcgattttggtgaataagagcaacgaccggcttcggccaacaggagtagggttattacctgacaattcaggggcccgaacctatataaaaatcctcgtccccatctcttttacctaagtctcgcatatatcctggtaccaacgatccccatactatgcaaataccgtagtcgtgacatcaaacgtcgacaaatacaatttaaaattaacttaaatttggaattaaatataagcaatattgataagagtaaatataagaacccaatagtagattaattaaaaaatccgaaatttgacgggccgtagaggagtatagttgcatcgtttgacgggacttctaaaaattaataataaactctaaaaactataaggtccaatttttaaaggtttggaacttctaaaaaatataaaaaaaccaacgataattatgtttgatttttaaaatagcaatggcaataaagagaagatgcagtggacggttgtagaggagtataatgcagcatttaatgggacttctaaaaattatacaaaagaaccctaataggacgataaactctaaaaactataagtttttaagatctaatttttaaaggttctaagaagaatgaatagaaacggtggtagatcaagcaagctaataaagaataatatgacagaagtaagtgg

SEQ ID NO: 1932 - DNA, 696 bp, Oryza sativa
aaatactggtgggttagtatgaagcgggagattgcggagttcgtagccctttgtgatgtgtgccagcgtgtcaaggcagagcaccaacgaccggccggacttctccaacctctccaagtaccagaatggaaatgggatgaaattgggatggattttatcactggacttccaaaaacccaaggtggatatgattctatatgggtagttgtggaccgactaaccatagtagctcggtttattcctgtgaagaccacctatggagggaacaaactagctgaactctatttcgctaggatcgtaagtctgcatggcgtccccaagaaaatcgtatctgatcggggaagtcagttcatctctcacttttggaagaagctccaagaagagttgggtacccgattaaatttcagcaccgcgtatcacccgcagacagatggtcaaaccgagcgtctaaaccagatcctcgaggatatgcttcgcgcatgtgtcctagatttcgggaaaacatgggataatagtctcccctatgccgagttctcctacaataacagctaccaagccagcatacaaatggcaccctatgaagcgttgtatggacgcaaatgtcggacaccgctattggggaccaagttggggaaagccaagtgttcgggaccgatatcctgagagaagccgaagctaaggtcagaaccatttggg

SEQ ID NO: 1933 - DNA, 743 bp, Oryza sativa
ccgcgcttttcccggccaccaaccatggccgccggccgccattcccgtcgccgttccgccctcccccgtggccggctccctcttttctcatataaaatgggatcctcatcccccgttctctcgttttagccccctcccgagcctccccgtggtccctagccatctccccgccgccctcctctctctcccacgccgccggccgcctccagccgcctgtgccgcctcgcccgcgcaccggccggccgtgccgtcgcctcctccagcgtcgcagccgcctcctcttccccggcgccacctccgatttgtggggaaatcgccggaacggtgcccccgccggcaaccagtggcattggtgccactgtactccctccagccggctcctgtacgtcgccggtgcgccgatcgacgccgccgtctcctccttcgacaccgcggcatcgcctccttccccggcatcacctcctcctcgcccgaagctcgccggagtggcctcgtcgtcggcgtccagtacctcccggtctccggtcggctcctgtacgtcgccggtacgccgatcgacgtcgccatctcctccgtcgacgtcgcagcgttgtcctcacctccagctgctcctcggtttcgccggaacaccgccgtgtcgccaccaacccctccacccgcctcgcccgagtccctccgccgcccgttcctcctcgcttgtttaccggtcagccgcggcaccaccacctccggcatcgcagcgg

SEQ ID NO: 1934 - DNA, 1277 bp, Oryza sativa
taaggcatgctctcgttgtggagaaatcggtcatgttgccagctcgtgtgccactacatgcgttcattgtgaggaagaccatccacccgataggtgtccaacgagcaggatcacttgtttcttttgtgaaggaactgatcatgtaccaaaagattgtcgattcagttttctgctgacgaagaagatggccaaccaacccgtcagttccaacggagagaagcatcaaggaaacacaaatcctcgccaagattacagtttcagcctaactccagtgccaggacagaggaaacaaaatgagaaaagaaaatgccgagtccgggaagatatctgttgcttcaattgtcaaggaatgggtcatttcgccgacaagtgcccaaaaccgagaaacgtagctgccagcacgtcagtccacgcaaacccccgcaatcagaagcttgctcctcaacgaattgtcatccatgcatcccgaagcagtcctatagcccgcgttgcaacagctccaattccaatgagtgcactaccacaaggtgtcaatgctcaatttcagccccagccaccagctgacaagacagaggccagtatctgcgttgtacctttggaagttccaatacagcagctgagaaatcaagtacaagatgaagaacccgagtgtaagaaagttattgtttgttacaactgcactgaagaagggcattactccaaaaactgtccccaaccaaggcaaaatcgacctccacattaccgccaatttacacgaagcagacattccaatcgtattgtggtcactggagcaaacgccgtacccgtaaggcctcgtgttaatcagaacccatagcagaaacaatgcaccaatgctcctcctgctgcacctgactcggcaataaatcatagcaaccattctctgcatcgacagcctcagcaaagaattgtcgtagatggaagaagttgtgtctctccccgacctactccaggccgagccaagagcaatcaacctccggagggcgataccaagcagaagaccgtcatccgcttcaaccagcaatcagaaggaagcttctcctgtgaatgatagcattatgtagtcctgtcacatcatcacagaaccaatcaaggatgcagtcactagaacaatgccagctatatctctccagaatcaaaatgagcagccatgtttgtggttttcagttcgctacttatcatggtgtaatcgaaagtttgcagcaaccatgtaatacataaatatattcatgtctataaacagtgagcttgctatgctt

SEQ ID NO: 1935 - DNA, 2532 bp, Oryza sativa
tcaagaacccatttttgtgctttgtttctgctgttatgtggagtttagtagagtaaaagccttttctttttcgttagtcgtgtagacgctgcagcttcggaagatccgctcttcgtggaagttgaagccggtgtttgggaaagcgagcaaggcaagtcacatcatccttgagcatattgaaccccagtttataaaattattttgatttaaattattgcattaccgctttatttaaattcccgcgttatcactgttttatttagccatgcctatttatcgttgttaagacattattattgctattgttattattaccttgttcaccctaggaaaataaaaccccaactagtgggtactctatttatggttccactagtatgaacttaggtagatgcttcgctggttaattaggcaacattaggtgattttataactttagactttgggaattctcatatcatttggacactatggaattgttggtttatggtggaattggacatacacctctcttcccctttcaaaacccctaaaacctgttttcggtggggtttgggtgcatgccagttgtgggaagtagcaccccggccactataaggattaagctcgggcctctgttgcaaagcactaccgtacttccacatgtctagtgggtaaggcttagtttgtggctcagtctggttataaacaaaagtacacggattggagatggatgaagtcgggggtcgatggacattctccagggcaaatgaaggctacacgagctgcggcccggtagtcgagatgtcatggcagagggttggtgcgctgctgctaggggctcagtcctgcctgcctgtcccgggggttccggctgtaggcaggattgggtcggtactcttgtctatggctaggatgggttggaaactatgtcacgtcttccgtccgtataccgtggtggtatgtggcacgtggttacacgtgaggaacacctctgatcagagtataatctattcgaatagccgcgccctcggatatgggcaagccgagcaatgtacccaagtcagtgttttaattcttaaaatttgctcaacaactaaaatgtggaatggttggcctgggttggcttgggacgagctgggacccaggtcgggttgccagttcggtctgaatcatcgtaggccttgggttaaggcaggttcgtgtgggttcacggccttgattaataatactgtgtagctctaggatcgtctttataaaatggctttgggcaactaagtgacttttaaatgctgtttactgcaaaacttaacccctatattattatccccttgtacctcccttgcattaatcatgcatctgccggtgtggcttgctgagtactgtggttgtactcattcttgctcaatctttctcccctcttcagtaagagaagctttggagaagatgtcttaggtggagtcctggcttataccccagttgagcgcctgtgaagatggagccgtaggcccgctagtccgctgctgtttatttttgattgtcaggccttaagtgcctttgtaataatgtaaatattatcgatataataaagatgtgtcttttatatcatgtttgtgtggtgtaccccggcttttcctgggacggggattaatacactagcgttcgggaaaaggtaattttctcggtcgcgacaagctggtatcagagccatctcgactgtaggataagccaagtggataaaacccaaggacatattttataaataaaactatttgcgaaagttccttttttctccttcccctaatgctatttgcaaaaggtttactcccttcttccttcttcggatttcaactagtactagatggtcaggtcagtgaagaagaagacatcgtcagttgtttgccgaagctccggaagactgcaggatccgctagcgaagtggaggaagcactgaagccagctgtgaagcaggagtgaagatcttgagaacccgtcacagaacctaagccaccctctagggtagagttgttagtcgtgtgtttccttgcttgtgtgtgtagcgcgtggtttgcatcagtgggttgtgatgtaaccatgctaggttgtttgcttaatcaacttgcagaataagcctaacatacatcataacagcaaaagacttagatctgttaaggtcctatccttagtttctaatctgtctctcccctttgttttccctctctccctatccaaacctttgcaacagatggctgacaatgagaaaggcaataaggtcagaagtcaggacattggtacctcaagctctcgagtgaatgaagcaccagacaccagttgtgtggcagtggtccaacacctgattaaccagaacaaattgcttatagagatactacagcagcatcggatgccaattttgaacccgagtcagatacaacctcaagtgcagttggaggcagtccaagcactcacaccacaagtcagcgcaccgccaacatcccagaagacccctcatgccatgccacatgttgacccaaaagaagcaagtatcatctgttt

SEQ ID NO: 1936 - DNA, 657 bp, Oryza sativa
tgtcataccatttcagagtaaggaggatatttatttgtaatacatccatatacaaatgcaagagtcataataacttactactgtaagattgttagaaattctttgtattgcttgtgtttgtaatcgagaggatccaagactaccacggttccgtctttagggtggatgagtaaacagatataatgatcgctacatattaataacattataattagttagtaacagctaaaataagacatatgtgtacaagataaatgtaccgaacttacttaaaattataagcggccatgacgactctcttattttgaaagtgcaagaaggctcgtccaatgtactgtgcgacagtaatcaatttctccttgtgcaagcccttcttgtattctgctatctctttcggattcttgcccttcagctggtctgaccctggatctagcgtaacggtatgctgtgtttggcagatctgagttggatccaagaaccgatgggttcttttttcttcttagcatccatgtattgcatcctacataagaagtttgttagtagcaatcacatggagttgtattgtacatattttttatctaattaattaaaattcgtactcacatgcaccaaacaccgacatagttgacgtccatcttatcccgacgatatatgggg

SEQ ID NO: 1937 - DNA, 880 bp, Oryza sativa
gtcgccgtcgactcggggtgagccgtggaccgccgtttcgtttccccctttccctcccctctctcggccgctgctccgccgtgccggtggtcgccggcggcgaccatcggggcgagggcgctgcctcccgccggccgcgccgccgtggctgccttcgggcgcaccgagtggctgccgcgtggggcccggccgtcagccgcccgcgccctcgggtgcggctgacgcgtggggcccgcggcgccggtcggagtgagccgcgtgcacccggtccaccgtggaccgtgaggctgccgcgtgggccccactcccgtggacccggtccgcgcgcccctcccttcggctgatgcaataaatccaattttaaattaaaatttaaataaagaaattcgcaaatattcatttaaagagcatataaacttcaaatggctataacttggccatttgaactcggaattggaccgttcaagtctctaatttttccttaagaagtcaagaacccatttttgtgctttgttaatgctttttatatggagtttgttagagtaaaagccttttcttttccgttggtcgtgtagacgctgcagcttcggaggatccgctcttcgtggaagttgaagccggcatttgggaaagcgagcaaggcaagacacatcatccttgaacatattgaatcccaatttatgaaattattttgatttaaattattgcatcattgctttatttaaattcccgcgttatcactgttttatttagccatgcctatttacctttgttaatacattattattgttattgttattattaccttgttcaccctaggaaaataaaaaccccaactagtgggtactctactcctggttccactagtatgaatttaggt

SEQ ID NO: 1938 - DNA, 739 bp, Oryza sativa
gatcgaccatcgtgaactatcattaagccatcatgaaataatagtaaatcattagttatcccataagtgtactaatgtttctaagcagggctaagcaattatatctaatatctagttgaaccaatataaataaagctcaactagtcaaattaatataacccaaggtatcaaggaataaggtaatcaatgtacaaaagggccataacaaagaataggtcaattccacccaatgacattcgaaaatagatgcaatagttgaatagaaacaatagctttaaataggatcaacatgctcaaagggttgtttgggatctgtgtgacttgccttgctggccttggaactcttcaaactcttctttcgcgaaaacggactctccggaaacgacggaatctaagcaaaaagaagcaaaatcaccaaaacagcacataaacaagcatgaacagtacatgtggatatttttaatgtgtagatcttaattttagaaaaatttagagacttgaaccaactaaatcggagctaagatgaattagttatgaatttttaaagattaaatcggattaaacacttaaatcgattaaaattgaattatgacgcaataatgaattatttttgaaaaggaaaaagggattattgcgtcagcgggctagggtttggtggaccgggcgcacgggcggcggttcacacgaacggacggccgagattgatccgatccaaatcggacggccgagatcgatcggg

SEQ ID NO: 1939 - DNA, 1768 bp, Oryza sativa
taaatgctgtttattgcaaaacctaacccctatattataactccattgtactcctttgcaattatgctgcacttgtgggtgtgtcttgttgagtacggtagttgtactcagtcttgtttaatttttcccaaacccagcagaggagcccctggaggatgaaggctttggtgtctagctcgtgcctgccgtcaagcgcctgtggtcgtcgccttagtcttctgctgtttttcgttgtctttgagtgtgctgggccgtcgctgcccatgtaataaataactatttacgcttccgcttgttaaactctgaattgtatcaacttttggtgtaccttgcctcctaggacaaggaataatacacgcacgtaaggaacgcccgttgggttatttccggtcgtgacaataatgatctaattataattgttaagtgcttttcttgtttaaaatccttaaattataaattgttgtttaaaaggaattattagaaatgattttaaaagcctaaaagagaagatctaattttaatttgttaaatctcaatataaaattgggctagataaaattttgttaaatactttgcttaattctataattcctagatttttctgggatttatttgagctaaggaagtgtttttaataaatggaattgcatttcatgaataatttaaattgaaaaaggttttttttttttggctttgggccgaaagccggcccaaaaccctccctctctctatctctctccctcctcggcccagtccggcccagtccgccgagccgccactcttctctctcagccgctgacaggtggggcccgtctgtcaggcctgtcttcctcctcgcgccgccgccgccgcccgaaaccctagcgcaagcgccgccgtctccttccaaatccggccgttcctttccgtttctggtgaaattgattgaggggaaacgatctccgggatctcctccaccttttcccctttggaaacatcggctaaatcggtttggaatgtgtttgattcgagttcgaatcggatcggtctctttccttcaaaccccgatctttccttctcgtcgccggcagccgtgggccttcaccgttgcctcttagcccctttataaggatccccggtgtctcctctacccgccgccaccctcgcctttgcctctcgtcgtccgtagcgccctagctccgtgtgccctagcgccgccgtcgccgccgtcgcttcagccgtgcgccgccgccgttccagacgtcgccgtcgctcgggaagatcgccatcgtggtcgccgtcgcgtcgccgtcctcgtccaccgcttcaccgccgccgaagaccatcggagcaccgtcgccgccgtcgacccgatcttctccgccgccttttcctcgacgccgccgccgtccgttggtcttccgccgacgttttggtcatcggtgagttcgccgcgccgtgatctacgtcttggtgccctccgtttgtgccgtagagccgccgttcgccggcgagcatacgcgcccgagccgcccgagtcgccgccggtgctgacgtcatcgctgacgttgtcgctgacgtcatcgggaccgtccgccgtgagccggtcgtggacagatcgatctcgaccgtccgttttggatagggttgatctcggccgttcgttcccatgaaccgttgccgtgcacccggtccaccgcgaaaccctagccgctgacgcaataatcctccttttccttttcaaaaataattcattattgcgtcataattcaattaaaatccatataag

SEQ ID NO: 1940 - DNA, 23604 bp, Oryza sativa
aattaggcaatcggaaacttcatggttgtgatttggacctttccctttatgtttgtggagatccagagctctagttaatgatacataatccaacctttgatgtttatggagtttctttgtttggtttcactgggacaccatgtaaaatgagttaggtctgttgtacagttaaatttcttatgattaaactgattttctgttattacttccaatgttaagattcgtccttttgtttgagtttcctattgcagggggaaattgtaaggttttacgctaatgatcaaagaaaaattacttgcggtgagtatatggaacctttaattcccaaaagagtgattatttctggtgatggagtgtttgacataattccactcctagagggaatgttgaatcccctatatatctaattaccaaaagagtggtacttctgatattctgtttaactaataaaagttttccaattatgtgatgattatttaaactaaatagcagcagcacatgttttgcacccaaccgactttgaataaaccatcttcaatgcagatcctgaaacaaaggagcttattaagagaactcttgaaactggtcatgtatcttatgaagtccaactacctgtatgttctctattacttggaattatctatcaaaagcattctcactaatttcttatgatttcatgcaattatttcaaatgttaaatcttcttatagcaggtgaaatttttagatatgtgggaaccagctattttggcaataaagagggaaggctacagtattaaatgtactggtcagcgtggtgttgttctcacagagaaatttcagcaagcaacttctgtacgtccttattccgtattctttagcagtacatcatttgaatttcaggaagtagatctcattctaaaattgtgagcaaactctgttggttccttcagtacctgggtagcatgttggttcacccaaaatgatggaaataaacccattgtagatggatgtaaattgatggttaccttgaattctggccagagacaggttttgttatctcatatggtttcaagatctcagatttatgtctgagatatggttaaccgctagattacactgcatctagacaaacgtcatgtctttctttgatgcattgtctctcatgctatacatgaaaagaaaaatgtaaaaaataggccatgatctggcctatttctgttgacctaaggaaatgggaacagttgagcttctttcctgatgaattgtcttcacatgcttgatggacccacaccgaaaaatctggacaggacgattaaatggtgtgcacataagtcataagtgtgatactgcaagtactatactgagacaaattgtctccgataataatttttttctgctgcttttgctaattaaccatattataatttttgttctgcaatcatgtttgtgtttttttgtaaatcattgctgtagacatacaaaaatgtggtatgattgacaacaacttttgttctgtcttttccagattaatattccttacgggcgtccgacagagttcttgattacatctgctgatggtgttgaatataatttaaagcctgcagaaaatgcactgtgagtacccaatcgagctagtgtttgcatcattatcagcagcccaagatctatgaataaattaacattagtattcattattccttacactatatgtgtcttgatgtgcaactgtacttctgatttagcagcatggctcccccctactgctttccctacaaacaactctatgggtcatcacttcttgaaacatcagagttaaaaatatgctgcatatgtctaatagttacttcttaaaactcggaaggaatgcctcaaggtcagcagtgccagactgccagctcatcgatcttgtcacaaagcccatgttgttttcagtaatgtggtcttctatagctgtctgatcagcgtgtgcaagccgacctgaccgtgccctagtgtgttcattcttatgtctttgaaagcatagcaatttaggatatacttaccttctaagtgtaatcagtggaggtttataccaaacttgaattgaacaccctgtccttggtcttttactttattactgctgtgtttattttagattaatgccaatcataattcataacgaacatacataaaatactgcttatcttgtgttctccaattttgcaggccgcgggataccattgttctggttttaagattgttcagaattatggtatgagctcgttatctcttgtgcaagacatatattagcacctcccttcattatctttatcttcattcaacatcatcgagtgggtcatcatgggatgatggccctccactctattcaagttcaaaaccgagtattatttgacgattagcatgtttgaagaacccacagtagcatttttctcaagagaaaaaaagatggaaaaaaaaatatagagaagttaagtgtacgctatcagcattcactagtaggctactagttgtgtggctggctgtgctgttcggcttttgttgttacaaaggctaatattatctttggttaattaagtaggcggaggttaattttacagccctctgtttattcttcaaaagaaacggcattcccagccatcatggggatctcttatatagtagcactttatctaaagatagggcactatgaattgtttgtaaagagctgtgttgtcaaagttcatttcttgtgttttcccccaaggtagcatatctgaatggtgactaacaggttaaccgtagagccaggattagctgcctgacttgatgagaatatgtcgtctcacgttccttaaatactgatgtgaaacatcatgcattttgcaggctgttgagaagaggagaggaagaaagaagagccttttcttcaagtaggtttggctcctataccgtggtgtataatttgtattcgtgattggctggatgtatgtaattaagcgggtgataggtttggcatattctttcggctgtatcttctgctgtaaaggaccataggcgatttaaacacaagggccccaggtgatgggagttttcttcttcttatttttttcccttattccttttagaaacatgagttttgtcgttgcaagggatggaagcgtgccgctgattagaattgaagctaatttatgctaatagaatggaaaagataaataggcaagtcctaggatgctctggaaatattccctgcatcgtagggtagtgaccatcatcagttcacgggtgacctccctgcctgctggttacttccaacgagcttgcaattttggagatgacgcatagcagtacctgaacatgtatacaagtataactgatgtatcatatgctgtgtaattatttgagacgaagtagacttgcagtagtttaagataacaagggcatcttagttattccagcgtgtactgtactgctggaagaaaacacttgcattattaggcagttgtgcgtagaaataatcgtgggttgcagttgtgtctacatcctatgaacattctgtggatggtaacattgaggcaggctatgtccacaccacactacacttgccaaacggaatgtgaatgcatttagggcctgtttaattggtgaaatgaaaatttttgggtgttacatcggacgtttgaccagatgttggaaggggttttcggacatgaatgaaaaaactaatttcataacttgcctagaaaccgcgagacgaaccttttgagcctagttaatctgtcattagcacatgtgagttactgcagcacttatgactaatcgtagactaattaagctcaaaaaaattcgtctcgtgatttacatgcaaactgtgcaattagttttttctttttgtctatgtttaatgctctatgcatgtgttaaaaaattcgatgtgatgtttttttaaaaaaaattaggaactaaacagctgatcaaacatccaaaaatttttatttcacgaactaaacagggcctaatcaaggccttatttagatttttactcctggcttgctctcggttgctctctgttcggaagtcagtgttcccaaccggatcagtgcgcacggaaaacagagcagtccattagcgcgtgattaggggtgaaaacggtacggaaattttcgagaattccggctaccgtttccggtttgcaccgaccgtttcaatcggtatcggtaattgtcggtatcggaaatggaaacggtaatctctttcggaaatggtagcggaaatgatatggggttttttccgaccgttttgtcggtaaccgttttttatcggtaatttccgtcaaatttccgacaaaattccgaagaaggaagtcggctgggcctggctagcaagaggaggagcccattaggcattaaggagcagcccattccgaataaagaagccaactaggcctgaccgcatcgtcgtcttcatcggcgctggggcaccgccgcgccatgttgggcgccgccaccaggtcgccgacgccggccgcaacctccttcgccccgacggcctccgtcgcagccggccaccttccctcccccacgctccaccgccggctttcgtgccaccgagccaagcgccgagcgccgccgcaccgccccagcctcctcctccccaccgatgccgcccctttctcctctctccttcccccaccgccgccctgcgccaggccgccatctccggcgcctctctcctctcgggcgcgcatgaaggagccaaaggcagagaagagaacgagagagaaaacagagaagaaatcgagagagcaggaaaaggaaccgagagaagggaaggataagagagagagaaaaaataaaagaaagagaggaaaagaaagactgtgggatccactggcgggccccaccatcttgactcctctctgtgatcgacctggaaataccaaaaagtctagtttagcatgaaacttaattacaacagtagttatacagtgtcaacataaaagttcttatgcaatgtgccactgtaggacgacgatatagctatgtcaattgatgatgaaataatgaatgatgtttgacaaggagctgatcagctgaagccatgccagcttgtgagcttggtgttctcgaagacttcaaatctatatcctaaaaaaagtcggacaatattagttatgctgtaatcctatcatgtaagccacattgtatgctttagccacattgatgttgaagtatcattgaactttatttatattatttatcaatcttattgtcaacttattaatcatcatataacggtgttgtgtggcagcgtaatgatgcaagggtgaaattataaggtcatcttcatacatagttaaatgcgggatgataccacagttcgctgtttccgacatgaattttcgacttccgtccgatatcggtatattcccgttccgacggttccgtttccgagataccgatataaccgatatcgttaccgtttccgagtataccgttccgattccattttcgagaaaataaaatgaaaatggaaatggtagagggtttttccgaccgtttccgaccgttttcatccctacgcgtgattaattaagtattagctttttttttcaaaaatggatcaatatgattttttaagcaactttcgtatagaaactttttgtaaaaacggcaccgattagcagtttgagaagcgtgcgtccggaaaacgaggcggagggagttggtaacaagcccttccgaacagagccgctccaaggcaagttttgcgtcagatctgtatttcaaagcaatggtccattgaaaaggtatcaccgctgattaattttgttctgttgttcacctcttgtagagttctactctgcagttatttgggatgttctttgctacagtacttagctgctgagcgttctggatgtcttttgatcaatacacatacgcaggttgtgctctgttcagtatgttggcaccgaagtatgcttctttgtgttcttattctgattataaaataatttccagatgtacaatgcaaagtagttactttgggcttttgactgttgagacataaggattaggtttatgaattttgtgtttatgtttcttggttcaattatcttttatatgaattacaaaggtttagtacaaggtccatggattgactaagtatcatgacccgaggccatgacgggataaacaccgccgggaagatagcagggcggcgtcggctcctggagaagggatgtagatttaggctagggagaaaaacattattggaagggagagattagactaattgatattcattgcttgcctgataatagacacaatcccatccttatatagattgtacaacttgacctctaagtaaaaatctaatcctaataatcttcttatcttatctttaactaactaataatcttcttatcgtatctctaactaactaatattcttatctctaacttaattgatattgggctacctataggccttggcctacggcccaatgcccatgacactatgctgttaagcacctacttctaaatctctgcgtaagttacttttcagtatttgtgatataatcagatggtgacattcactactactttagtcaagcttggaagaacaaaggtaagtacatggaactgaaaatggccacttggagatgacagctccatggtcagctgttgtggctgccatttgatttcccagttccctctggaagaaacaaccagcaaaaaggaggctagcaggaagcagcagaaaatactaagcatgatctattttcccatcatagcatcgctgttagggcacccgcaatggttatctataggctctatataagagatccatatcagcatattttcctacttggaagagattaaatgaagagagagagcaaatatatctgttaacctggagatagtctatagagaaaaacgatgcaatgtattagagagctatagatacccatgtagacatactattgagatggtttactattaatctagtctattgctgagatgtacatgttttatagatatcaccttactttaccattgcgggtggtcttagagcatgcatttgttttttggttcgtacgagaaatttcagaaagcagagcattgcaatatcagaaattaggcttattccttttgtttgacctcctgtgctgtttgatatttaattttctaggttgatcactagctgatgtcttttcatttttttaaatatgtatttctgactgggttgaaacctccctttcttaaaaaaaaggaaataattggttacaaaccattaaactggatgttaaggtcgtatggcttgctcaagttgtttgtgcaaataaccattctctcaagctgatgaagtgacttgagttcttttgttgccctaaatatttctctttttgaagaaattaacttgcaagtgaatgcattttgtatgaacatgtgaaggaatctgagactaggaagaatacaaggtaatagatgcctacctcagtacctcacagtctttgtccgcataattctgaaaatatggatgcattcttcagatttctttatgtcaaatggaacactgtaattgtgatgatgtggccttgagaagctgttgtgagtcattgactcatcagcaattattcatgtggattttattgacttgtatggctttgtcatctcaaatgcgtctttccatggactgatgctttgtagaaatctatagaacaatactgttttctgaactcatatttgattacaggatggaaggacggtcttggatataagcttatgttttggaagagatttcaagtcttatgatttggcaaagcttgtttagttactttcgactaacactatgtacacattgatggacgcggagtgaagccgcgcttatttatctagttccacaacagacgcaaaacaatatacatttctgaaaactagaaaatctaaatgctgaattgacatcacaaaatcagaaaagtacacacaattgttcatgccaaatcacccttgctcagatctgaaaacacagcgacatatcactttgttcattccacaaaatcacccttgctcagatctgaaagcacgatgtctaagacatataactttgttcattccacaaatcacccttgctcagatatgaaagcacattgtctgaggaaaaaagatagcacaccatcactccccattcgaatcaacacacaaatatcagaaaccatgtggcttcctttttttttgagaggaaaagaactttccattaacttaaggactcagcaaaatcgctggccaccaagtcctccatgcccggaggcatcatgtcccattgttcaacagtattccgaggacatttacaacccaaagctgctaaagcatgcgctactctattacattctcgtggcgcaaaaacaaaggaacaagaaaggaaactacttccgatcagcttcttcaattcataaatcaagccacccgttgctgcaagtctgtgatcatcggcatccatagcttgcttcaagataatggaatcagtttcaaaaacgacatggcccattcctagtgcattcgcggcccttgctccggccaagcacgcaacaacttccgcctggaaagcatccaacagataagatattctaccagcacttgacaggataacctctccctccgaatcccgaattacaaaaccccatcctccttcccctgtttcagctatatatgctccatcagaatttatcttcagtttacccacagcaggtctgcaccttacaaaatctgttgcattcttcccaacaaaaccatgtggcttccttgttgcagaaaataaactaactcaccttgtgaatcgttgtggactctttgttgcttgccacaagttgagaaatcctgggattcatgatgagaatcggttgagaagacttggtcatctcaaccaccgacgcagggatcgccactgtgcgcgaatggctccatggaagcctcgccgacgatcgccggaatcgccacgagcacctccccgactgccgtggggacaacaaaacgtgtctcgcagacaaaacacaacgaccctcctcccccgcgctctctgccaagcccaagggtagcacgagggctcctcccgccggagaagacgacgacagcatagcacccctgctgatgcgtcgccgccaccttctctccttccctatatgctccttctctctcctcaccgataggggaaagctccttctctctcactttctcccgtgcgtggcggagaaagaaaatggaaagggggatattactgtttttcgaactgtagcggaaataatgggctgaaaatatgtgacgcgaggcgagggtcccgctgctgcttggttgctgggcttttagggcatgcaattgcttgggctggagcacaattccttggctagatcacgttggagcacacgaatcttcaagggagatccaatggctaaaaaaagactgacaaagacaaaaagaaaaaaattctcttctttttattggcaccgatgatgaaaatattttaaatcttttaagtagtagagatagagagaagtactctcttctcgtcctgtttattttgatagttgattcatgacgataatgataaataagaatccaaatcgcatctccgaccctaatcctaatcgctgcccgccgccgccgctgattctcgcccgcccacgtcgccagcgacgtctgcctcgccggtctcagtgccaccgccggaacacccacgcccgcgcctcgaatccccgcctggtcgtctctcccctctccctcgcgtcccccgcctcccctcgccgcactaccctatcccctctccctcgcgtcccccgcctcccctcaccgctgcctccgtcagatctgccccgcacgagccgccagcgacgcccgcctccttcgcgccctgggagcagtaccaacggcgggttcgggggtcagcgccggcttgatcgaggcgtggcccgtgctgaccaacggcgtcgccgccgccgccgctatcatcaccggcaccgacctcaccgagaggtggggttctctctctctctctcttctcgcctgtgtcagtatgtctcttttcgtctctgttttctatgtaaatataacatgtattttcctcctatactaaaattctaatgatttgttctctagagtacaaatatttgtagagatgttcagtgcgtttagcaaatacttaggccgtcatacaataagtgtttatgctgaacgatgcatttcagaaagatacggtcaatttgtttcctgtcaattctgcactcatatgattttttttttttacatcactagaatatgaaatcttattgatcttggacttgatatttggattactccatatatactcctattatcttcggtttatggtaaaatgggacagagcgagaggagagcagttccactctcagctactagcttaccttagctatcagttgatcatattagctatggctgttctattcattgcttcaactgctccaaaaatttctttcaccgttatccacaattagtctacttgtttcaagcaatggagaggatggctgttacgcaatgtaccgaactcgtgatgaactttactttgtaatgttaagtgttcaacttttctaattgtcatctaacatgattcagtccccttcgtcgtgagcagccgtcacgtcgtcagatcctcctccaccgctgtccatctgccaacccctacgcacccaccgccgccatctccgaaaggtacagatcccccccccttcctctatctataccccgccatctttctgtgacctatttgattttggctgtgatgtacgagcagaccatggacattcggcattctattgaatgctgcagaaactttctgccaccctgttaatcaaacaaatttgtagtcaatagtaggaaactattacaccaatatgttatgatgctggatttgtttataacacaattaccaatctgtttctctacattgccatgcctatagggttttaaataaatttgtgctaacaatatttttactagatttagaccaaagcgacgatccccttcatttatgttgcctcttttccaattaaaggaattaactaagttctgaattttcaagagactaatttacatttatggatgataatataattttgatagtttatttctcatgtttaaccttgaatcatttgtactaaaaaaattctctgcccattaatagtcccggcgctgatcttcggtcaacgtcgtgactttcaaccccgcagccgatcgcaggaagaggcctcaccacttggcagtgccccgatctgttctgcgtccgctgacggcgtgaacgcgggcgagtttggtctacggctaggctgcagaattaaggtctgagcccaatccccggcctgctccactcatttcattggtgtatttgtttgataaattattagaaatgtctatataaaaatgatggactgaagttgaatgggacgtgtgtgtatatacattatatagcagtgcatgaaatttgattatgtcgagatacttgctgccggcggatgaagttcgatggttattatacttcatatttggttccttacagttattttgaaattagaacatttgtctcatttatttgcttgatcccatcttcttgcaggctacagccatcctgggtttttttaagtgctgcacttctatatatatatctaggtaaatttcaacccctcatgttcactttctcgagagaatccattttctttgctttaatttcaggtagtatataacctgttctgatgcttcttgtgagatttcatgtttgattgattttttttgaacatattagcaaatatacgtgtgtcactgcgtgttttgatatttgatttagtaaatatctcctataatttttcactgccatcactccaggaatattcaacttatgcttgtcatattaaaaaatatgaggaaaaacagtatattaggatcttgtaaaatagcatgttggaccctagtagaacctgggccctagtagaacctgggcgccgtgaaggccatggtcgcaaagctgatgatacgcaggagatgtaaaagttagcctattaagttgaacaaatcatattgttttacattgtttcagacaaacctgatctgaagttagcctattaatattttatctgaatttaactttaacattggttatccagcgactatcaagcatcacccttaaaagtgtcattgataagaatgaattatacctaaatctgaccaatttgtcacatagctgataatacacatgtgaagcgtactgcaccgataatagttacatggaatatgtagattctcattgcccctggttgctgacagtctaactccttaacattcatattcattctcatcttgaggttggtcatttctaactccttaacattcatattcattctcatcttgaggttggtcattttgtttgctctgtacctatgagatttccccttgcgctgtgaaacatatgccatgtcacttcacggcagcaagctgaggctttgttctaattgtaggttcaatatatcaagagggtggaacctaattgataagtgtgcaccagatcgtggtcagactaattcacggtaaggctgtgtctgtttctcaacccttgatatatagtgtatgattgtgttgtgttgggtgtatcctggaagaaaaacaaatgcatgtctgagattgtttcttcgagattattaaaatttagctgtcaattgagattgtaactatggtctatattacattaacgcatatatatgcttatattttttttcctttttaatttttttagatggttcgtccatacaacttaaatgaatatatttaattcattcattgtataatagaaatatagggcgtatagaccgtataaaataccaaccatgtgcaggaattataatgccgatatgtatacgcatacgcacgccactcaaagttttattgtgcctacgcaatatcatagtctcgtaaaattttattgtgcctacgcaatatcctagtgttgtactttacgttacatatatttgatgtgcgacatgaattgaataaaagttcaaatacacagatcatataaaaatattttttgctaacatgaaattttataaattatttaggacaaaaataaaattgcagcgtagcgtttagcacaggcatattactagtctccttaaatccatctcctttggctttcccctctaacaccgtctccctaatcccagagtctacctaccccacccctcttgttgccgccgcctctccatcctctcacgggccatgggttctgttgccggcgacgccgcccgcctttcttatccacccactcgccgtgacaattccgtcgtcgacatgtaccatggcgtccctgtcgccgacccttaccgttggtaagtactccaaccttgcttctcgggggaggtcttatatttttggctacttatgttgtgtgcggcgtgcacgtaggctggaggacccagagtcggaagataccaaagaatttgtggcaagtcaggtggagctagcagagtctgtgcttgcgggctgcttcgacagggagaaccttcgccgtgaggtcactcgccttttcgaccacccgcgccacggggcgccgttccgtcccggcaacaagtacttttactttcgcaactccggactccaagcccagagcgtgctctacgtgcaggtatgccatcaaactcgattaataaagcacgcagtggatctaaggtttggagctttgcgggacatgttgttgtcccgatgatgtgaaaataattggagatgggtttcaatagatttcgtgaatatacatcttgactttagaaactactgtgctgtaggagctgaggctagttcagttagtgaatgttgcaatgtatacatctctattgcctaagccggagacctctttggcttggctgcttgcatacctaattcttcttgattaaattgaatctagtttattaaagtatcattagttctctgataaaattaaaggcaaaatctatagtcatgtgattgtttgttggtatgcaagctttgcgatactcactcttttccaacctagacaatgtgcaattggacaggacttattatataccaactgtgcttgtgtaatatttgctatgcacatgttttggttcctttgcccacccttccttagcctcgatgagtaacattagtgggcatttgttccagtttgattttaggcaaggaagtccaccctaccaagtctaggctagcaaatgaaccaaacatgctttacataaaaatgaaccctgtgagaatgttcaaatctcatagtcaagttccacagcactgagcaatgctgattgttttgctttctctgtcatattcatgctttcagtttctcataagattatttggtgttcttaaaataaagaaacaagtccacatattccgtttagtatttcttttaccctttttcgagtgctagttttgtttatgtttgaattctgtcaataaaaggctgcataattgtcttgattcgatgaaagggttagaatgaatatagcatgtacttatcaattcaggatagtttggatggagaggcggaggttcttctggatccaaatgcactaagcaaggatgggacagttgctctttcgacgtattctgttagcaaggatggcaaatacatagcttatggcctaagtgaaagtggcagtgattgggtcactattcgtgtgatgaacattgctgataagcagactttgtctgacaaattgtcttgggtgagcagatgcagcttgtaactattatttgaaattgtagtgcttatgtgttacctattggttcttataaccaaatccaacatatatgttccatcaattattggtgcaggtgaaattctcatctatcagttggacccatgatggaaaaggttttttctatggtcgataccctgcaccccggtaggtttacaaacttctgtatttctaatgtactgtaatagattgcttagtttctcttactccttttgttagagaagtggaattggatgctggaactgaaacaaacattaatcttaatcatgagatatattaccatgtcgtgggatctgatcagtccgaagatatattatgctggaaagatcctgaacaccctaagtttcctttggtgcatcggtcacagaggatggaaaggtaacaacacttcctctttttcccatttgtgtaccagtcatatctatatgcttatttacttctttcatcttttggatgagactacaaacttgatttctcttcttctatggttgatgcttcatcttctagtttaaatgacagtacagacaattttactacctgaacttctctcgaaaatattttattcagtcccttgcttctgatggagcttcctgcattatctaggattatcttaatttctcaagtgctcactagaatatttggtgcttcttggctttctacatggcaataaatattacatgatcgtataatggattttctcaatcaacatgcatgcactcatagcactacttgcagagacaacataattcaagtagtaatagagtaagataaacatgttgaagaagatccatgccttgctcacagaggccagctcctgtcatgaacctacaactccttggaaccttacatatacctgcttgtctaagtgaactaaacaactaatacgaataaatactaacaaaactcaatcttgtctaagtgaactaaacaactaatacgaataaatactaacaaaactcaatctatctatctaaaccttactaatcgtgcactttttaggagctctcaagtcaaccaaaaagatctagccgttgatataataaatcataacatcacaaccatagatcgtaatatttttaacagccacataaatcggatcgtagaatcctatatggtttattagtaggaaatatctcccatagatgtatggtcttgatgtccgatccgacaaattaggtccatagcaaaccaataaaccgatggaagttactcctatctcctaatgaataatcatgcatgaatacgtattgttgtacaacccctgatgcttgaatacgtattgatgtccagcaaaatagtagatccatagtcataacaattaatttcggtaatctctatctttgtgtagagaacaaactatttcctaattaatcttcctccaaactaaataaacataccatcaaaaataatatgcacttcattttattaaaatttagtaactccaaaattctagattaaaaaaatatgatgttttttttattttaattacgaaattttgattttttttttttaaataatattgaaactgtacaagtaagctaaagttgacgtgcacttttaatctaaattactacaatttagaaaatagcctgtgtatgttaaattctatatatgtacaatatgaataataataataataacccacacaacgcgcaagttgatgactattataacttaaaatttctacagttgctagctcatggttatatatgacatgcaaaaagaatgaatcttacctgtcgtctaagtgaaataaatagccaatacgaataaataccaaatagagctcaaaattgcttgcaattttatagtagctagctcatgggtttatgtgaatgaattgcagaaagaacaactcaaacccaaggtcctgagcaaacattatggctattcaaagatttatttggctaaaagtgcaaaaatgattgcatattagtttcggaatccttatttcatccgaatttcaaaatctctgtgcaaaggctttatatgatgaggagtataaaatgcaatgggcaaacctgttttgaaccacctgaaatggagctagcataaattagttttggagcttgaaattaattgaatttccaatgtgaaaattattgattttctgatttttgcaagggttgaatattccattgagttcattgcattagcatttcgtgatggatgttgcagtagagtgtgatctttatggtctacatgtttgttgcaccaaccttaaaaagcagagtatctcttcacatctttaattaatgacttttgtctaaatcttttaatagcccacaaaaacagttctctcataacctcatcttttgttgacagtacatcatactaggtacttatgaaggttgcgatcctgtcaataagctatactactgtgaaatttgtactcttcctcaagggatagaggggttcaaagagacaaaggggatgcttccatttgtcaagcttatagataactttgatgcccaatatcatgttgtggcaaatgatggtgatgaatttacatttttgaccaatagaaatgctcctaagaacaagcttgtaagagtagatatcaagaagccagaattgtggactgatattcttcctgaacatgaaagagatgtgctcgaatcagctgacgcggttaatggtaaccagttattggtatgttatatgtcagatgttaagcatattctgcagataagagaccttgtaactgggaacttgcttcataagttgcctctagaaattggttctgtttcagagatctcctgtagacgggaagacatggacgtctttattggcttcacaagctttctttcccctggtattatttacaggtgtaacctcacatctgcgatcccagaaatgaagatatttcgtgaaatttcagttcctggatttgatcgaacaaattttgaggttaagcaggtacatgccatcactgtcttaggttgccatatcattttctatacaaagaataccaatgaaactaaatacttcgttaaaatgtggtttctaactgtttttggtttttcagattttcgtcaatagtaaggatggaaccaaaattcctatgttcataatgtcaaagagagatattgaacttgatggatcacatccaactttgctatatggttatggtggattcaacataagtcttactccttctttcagtgttagtcgtgttgttttatgcaagaacatgggttttgttgtctgtgttgcaaatattcggggtggtggggaatatggggaagagtggcacaaagctggagcacgtgcaatgaaacaaaattgttttgacgacttcattgcttgtgctgaactcctcatttctgctggttatacgagttacaggcagttatgtattgaaggtggaagcaatggtggtcttctgattgctgcttgcgttaatcaggtcatacagtaaactcctgttttctacaatgcttcttcagtctgtataagttatcttgtactccctcagtagaaaaaaatatgggtgattttgaaagtcttaaaagacaagctttgattgttgatttcttaatacatatagaacaaaattttatgtaagctctttgaatatctattgatatagttcttttgctcgaaatgcacttgtttgactagagttgttcaaaatatgaatgtagtagttatgatagcatactattgtgatgtggttataatatcatcctattgtgatatcatgcataaatttgatttcctgtctttcagcggcctgatctctttgggtgtgctcttgctcatgttggtgttatggacatgctccgttttcacaagttcaccattggtatttcttttgttctgttgtgtatcatctttgttttacctgtatattgatgcatattatcagtgaatgcttcatgtttttttgtaggtcatgcctggactaccgactatggttgttcagacaatgaagaggaattccactggcttatcaagtatggaatttctgttatttccaacaccacttttactagaatatgtgtttcagttattagttcattactccagtgattgctggtctagtgggctatgtagaatactgctacaccactttattcttgaggtttgaaaattacaatttcgtagctgacagtttccgagttatatgtgctgttcaggtcttttaattgagagtccagtagtgcttaattatcatgttaatttcttcatttttcctgcttagtctgaatattcctagactaaaatcttgcatatacgttaatccactgagtccatcatatttaattatttgtggtgataatatttttctatccaattttccgtctcggcagaaaaaaggcatccagtgttccaaaagagtctttttagtcattcagtaatagagttcattgtgaactctgaccaagttgaaccttccattttccaaagtcacgccatatcttttttcagtgttttattagatgtattacacatctatgctgtactgatgagtggtgaacatgtactagatattccccccttcataatgtgaggagaccttgggagcaaagttttgttaactgttgtcagtacccagcaatcatgctgttgactgctgatcatgatgatcgtgttgtgccattgcactcattgaagttgttagcagtaagttacatttctttattccatttctctgcattttcatttgaatacaaagcatccagtccacaatataaaaatcattggttctgttaggcataagcatattcaaaactgaaaattatcaacaatatttgaatgtagtgcaaaacgtaatgagcatggttgggataaaggcccttagacctagtcgaggtgttcctggacccaaatggtgtgatggtgccatggagatgaggatgtgactaaagactctttatttatttcttgcttaaggagtagatatgcgtttccatccatatataaatgtgacaagacactttaaggaacttctaagattatggaaacaatacaaaataaataaaatctgaacagcccatgtgaacagtacaacgcttgaatagtaatcatgcacgtgacaaacaaatattttgtaaacgttgacaattttatagtgaagaatctataacataactggcctgttggtaggatctctttatagattgtgtaaatgcaagcctgtattcttgtaattgttgagcctcaaaacctttgctttaagccttccagttatgacatcgtcttccacatagaacttggcttgaagcccacttgacaaagccaatccaattacttaacccgccttccactttgaacggaagctgaaaccaaatctgtgggtttgactcatttaccatcctgggtccaccaagatacttggcatcatgctagtaatgattaccacgccatgctactcgtacttagttaaagtgcgaagacattgtgtgtaggcctttagggaagtattgggaaagaatggttatttcatgccagttttggacagaaattgtcaggaatgacacgttgatggataaatggcacaaacaaaaagaggaatttgattgagaagtaaacagataggggtctttgttgtaaaaaccaaatttcatgtgtggcgtgtgacaatgataagtttggtgtgtttctgttaactggaatgtcaagcaacattgaggtgctctgaaaggattaatcggattctgattatgtatttttattttgatacattaaacagttgtttgattttctaagcaccgtgattatgaaagtattggatgatggattagtcgttcgatttccgaatgtggtttttcacctctttagttttatgttctcacccctttgcttctcttgttattcagacactgcagtatgtcttgtgcactagcattgaggatacaccacaggtcaatccaataattggtcgcattgacgtcaagtcagggcatggagctggcagaccaactaaaaaaatggtttgtccaattctacatgtaccgccatagtttcatatcaatatatttatgatgtttgcaatctattgcagattgatgaggttgctgatcggtatagcttcatggcgaacatgttagatgcgtcatggacggagtgattcattttgtcctgcataagttggagatggtgagcgttgggcacgtgcaacggtgcaagacaggccctttcaaacaaatgatctgtgcaagaactttgtaggatttttgtttgaccatttggaacgaaggactggagcactaaaaatcttttgggatttctttggaatggcccaatgtatgaagatttgagatgaaagttagcatgaggtgtaacctgttagaaaatttctctcttgaatttctaagttttttctgtggtctgttttacaatcctccaatttacacttccattttatatcaaaatcatacgtttacgtttcctctatgcttgtgttttctctgttacaaaggagtccacatcaaccctccagacaaacgtgcgcactaaagttttgctgtaagcttggaaagtaaactttgtactccatccagcctattaatacttgttgtagtgcactttgtccagctgtgttgtcaaagttcatttcttgtgttttcccccaaggtagcatatctgaatggtgactaacaggttaaccgtagagccaggattagctgcctgacttgatgagaatatgtcgtctcacgttccttaaatactgatgtgaaacatcatgcattttgcaggctgttgagaagaggagaggaagaaagaagagccttttcttcaagtaggtttggctcctataccgtggtgtataatttgtattcgtgattggctggatgtatgtaattaagcgggtgataggtttggcatattctttcggctgtatcttctgctgtgaaggaccataggcgatttaaacacaagggccccaggtgatgggagttttcttcttttttttccttcttccttttagaaacatgagttttgtcgttgcaagggatggaagcgtgccgctgattagaattgaagctaatttatgctaatagaatggaaaagataaataggcaagtcctaggatgctctggaaatattccctgcatcgtagggtagtgacgatcatcagttcacgggtgacgtccctgcctgctggttgcttccaacgagcttgcaattttgaagatgacgcatagcagtgcttgaacatgtatacaagtataactgatgtatcatctgctgtgtaattaattgagacgaagtagacttgtttgaatttggagatagcaggagtagataagataacaagagcatcttagttattccaacgtgtactgtactgctggaagaaaacacttgcattattaggcagttgtacgtagaagaaagaatctgggttgcagttgtgtctacatcctatgaacgttctgtggatggtacagtgacattgaggcgggcaatgtccacaccacacttgccaaacagaatgtgaaggcgtttggcataaaggtcaactggaactttcaattacccgtagtaattgaaggagataacgtggcatctacacgcatgtggtatgacgtgtggctgctaacatcagcagcagtgttcatgctgcttgctgttcatgaattaattagctgtccatccctcctataattgcattcttttttactacccctccttcgttacctatagatggaattaaaacagacaaaattatgattaattagttgagaaaaaagaagtacgtgaagaaattaattgggatggttgtgattgatttagattagactatatggaaaagttgttctatgtttgggacggggagagtggtcaataaatttctctccacgggtacaggtcaggcaaagggtatgaacttggagacagtatgcatcaggactgcttatcaaggaattcttcagtaggtcctccctgagacaaatcaataaaggcgagcgattagactttctaatttgactattatttctagagctaaaccacatacttcatccatttcaaaatataaggagttatagatttccatccatccaggggcggatctagaaaaaaatagtagcgggggctaaataaactacatcaatataaatcgaacctccagtcctcacatcctatagatctatggaaaaaaatttagtgggggcttaggggggtctccattgtcccgggggcggtagtggggtctctcttcccattgacccccattagtccccccccagcgcttacatcttaccatataaggcgttatgcatatttacagccgcagctgaactataagtggtcgcgcgaccaccggctggtgcctcccaatcacatgctttcctaccctttactgacatatcatgcaccatgatccacccttttgacccttataataacttacaccagccttagacccatatacctgcttactctccatatgggcctcttctgatccaccatactactagaatgccacagctaacgtttttctatttcccccactacaaaaaagtgatcttctgtgaagccaattatcctcgtcaactctcagttttcccgtgcataatagtactacacacctcttcaaagactgtagttttaactagaaaattcggccaacaaaaaacaaatgtatttttaaaagggaggctattagacatcttttaagtccctttgatttatagaaaacatacaaaattttgagaaatttcaattttatataaaaagttttctattacaggttttgcaaaaaaaaattaattaagagattttgcagaaaacttaataagagctcttaatctcttggaaaattttttttgaaatcttatttcgaattctctatttttctcttgcttcaatcaaaccaacattcatttgtttt

SEQ ID NO: 1941 - DNA, 14431 bp, Oryza sativa
  unsure (1)..(14431): unsure at all n locations
ccctcgcccccccattgtggatccgccccagcatccatcctaaaatataaggtgttatggatattttgggatggaggagaagtatcattgtcgatcgatcaccggctgctgctacccaatcacatgcattttcccccttcgctgccatattatgcaacaggatcgatatttcaaaccctcattttaatttgtacgatcttcaaattaatttcgctggagactatggtggagagctactactcatacagtcatactactagaatgcaacagtaaatgtattaatagtggcaagacaaagagaagaatgggctacagtgaaacaaataatccacaacaataatcaataatcgtgtgaataatagtactccccacgtcttcaaaagactgtagttttaactgaagaatttgtccaacaaaaaacaaatgtatttttagagtgaggtctattagacatctttaaggtccctttgatttatagaaaacataaaaaatttggagaatttcaattttatagaaaagttttctataaaggtatttgaaaaaaaaattgaatcaagagattttgaagaaaacttatcaagagctctaatctcttggaaaattttctttgaatccttattcgatttctatatttttcctatgcttcaatcaaacgagtattcatgtgttttttctgtgttttacaatcatctgtttttgctattgtattgctgtcagaatcatgtgtttttcttatgcctccgtttttccatttatgcaattcaaagggagcaattagtattttgttcttgttttctctccgtaataataaattgcacggcagtctttaaaactaactttttttaagggacataggtacggatggagagcattacgatggatacatgcatgaaccgcgagagtgatacaaactggctagtacagtacaaacagtagctacctagtcgttgtggatacatatgcatgcatgcatatacatgtacatgtatgtatgtatgtacgatcaggacaggcatatatatctggatctgcttaattggatatattattcgtagccttttgttttgtttttctagctacagtgtacactaatagtgtacccttccgtctaagaaaatctaatcctaagtacaaacgtgaatatatatgtgttcagatttatagctaacgttttttttttttacggagtagcagtacttggactgatttcaccgctcgtaattatatgcaggtccatgtcgatggatcctctctcagatcgtctgcgccacacaggacaaaccagtagtatatatgcatcctgaccatacattgtatacacatgtacatacatgtaagggtaattaattaagtctaattaactattgcttccataaaaaaatattacttcctatatcccaaaataaatacagtcgtatactttaaatttggacaacacggctgcatattgttcaaattttgggatgtacaccctccgtccaaaaaaaaagacaaaccctagatttacgtgtccaacgtttgactgtccgtcttatatgaaatttttttataattagtcttttcattgttgttagataataaaacatgattaatactttatgcgtgacttgtctttttaattttttttaaataagacggacggtcaaacattggacacggaaacccagggcttagctttactacatactcctgttctaccaacaatcaattgtctctgtttgtttgagctataacttattttgaattatagaattgacttaattttagaaattactttaacaatttttcatttgctcaaatctcctcaaagtatgttttgttctggtccccgcccggcctgtatatatggtggaccaaaacgacatgtgtatatatatcgtcctgtactatacatatctgccaatctatagctaaagctcgactagtgtgactggacagctagaacctgcaatattccagtctcttgggtatgtatgtttgtcgtatatgcagaagtactattgcagtatggagtatattctttccgtcatgcaatttttgacgttttactagattatttaccatatattaaggtttgaaaaggaatactatagtgatcttattaaataatatatgattgaaacttaaaaataaaagggtgattgagaagagtaagtagaaatttggaccaaaaatgattaatgcatgggacaaatattagtaatactttattgtctaaattttttatgataaattttaaattttagagagagatagtaactagtagtattttgggacgggacgtgtgtatatgttaaactgaataaagtttgggctgtggctaacgtacctgtggatgtaccaagtgtattgtacgtatatgtttgttggtttgtgcagctgtgctagctagctgctactacagcctcttgtgccttgtgtacatttgtctcctatctacagtatctgtttcatatccatagatattagatgtatgagtatccatccatcttgtaggctgctagccagtcagcagttacaaccacaacatcaatagatgcatgtgcaacacatacacacaccttacgtcacccttgctgccgtcaccagcaattaacgttagttaatgctcaatgccagcacacgctttagttgacacactatcacaaccactccctactcctacgcgcgcgtacgagtaacatgcatttagctggaatattgttcaacattcaattcaaggcgatctatatatcatcaactgtttatgttagcgctatcaagtttaataatactgtatatatagcgctacaagaacgtactactctccctttgcaaaatttgataacctataatagaagattagacctattttagaactacgaatttaaatagatatgaataatttttaaattcgtagttataaaatggatctattctctcattttagttcgttatatattgaaacgaagagagtagttttagaggttatataaaaggttagtattagaactaattagcggcaacgttcggatgtgctggcgcctggctgccatagtagagcagcaatgcaagcttgggtcatgcagcatgcagctagctgtggctgctacgatcgtatctagcggcaccgaattaacactccctaacatttagtacgtacgacgctagttataacactgttttcatttttatccttcccttttaatttctgtacttaacgcaactcttttggagtacgtgcaatatatatgtactggttcttgtatgaaaaccgacaccatttatgtcttttctttagttaatgaaataaaatctcggtctttactcaatgagatgtaatcaattagtataaatttgcgtagacaaaattgcacatgaacaagtcataacaagcacaccgaaaatatgaacggggtagtatgtcatcagtacagaaaatagttgagagattagcatgggagtcagtgtaatactagatggaatagagggcgaaatgaatgagatccagaaagagcagactctagctcctgcaaacactgtaagagtacggcctggtttagttcctaactttttttaaaaaacttttaacttttttatcccattaaaatttttctacacacaaacttctaattttttctatcacatcatatcaattttaatcaaatttttaattttggcgtgaaccacaccctacgcttgtggaccctggctatcgcaagtgcatttaatgcagggtcccagcagcaccacatgaatttgcagccgtcctggtggtgtagtggggctatagctagctgtaggtacgtgtacgtgtaaatactatagtatacagggatcatatattagttacgtgctctaaaatatgtataggctaccttgctatcactaatgttttagaacacatatatattgtgttgctgtgtttggtcatatataatatactacccctaccctagaatataaagacattacatagtataatgaatctagatatgattatatctagattcgttgtgctatgtaatgtcccatccgtgctgtatagtttgggtttttttttacggaggaagtatatggttagacacgattactaagaaagtggtaaaattaaatgaaaaaaatgttgtaactggataagaagtgtaggcatgtgagaaaatttaatgatggatattatgattggttgggatcagaatgttggtgaaaaagttattatattttggaacaaactttgatagctaaaaattattatattttaagatagaggaaacattgattgtatgcatgctatatatatatatagaattatacggaataaatacaaacggaagggcctagctagagctaccagctgcgtgcaaatttattccgtataatttggaaggatatatcttgcttcattttgctattagcttgctttggctatcttaattaatatttaaaaaacgaatggtgctgatttgctctctcatctttataaatatgagcactcgtctctctgtacatagagagagtgagagataacgcgcgggcgctagctagctagctcttaatgtgatatgtatacacaatttttcctttatctgtcaaggaatgggtaaatgcatggttgagagaattaattgagtttcagttatagatatatagctggctgagacgaccagttagccatcgtcggtcgacgaccaatcagatcaatcagttaactaattatggatcaggagaaggcggacggcggcggcaggaggaggaggagcagggcgacgagtagcagcggcagcggcgcgagcagcacggcggcggcggcggcggcggagaggaaggagatggagcgcaggaggcggcaggacatgaagggcctctgcgtcaagctcgcctctctcatccccaaagaacactgctccatgtccaaggtagctaggaattaggatcgactactcactaattaatttttattgagttttagtttgctactacaagattgttgatcgagcttatatatgctattggatgactaattagtgttcaatgctggttaaaataatgttcatatatgcactaatttctttggtttgctctaaggttaattagatctagttttgtctcatcggtccttacatgaaatgttaattaatgtaaatccacatgaaattaggctactatactagctagacattgttagagagttcgatcttgcgcgcggtcttaattagacaatcctcaagacttcattgaatgggccggccgggccggcttaaaattgtgtgtctcgatcggatccttccaaattgcttgcatagcataagaaaataaaatttctatatgtcgagattcggatgtgccatcaactcaattccactcattttcttcatgtaaatagttctgatcaaatttcagccaccctgttatatattacccggtgcaacgacgggcattttgctagtagatgtaaaaaatgacaagtaaacttattattagaagcacagagctagggtacaatatttttggtaggataagatctctctctctctctctctatatatatatatatatatatatatatatatatatatatatatatatatatatatatatatatgcgattaattgttgggcagtaaattaattagttaagctggttggagctagcgaggaaataaataaaatgaatgtgcatgcagatgcaggcggcgtctaggacccagctgggcagcctggacgaagcggcggcctacatcaagaagctcaaggaaagggtggacgagctgcaccacaagaggagcatgatgagtatcacatcatcgcgctgccgctcaggaggaggaggaggaccagctgctgctgctggccagtcgacgagcggcggcggcggcggggaagaagaagaagaagatatgacgaggacgacggcggcggcggcggtggtggaggtgcggcagcacgtgcaggaggggtcgctgatcagcttggacgtggtgctgatctgcagcgcagcgaggccggtcaagttccacgacgtcatcaccgtcctcgaggaagaaggcgccgacatcatctccgccaacttctccctcgccgcccacaatttctactacaccatctactccagggtatgtactccaccaccacctatatatacgccaactaattaatttattatatgtattcgtcaactaattaataactatatactagttcattcagatataattcgcatcatctatctctgctttcagatcgatatatactcaattaattagacttcttcttgaactgtatgcaggcctttagctcaagaattggcatagaggcttcgaggatttctgagagactacgggcattggtatgacacctgaggtaccagatcataactgtatatatatgtcttctacacatatatcattccataaacatatatatgtgaatgtatttatataatgccatgcatagagagctggattttcatttttctaagagaacatttctttgtaactgcttgctgcaaaagtacatttattcttatgtgtgtatgtacttgtagcaggtgatccggtcttgaaggattttgtgatgggcttggcccaactataacctgggctagctaagaatttccaaatgggcctgatccaatcacctcatgagtagtccagtagatatctcgatatatctctactattataaaaattgaagatgtttttgccgatactttggtacgtcatccatgtatgagtcggtttttaagttcgtttgcttttggaaatacatattcgtatttgagtcaatttttaatttttaagttcgttcgcttttggaaatatagaaggagtcgtataagaatttttttaaaaaaactcgcatgctaacttgagacgatcggattcataattgcagctcataattttctaaaaacagaatatatatatccaagcaaattctcacataactaaaccatataacaataatagattaaaataaataaataatgttcacccggtgcaacgcatgggcatttgttctatatattatagaaaaaaaaagtgaaaattgatggcgacaaaaagtaacctatataaatattaaataagttcaatggaacgctactgcatgcgtgtttgcatgtaaacgtgacgaatatagtttatagcattatagtctaccttggttagtttctagaataattaattaatcatgtatactttgtttcatatctggcaattgatatctcgatatagcgtgccgaagaatcgcgagaggaatccccttttccttctgctgagaaatatgaatggttgattgctctactacttaataataaaatcacaatcactctctagtctctactttgcatctttacctaacactccacatgtactagtacacacgccatgataaaattagtgccagtttccttcaataaataaataaattagtgtcaggtagggtccattgagttgatcatcttctttttttttttttagaactgagttgatcatcttatttatacttgggtttctttcgacaggccagcaatgagtaatataatctcattacatcacatgcatggtgcgactatagtactttaattacatgatactattgtgtactattgctgcacacatatggtggataatattgcatattatattttaactagcaaataattaattagcataggctgaccaggtgtccacttgcaatttttttaggggagaaagttgcagcttaattaagttcagatcatgcatgatatagctagctattgcgaaggacgtgcatgcatgttccaatcgttagctaagcacgtaccccccaactgtcattaaccgttaattacaaccgccacattaaacttaaaattctgtaatgttaaattgtttatttattaaattaagataatcacttcgatccactcgatattgttgcatgtttttggataacataagtatcatgggcttaatttgcaaaatcttaattaattttttacgcgtcgccctatagtgtgtatatatatatagatactcggttagtacgcaacttcggctggagtataatttatcatcagatattcagatttctggaagcttaatatttaatttagttagtcgtaggtatatatttcacgtggcatcacactgaccgagggggggaacttggatgaattcgattatataaatatttatacagtatactgctcttgcaacgtggagtaaggacacatatatagctccaacttctaagtttggtgttgggtctggagtggagttgagctgtgagctgtctaaacccagctatacttctctagttccttttgtgatagggctccacctagctctgctactattttaggtggagctgaaactgtttggctgagaggtgaagctggagctgtgccaaacatgccctatatatactccttatgttctgaacaatcactacctccgctttaaaatagttatctttctaaaatttaaaatttatcctgaaagacttatcactctagttactacttatcacattcatctcttttcattcaaatttctttctattattgtatttttcaagtactactcaactttcaaccgtatatcatttaggccctgtttagatcccactctaaaatttttcatcctgccacatcgagtatttgaacaccagcatgaagtattaaatataggctaaaaataactaattacacagattgtgactaatttgcaagacgaatcttttaaacctaattgcttcatgatttaacaatgtggtgctacagtaaacatttgctaatgactgattaattaggcttaataaatttgtctcgcggtttaccgacggattatgtaattagttcttttattagtgtccgaataccccatatgacaccctatataatacctgacgtatcacgacgaaactttacacccctggatctaaacaccccattaggagcactataatctcttttttaaccattatgctagataacgtgttttttggatggagaaagtactccattcatcataaaatataataaccgagaatcaaataaaaagtatctatgtccactcgtagtattttctaggttgctatattatgtaaacagagggagagggagtaagtgtgaattactaccgtgtactccgatctctctctggatatacatacctccccgggagaaggcgaccgatactttccccttctctcgttcccctcctccctctacagtactctccccaaaatctctcctcaccggcccctcttccccttcgattctggcggcttgccaccggcgagggttggaggagaggtccggccacctcccctctactagtattaggttgttagatctattattaggtcgtcaggtgtctcctgtagttagggtttgtccctaattggtcttttgccgacgagctccatgggtgccggtgtggtcggatgcggcggcgggtggtggcggtggagatgcgagatccgaagaccggtggatgaatcgacggaaaaggctggttccttgcggcggcggcggcggctacatcgtcgtcggcaatcgggagaagccggctccttgcggcggcgccagttgcttcgtcgtcggcgtccgggatgtcactgtcctgatgaatcgacagaaaaagctggctccctgtggcagtgtcagtggcttcgtcatcggtgtccgggaggtcgctgccccgttcctagagacggcggcggcagcttcttgaggcctgcttcgccagggcaagctatcgcccagagcttgctgctcgtggtgcttgactgcccgttggcgaggtggcggcgattctgccggtgcatgcttgagtgcttcctatgccatggttccataagtcaagtctcgcaggatttctctcccccattcccgcatgtcgatccaagaagacagcagtttatttgccaccattcgagtgcttcagtgggtttggggatctggatgtgggctccttcttcctctgtgtttcccaccagctcattccatgcagggtttgttgttcgggttgagctcacgctcctcagatttaacgacgaactccgtggacttctcttgctgagtccggtgatgctccctcaaaatctacggcttagcagcaaacctccgttttgtgcagtcttcgtggaggcaaccggatggagattaccggtttgtcaagcgtgctgcacgccaaaggaggcccaaggttgcattcgtcgcggcattgccgcagctccctgtcgatgtgcaccttctttgcagtgtggtttcatcacgaagtttgtagccttaagtgcagtttccccgttctttcgaaacggatggttttatgcttccttttgatctgtttgcaatgtactgggatttattcccgtgaactctgtcgccctgtattgatggatgtttaagtttaaaaaaaaaaaacatacctccccggggacggagggagtatctctgtttatgtgaacgttcgtacggtctgatcgacacgcgtaagagtgatgatcagacgcggttgatatatgcacgttagtcatcctctcttgattaattaattagtgccacattttcagcatgccaaaggaccctaccggtaagataaaaaccttaaaaactactccacgtttatataattaaatatataggaggagcagtcaactctgcttctccaacgtccaataatttttactagaggtagcatgatatcaatttaattatgccacttttggtactcacaaaattacttcaacctctattatactccctccattatagtttagggccaatttagattgctaccctaccaaaatttgtcctaccaaaattttggtagggtagcaaaccaaacacctctactactctaccaatgctataaatttggctttgcctatgaacttgtctcttataggcaaattttggcttcaatccaaataaatattttcaactctactctaccaaaattttaatagcaccaaaacttgcccaagatttggccctaccaaaattttggtagggcatcaatccaaacatgcccttaatcatcttaaaaagagaccaagatcaatgacactaagatattcatcactctcaaattaatcacatcaattaagatgcttcatcgtttcgtgtcctatcaattaccaatagaagttaattttgaatgtatgcatacaacacattcaaagaaagacgcagcatattttgcacggcacacgtactgtagcgcggttgggtggaggaacaacgcgccatttgagtttgacccgcatttatctgtcagaattaataaaaccatccacaagccacgcgcatgtgggacctgcatgtttaaggcgagctcaattgaattaatatccttttattggaagttggaacagaggctttaatcaattaaaaacttgtgccagctcgggcgcgatcccgtttgaacacgcaggtgtctaatttaattgttgttaaatctatgtttagtttatacgatttgatgccatttttaacttattttacggttttacaattaattcaactctagttacataatttcgtgaattcaatagtttcataaggctatctatagtcgttagctggcattgctaattttggggttttattgagagggtagtgggctctatccccttcccgttgttgtttggaatcgcagtaacccagttttttccttggtcttttattgttttccctccttccttggtataagtcggtctggttgattgcattgtataacaaatattcttttcttctaatacattgacgtgcaatccttttgcgcgttcgagaaaaaaaatcaataatttcaaagaaaacggtagattaagagtagttataatttgcaaattgtaatctgtagttattagttaagttctcggaaatcaaaacttagttttaattagtacctttcagaaattagtctgtagttattagttaagttctcggaagtcaaaacttagttttaattagtgcctttcagaaattagtctccccgggaaaaaaaaagtgtctacaatatggagaggatatatataaccacatgtcaatatattgtcaccacgccagatcgacacatctgtaatggatcaaaatgcctcgttacgcaaatgaccttatctttgatggactagactgaagcttgtcgttctatgtaaggcttaatttgggtatagagtgatctacctatgaatttaacttgcacaatcacaaataatctaaatatatgggagtatagtgtatatgcctaataaagagcgatcgatcgaatcatgcaagtatgcatgcatctcttcgccaaaaagaaaaaggaaataaaatacatcataaatggacggagctaactacagaggtgagaacagaacaaaactatatatagctctaggtcaacgccctggaatttagcacgggaatgtactaagttaacactttgatgagttgagattacgacataagctagacaagttgctcgcagccactggttgattgattgctttcaagcattttgtgtttctttaaaaacatactccaagctagcaagagcacagacgtgtgcaaatcatcacgtgtacgtgttcatttgcatctgttccaagaaattaaaataaagtactcttgtagtaattaactacatacatgcacggttgaattgtttacaaaccgatagtagttccaactggtacgtagttaatttcttgcaacaaagactgttgagaatgataaaaatacgaatcaactagcatgaccatcaaaataatttattcatgacatatggagcagaaaatgcatgcagttggaagatgtgatgtgtgactgtaacaagatagtactactaattaaaaagcatcaactggtgatggtgaagcagcaatttttatttcttgtttttataggcatgttgaccatgcaagtagctggccaggtttgcaactgtaataccctaattgtaaacatggaccttcttcgtttatttaatttcgagaaagcaattaacaaaattgttatatgtgtcttgtggcacatgtttgattgaaaattgatgttgtccgggatggtcgtttgcccttgtacagtggttgaattgttgccagactagtccgagataaaatttataggagaaaaatatgaagaaatagtggtggcacagagaggctaatccagttcacaattcacaaagaagagtagtctgcagggggtgatatactttaaggatacagtgaggagagattaattaggaaggtaaaaaaagaatcatgatgtttgcttaggctgtgttctttccctattttcccgaccagcctctctcgttttccacgcacacgctttttaaactgctaaatattacgatttataaaaaaaactttctatatgaaagttgtttaaaaaaaatcaaattaatctattttttaaaaaaatagttaatacttaattaatcatgcaataatacgagcttcattttacgtgccggggaggaggggttcccaacccctccttccgaacatagccttagtaaatgcagggataaataattaggctgcgtacggtatatcactttcttacctttttgcttcattgattttcacacgcatactttataaacgttcattgaatggtgtattttaaaaaaatcaaaaaattattttaaaaatcatattaatatatttctcaaatttagtgagctacctcgttttatgtgtaaagaaaagttccccaactcctcctgccgaaacaaaacagggcggatccatcatgggagcgttggggctcaaacctccactactgtcatgaggatcatgggagcccccacgaaaccctaacaatctttttttttttgccatatgtagattggaggagggttgtagctctgttttattttaatgagacccacctattttttctttctcgatctggctcaaacataatacttcttagagctttctagttaagaaatattgaagttccctacgaagattacccctacaaaaatgttagaatcggatgcccactcttggcgggcttcaaaactcccggatgattttcaccaggccaacatggtcatcatatcgatccctcgccttcaggttgttgatatactttatgctggctaatttatcgccttcaggaattaatagtgtcggtgatatgggaccgggagtatcatgactagaggcttgaggcagacacaatcgcccacgtggcctggcaccttcggggacgtcgggcccgagggtgaggtgtccgccctcctcctgatttcccccgagggggggtcgggttgcgcttgccccggccccgagggccgaggcaccccgacccccttaaggaagtctgcgccacatatatgggataagtgagcacagctgtgctcacctaacagcatttattgcagtctggtcaggcgtgtcacgctgcnnnnnnnnnnnnnnnnnnnnnngaagtcgcatatcaaanntctcc

SEQ ID NO: 1942 - DNA, 19372 bp, Oryza sativa
ggtctgtgaccagtcacagaccggtcagatcacgggttaggtggcgactggcggtctgacgcacgccttaccccatcccgtcaaggtgtgagcttctaagcactcgtccccagctggagctagcgtgttacatcccagagatggcacgttaaccccgatcgatatataccaggcttcatcctaaccattacaggcaaggtgttacacaaggaagggcaaacatgcatgttgttaaactgacgcgtggtggacaagaatgaccggtctggcactggtcgcgtcagcaacgggcagccacgatcccacgttgcgcctgtctccgccgggagtggaggtaggtgtgggctgtcccatcggagtgtcattcggacagcaaccataccaatctccgtcaataaagagaagaaaagtccagtttggaaagggaagggtgcatgtggtatccccttgaagtataaaaggaggaccttgcccatagagaagggggggattcttttccagatttagagcttagaacggggaagaagttggctcacacttggtagctcattcatacacaaatccacaaaaacacaggagtagggtattacgcttcgcagcggcccgaacctgtatacatcgccgtgtctcgtgtgtcttgcgggcagacgatctttccagatacagagggagagcgagagcttgagatttcaccctaagcccccggccgaactggcaaagaggggcctgcgcggtctcccggtgaggagccacgagctccgtcatctggcgcgccaggtagggggctcagcgtgtgttttctgagctctcagactcttccgtgtgcgccaagtttttcttgttcagcctaatggccgagcaaggaaaagcgcacgacctctctccgagtgcgagcggcgacgacggggagccaaacccacgccgtcgagctcgtactcccccacctcctccacaccaaagtcctaagcagggggaggcgctcgagagggttgataaatccgcagcatcaccggtcgcgggtggtgcaggagaacggcgagatggggagcgtcgcctccttgtctacggcgacggcagcacgcctcaaggcgcgcttcaggctgtcggcgcgctcctacgtcacccgcctgtcgtccctgacccggagtctccagcccagcgatggctggacgatgtggccaatttggtcatgacggcacaacagcgcctgggtgctggtggacggtccgccaccaccaagacctccggcgccgctaccaccggctccgtgtcgtcaaggcggagggcgcggcgagcggcggctgctgcgcgccattcggccgccactccctcgtcgacacctccaactcgggaggatcagcatggagagccggatgcccgcatcgacatcgagcgccggcgtaataaccggcgtactccccgcgcaacggagggcgcctcttcgtccagagtgtcacctcgacctggacatgagaatcagccctccgtgcccccggccggtggtgttggctgtagagcctttgtggcgagtcttcggaatgtccgttggcccccaaggttccggcccaccatcaccgagaagtacgatgggagcgtcaaccccaccgagtttctccaggtctatacgaccgggatcgaggccgctgggggtgacgacagggtcatggcgaacttctttcccatggccctaaaaggacaggcgcggggatggctaatgaacctgccacccgcgtcggtccactcctgggaagatttgtgccaacagttcaccatgaacttccaaggcacatatccgcgcccaggcgaagaagcggacttgcatgcagtacagcgaggcgatgatgagtcgcttcgctcgtacattcagcggttttgccaagtccgcaatactataccatgcatccctgcgcacgcggtgatctacgcgttcagggggggcgtgcggcacaactgcatgctcgaaaagatcgcttccaaagagccccagactaccgcggagctttttcagctcgcggaccgagtggctcggaaggaggaagcgtggacatggaactcctccggttccggagtggcagcttcggccgcccccggatccgccgctcagacagggcggcgtgacaggaggaggaagaagaggtcggaccgttccggcgacgagggtcatgtcctcgccgtcgagggcgctccgcgggccactcgaaaggggaggcctgcgtgcgacaaaaagaaagaggctggtactcccagcagggagcgccccgccggcaggtggtgctccgtccacaacacctccctccacgatctcgcggactgtcgtgcagtaaaaaacctggctgagcgaacgaggaagtgggaggaggacaggaggcaggaacgccgtgagggcaagtccccggcggttccttccggcaaacggcgaagtgaggccaagcagaaggcccccgctgttgacatcgatgatggcgatgatgacctaggtttccaagaacctggggccaccatagccaccgtcgatggaggagcgtgtgctcacgtctctcgccggagcttcaaggctatgaagcgagagcttctggccatggtccctactcatgaggcgatgcgtcgggcgcggtggtcggaggttgctctcactttcgaccagaccgaccacccaccgtgcattgcctggggagggcaggttgcaatggtggtttcccccaccatctgcaacgtgaagttgggacgtgtcctcatagatggaggagcggccctcaacatcctttcccccgcggcctttgatgctatcaaggccccggggatggtgctccagccgtctcaaccgatcatcggtgtgacgccggggcacacatggccgttaggtcacatcgacctaccggtcaccatcggtggacccgccaacttccgcacggagcgggtgagcttcgatgtggcggacctcagtctgccctacaacgcggtcctagggaggcccgcgttggtgaagttcatggcggcggtccactacgcctacctccagatgaagatgccgggccccggtggccccatctctgtccatggcgatcttaaagtcgcgctcgcttgcatggagcagcacgccgaccgcctcgctgccgcgtccaagcccgagggtggtgacgagaggcttggcacctccgcccccaccgccccgaggcagcggattgccacatgcgacgaggtcccggtcaaggaggttgccttgggcgacggcccatccaagaccacacggatcggtggtcttctggatggcaaataggaagacgcgctcgtctccttcctgcgggcaaacgctgacgtcttcgcatggagaccagcggacatgcccggggtccccagggaggtgattgagcaccgtctcgccgtgcggccgggcgcaaggccggtccggcagaaagtgcggcggcaggccccggaacgtcaagccttcatccgcgaggaggtggctagacttttggaggccgggttcatccgtgaagtcatccatccggagtggctggcgaacccggtggtcgttcccaaggcgaacggcaagcttcggatgtgcatcgactacaccgaccttaacaaggcatgtcctaaggatccttaccccctgcctcgcatagatcagatcatcgactccactgcggggtgcgaccttttgtgttttctagatgcatactctggttaccatcagattcgcatggctagggaggatgaggaaaaaactgcgttcattacccccgtaggaacttattgttatatgtcaatgcccttcgggttaaagaatgcaggtcctacttttcaacgtactactcgaatttctttgggtagccaaataggacgtaatgttgaggcttatgtcgatgacttggttgtaaaaacgcgcaaccaagaaactttactttcagatctagcggaaacttttgagaacctccgctccgcccgcataaagctgaaccccgataagtgtgtgtttggtgtacctgcgggcaagcttcttgggtttttggtctctgcccgaggcattgaggccaaccccgagaagatacgagctatagagcggatccgcccccccagcaaacttagggatgtgcagtgcgtcactggttgcatggccgccctaagtcgtttcatatcaaggctgggagagaaggcgcttcccttgtttaagctcctcaagcgctcggggccgttcacttggacggaggaagctgaacatgcccttactcagttaaaggcatatctcagctctcccccggttctagtcgccccggagccaaatgagcccctgctactttatttagcagcgaccccccaagtagttagtgcagcgttggttgtggagcgcgatgaggacaatcctcattctgcgcacccccactctgtgccgacttggcccgggagcaggcagggaggagaggcccccgagtcgaacggtggcctaaggcccccgatgaccggagtcggccctctccccgcttgtcagacggtgctgggtgcccccgaccctcaggaaggccccgaggccactgcgggaaggccgcacctatcgccctttggccccgaggctaaccctgtgctgactcgacccgggagaaagcagggagaagaggcccccgagccgaacggaggccagaggcccctagcgaccggagttggccctttgcccgcttgtccgacgatgccaggagcccccgacccccaggacggccccgaggccactgagggaaggccgcccctttcatcctccgaccccgaggtcatcggcacagaagacaagtgtgccccgaaaggccacttgaacgaagaacgccccgggggtgcggcccctagcgaagaagatcggccccgccgaaaggtgcagaggcctgtctactttgttagtgaggccctccgggacgccaagacccgatacccacaggcccagaagatgctttacgctattctgatggcctcgaggaaactgcgccattatttccaggcgcatcggatcactgtggttacgtcttaccccctcggtcaaatcttgcataatcgagagggtacaggacgagtggtaaaatgggcaatcgagctttctgagttcgatctgcactttgaaccacgccacgctatcaagagccaggccctcgccgattttgtggcagagtggaccccggctccagagactgtctcaatacccgaggccagcacggacccctcacagctgcctcaaaccgcccactgggtgatgcagttcgacggttctctgtctctccagggcgccggtgcaggggtcacgttgacctctccgaacggagacgtcctcagatacttggtccgtctcgactttcgagtgactaacaatatggcagagtacgagggactccttgccggactcagagtggcagctggactggggatccgccgcctcttggtattaggcgactcccagctagtcgttaaccaggtctgtaaggagtaccggtgctctgacccacagatggacgcctacgtacgccaagtgcggcgtatggagcgccatttcgatgggatagaacttcggcatatacccagaagggataacatagttgccgatgaactctcaaggctcgcgtcctcgcgagcccagaccccaccgggcgcctttgaagaaaggcttacccagccgtcggcgcgacccgaccccttaggggagacggatgcgcctgaccggcccccgaggcccgtcggagtccaggcctcgggacccaaagggagcgctccaagctcccttagattgattgcttggatctctgagatccaaacgtacctcacagataagactctacctgaggaccgcgaagggagtgaacgcgtacaacgcatttccaaacgctatgtgctggtagaagggaccctctatcggcgcgcggctaacggaatcctcctgaagtgcattcctcaggaacaaggcgttgagcttcttgctgacatccatgagggcgagtgcggagcccattccgcctcgcgcaccctggttggcaaggcctttcgtcaaggattttattggccgacagctctcaatgatgcagtcgatctggtccggcgatgcagagcgtgtcagttccacgccaagcaaatccatcagccggcccaggccctgcagatcataccactgtcatggccatttgctgtctgggggcttgatatcctgggaccgttcaaacgggccccgggcgggtttgagtatctgtatgttgcaatcgacaagttcactaagtggcccgaggcttatccggttgtcaagatcgataagcactctgctcttaaattcattaagggcatcacggcccgttttggggtgcctaaccgtattattacggataatggcacccaattcactagtgaactcttcggcgactactgcgaagacatgggcatcaagctctgcttcgcctcacctgcccaccccagaagcaatggccaagtggagcgcgccaatgcagaaatcctcaaaggccttaaaaccaagaccttcaatattctcaagaagcacggcgattcatggatcgaggagttgccagcggtgctctgggcgaaccgaaccacaccaagccgagcgaccggggaaacgcctttcttcctcgtctacggcgcagaagcggttctcccgtccgagctcaccctgaggtctcctcgggccaccatgtactgcgaggctgatcaagatcagcttcgcagagatgacctcgactacttagaagagcgaaggcggcgcgcggccctccgagccgcgcgctaccagcagagcttgcggcgctatcatcagcgccacgtccgggcccgatcactctgcgtcgacgacctcgtcctacgccgcgtccaaacgcgtgctggattgagcaaactctcaccaatgtgggagggtccgtatcgagtgatcggtgtcccccggccgggctcggtacggctggccacgggcgacggcacggagctgcctaacccatggaacatcgaacaccttcgtcgcttctacccctgaggaagggggggagtcgggtgtcaggttttggcttaggccaaccccgcacccccctcgggtgtgcagggttggccgggggctaccacacatgcacagtcttacttttcttatttcagcatttcaataaaagcagtttcaattttctaaaggttgtgtctgtgccgtttttttccttttgaagaatcttgacttgaaataatgtcactcgtgctcaaccttgccctcgggggctcggttcggtcagctaaaatcgccaaacggggcccagaaccgagccgtgccccagggcgtggtgaactccgggggggaatcggcaaaaacccacaatcgggtcacccataaccctcggtcaccacgttcccggcctggctagtctcgacatgcggatctccccaggcactagccccgacccgcgcttttcgaggactgggacttgggcacgggcccttatttcaagctaagacgcaaaaagaccacggcacagatcatcctcatctcatatatagcaaaataaaactaacacaaaatttttttcatcatttctcattgcagattaagttaaattgtacgaaaaagaggcatgaaggccttagaagaaagaacaagaaaaaagttaagattggcgggggcctgggggctcattcaaatgcgcccgggtcgccggcctcgtcgccaccgtcgtcctcgctgctggcgtcgccctcctcgtcggagctgggggcgaacgcgagccgaggggccgagccctcgaagccgttgacgatgtggtcagcagcatccccgacccgcgcgcgcgcgtcgtcctcggtcccgggagggaactcctccagcgccatccagggagagaaattggggtcccgggcctggtaactcgctagcacgagttcaaccgccccccgggcgaggtccctcgaggatgacttgatggtcttctcgagctcctcggggagtcgttcgaggacccaggccatcctgttgaggtgcggagcgaggccttccagattggtggggggcaccgtcgtctggcctctccagaggcctgcttgccgaccggcgcgcttcatgcgggagaccgcatcccaaagcatgtcgggcccaatctcgcccgccaagcgaagggcctcggcctccccggtagaggagtccagcgctcgctgcatttccgcgacggtgtgttcggcagctgcgaggcgggcggctaagtcgctttcgcccgcggccgccccgccgataggcgcccttgcgtccagctccttttcccgcgcctcgaggtcagcagcccgctgctccagtgcggctctctcggcgcggacgcattcgagattgcggcgcgcctgctcctcctgcgccgcctcgcgaagggacaggctgtccgccagccgtttggtcgtggcctcagcctcctcgagagctcgctcccgctcagcgagtgcgtcctcgcggaggcggagcgcgcactcctcctcggcgcaggcggcctcatgcgccgccagcgtcgcctctcggagaccagcggcggccttgcggtccgtcaagcccctatccacggcgccggcgtgttcttccagcgccatggcacgggcctcaagggcctcctcgcgccgccgaaacgccgcttcagtctccgttacccgccgctctcgggcagcggcggagtcaaggaccccttgggcggcgtcgagctttttcttcagctccgcctcccagcttgcgtgctgaaggcggagagtgtcttgcgcctcgatcatcgcggtggtagagatgagggcggccgcccgctcctcctccacctcacgggcgatctccgccagcgccgctttccgggcttcaagctccgagacatgacggcggtgagccttacggcccacctccaccatggcgtccaccgagcgccgcccctcctcaacacgcgcccatgcggcctcgagctccgctcgttctgcacgcagggcctccacttgggtgttgaacccatccagcactgcggtgtttgcggcggccagggcctgcagaaggggctcggcgctcagcggggcgacagaagatgaggagaagagccgccttggagaaaaggcgacgcggcttggccccccggaggatgcgctgggctcggggatgtcccccgggcccgtttggtcctgggcgtcgcccggtgaggtaggcccaggcgatgcgcccgcggcctcgtcgcgagccgcctcggaggatgtcgcctgagggccgcccgagggagtaggcccaagtgacgcgccagcagcagctgtcgcctcagcctggcgagcccgggcggcctcctcccgggcagcttcttcggcttggcgagcccgggcggcctcctcccgagcagcttcctccgcttggcgaacccgggcggcctcccgggcggcctcttcagcttcccgaaggcgggctgcggcttcacgccggtcagactctcgcctccgctcctctgcggccgctggatcttcggcctcggactggccggatttggggtggcgggaggaatgcgacgggacatcgctgaagcagaagaaaaaaccaaaagacgaacaaaatgagtaagaaaaaacttctctttgggagaaaggtggttgcaatgagagtgagacgaacctgcgagggggtcggttgaatgaccaccttggaggagaaatcaggttcccccggcatggttccgtctcccccgtcttgcggagccgtttcttcttgcgctccccctcgggctgcgacgtcggcgcggccccctccgggcgccgactgctggcacgcgccgccccgccccctcggggaggagatgggggaggtgttcctcccagcttcctcttcccctgggcgtcggcagggcggctgctccccgagcccccggcgcggggcccagaagcacgaccccctcttggggcagattgttcccctcggcggcgctcgcccgcgccgtcgtggcccttaggggctctctcctctgaggccccgacccccatcataatggttagaatggaggcgcggtcgggatcgctgcagagggggaggatctcctgaggaatgcgagacgcctccgcggagctaagattcagcaccctttggaccacgatcttgaagtcctcgggagcccaatcccatctggctccctggtgggtccgcatgtagtcttcaggcccagtgtactcccaggcgttccgggcgcgccgttggagcggcgcaatccggcgacggaggtaatcgccgtacaccatggccccggtgagcccctgggatcgcaggcccgccaggcggtcgaggacggcgtcgtagtcctcccccagatctaccggtgcccgccagctggagacctgcgccgggggctggcttggaagtcggaggcgcgcttcgttggcgaggggggtgtagaaccagtcgctcttccagtcgtcccacttcttgcgaaggacgcaggggatgtagcggttcaataccggcccccgcggctggaagtagcagccgccaaccaccgacggcggtgacaccgactgcacggtgaagaaccaccggaacagctgaagagaggggcgcaccccgatgaacatctcgcacagatgcgcgaagatggccaatgtcatcaccgcattgggggtaaggtgcgccatctggaggtcatagaactccaggacatccatgaagaaatgagaaaatggcgggaccagcccagccatcgcgaaggggaggaagaagatggaccgccccgggtagtctggtgccgggcgcccctcgcccagcatcactatctcccgaccggtggcggactccggcatgaagcggcgcggcagtccggcgtgcctctcattcacgatgcgggaaggcggtagtacactgccgtcgagcagagcagagccccgtgccatggcggcggaggaagagatgattgagaacgagcgcgtgtggcgaaagtagggcgtagcagagaaagagttagagctcaggtggcgaaggcaagaggaacaatggcgaaaggaaggatgcaaatccttttctcgatgcttttatacccttgccatcgctgggcctgactcctcgtttctcgcgcccactacctcgctccctcgtatctcgctatctcgctccctcgtttcccgtgcccacgcttccactaatcccattcgcccgcttacggcgcattgagtggatatgcggttgtggcaatcgaaatggattgtatcgtgcgcgcgttaattacgctcgccgtccgaagcggcgttaccatatctccgggcgagacgaatctgctcacccagattcgcgcgctgctcaagtggtgtggcagtcttgaatagaccgcccattatggacaaccaaagttaccaataccaatgtgcatggattgagaccgttgggtattttgcccaactacggagaccggtcccacctgtcacagggtggcgtcacacctgaccgcttcccttgggaagggaaattgctctggcataacgccgggggctactgtcggtgatatgggaccgggagtatcatgactagaggcttgaggcagacacaatcgcccacgtggcctggcaccttcggggacgtcgggcccgagggtgaggtgtccgccctcctcctgatttcccccgagggggggtcgggttgcgcttgccccggccccgagggccgaggcaccccgacccccttaaggaagtctgcgccacatatatgggataagtgagcacagctgtgctcacctaacagcatttattgcagtctggtcaggcgtgtcacgctgcatgcagcgcagtacggcgcgttcctttatccggtctgtgaccagtcacagaccggtcagatcacgggttaggtggcgactggcggtctgacgcacgccttaccccatcccgtcaaggtgtgagcttctaagcactcgtccccagctggagctagcgtgttacatcccagagatggcacgttaaccccgatcgatatataccaggcttcatcctaaccattacaggcaaggtgttacacaaggaagggcaaacatgcatgttgttaaactgacgcgtggtggacaagaatgaccggtctggcactggtcgcgtcagcaacgggcagccacgatcccacgttgcgcctgtctccgccgggagtggaggtaggtgtgggctgtcccatcggagtgtcattcggacagcaaccataccaatctccgtcaataaagagaagaaaagtccagtttggaaagggaagggtgcatgtggtatccccttgaagtataaaaggaggaccttgcccatagagaagggggggattcttttccagatttagagcttagaacggggaagaagttggctcacacttggtagctcattcatacacaaatccacaaaaacacaggagtagggtattacgcttcgcagcggcccgaacctgtatacatcgccgtgtctcgtgtgtcttgcgggcagacgatctttccagatacagagggagagcgagagcttgagatttcaccctaagcccccggccgaactggcaaaggggggcctgcgcggtctcccggtgaggagccacgagctccgtcaaatagttatttaatttatggctactaattactatcatattttaatatgtaagaccggataagacgtttcttatattttacgacggaggagggagtactatattaaaaaaaaatcatgtgagggcatatattaaataaaataaaaaaaggaaagggaagaaaagaaaagaaaagaggaagtcagtgacgcgtcaggcagcagacaacgtgggtgtggtgcgcgggagggtgggccccacacgaaaaccctggggtcacccccatcccatcaccccaccaggatggatctactgtaagcaccagttgaccgcatttcatttccctcctccctcaattgtgttgttgttacacacacttgccacccgctataaaatgaaccagagcagatcgaccacccaatccaacccaaccactcatcatccatctgctactgctactgctagctccatccattttattctagctccatccatcctttaagagaagctgagatcaagaaacgtactcactcttgcctgcatcgatccttgagtttaattaactcaaggaagaagcaatcttcgcttcggtggatgaagagcaggaagaacagcacgacgagcacaaaagcagcaggcagctgccacaccagcagcagcggaggaggaggaggcggcggcaactgctatagcagcagcagtagcaagatggagcgcaaggatgtggagaagaatcggcgcctccacatgaagggtctctgcctcaagctctcctccctcatccccgccgccgctccccgccgccatcaccaccactactccacctcctcctcctcatcgccgccctcctccaccaaggtactactctctttttatccacaacatgcatcaatcatcctcttgtttcagatactcctccatatgtttgttagtaattgctgctgcaactgaaatattttttacatggatcgaccggaccatacattaataatagatccacacatatatagtggagtacagtactatatcacttgcaacctcctgcttactgaaatatgctatgtagtattctgcagccattttccttctctaactacaagcctagctagcctcttcattcattcagctcaaccccctccatcgatctggactggactagtaattattttcttctctaccaggagtatatatgctactcttaactcctggagtaccatagattcttgcttgtttgtaaccacgcatcttctttaattaaaatcacaaacactaccaaattaatgatcaaaatcaggttacgtaggagtaactgcgtgcacacaccattcatttactgcctttttaagctgcatatatataaacagaggcgtttacagatggccgcgaatgcgtgcgtgcgtgcgtgtaaaaaaagccaagcaaaaaaaagttaaaagagaaaagatttcaaaagggttggctgggtggctaaaccttttttgaattttgagggtcaccaatgttttgatacttacggagtggaaatgatatgagttgacatggtaattggtttttgtaggactaatactagtatttctgatagtggagtataacaattagtggagcagtatcttctttttctactagtagtaggattgagtatctatctgtgtttgtgtgagtcgtcgtgcactcgaacgacttgagctacagtttcaggcacgtgctggaatagaatatatattttgatatgactgattttgtttctcaaaaaaaaggcccctcactcacttagacagcgatgcgcttccaatggatggatctcgcatcctttttactagtactattttctttccttcctttctttgtttgtaagaaaatattttgtcaatggaagagtagtccagttgttttggctgtagccacgtgacggattggtagagcacaacactaaccgacgaacaacacaagctcaatataatcaattcacaattcacaaacagtgcagatcattgttctgctcaaactgaacccaccaataattcattcatccagtgacccacctaccactacctcaaatccatccaatccagtgcgttcaggtcacagcagcaatcactttcaagaaaggaattccttcctcagcatcccttgcagaaaaacaaacaaaagcaatgctactaatcatgccaaagttcctgtttccaatagttgaatactggtacaacgatgagcttgacacctcaccttacagtgttggatcaacaacaacaaaaaaaacgtggaaaaagtatgtagtagtagtagtagtaactgaattaaactgtggtggtggtgtactgaataattaaaatattactgatggatggtgcaggaggctgtgacgcagctggatcacctggagcaggcggcggcgtacatcaagcagctcaaggggaggatcgacgagctgaagaagaggaagcagcaggcggcggcactcaccaccagcaccagcaatggcggcggcggcgggatgccggtggtggaggtgcggtgccaggatgggacgctggacgtggtggtggtgagcgaggcgatcagggaggagagggagagggcggtgcggctgcacgaggtgatcggcgtgctggaggaagaaggcgcgaaggtggtgaacgccagcttctccgtcgtcggcgacaagatcttctacactctccactcccaggcgctctgctccaggatcggcctcgacgcctccagggtctcccacaggctgcgcaacctcctcctccaatattaattcacaccactctttcactctgctcagaatgagataatactctctactctactctactctgtactgtgatgataagaagtataaagagtagcagaccagagagcctctaggtagctaggttaattagtgagaaacaagagtttacactaagctaatggatggcatgagcgggagcaagctgttattactactaactcttggctaacgtttttgtatcccctagctagctgcctgccctacgtatatgtctccagtctatcatgtaggagtactccagtagtatactgtgtgtgagtgttctcttttgtgcctgaaattaatccagtccgatgtaagtacgtactagtatttggtttactgcatgctctctagcctcgcatcattatttttgagaggcaatgatgtgataatccttaaaatgggggcagtctcttcttaattctatacaccagcaaattcgccttgctctttcaaaaattataatgggggcgatccttggaaaaggaatcatggctttgagaaatatgcagaaagaagtaagccccaggaccagatatgatcctctgcatttagctacaagaaggatgtggattacaattgacacaagtacaatagcagaacttactactgcgtaggagtatttgctacttgtatgaaaaggtggaagcagaatttcagtatccgtgttggcgtgttgctatcagagaaacgaaggtggtatagtggctgttgtgcatgtgcctaactattgttcgtactactacgagtagagtatcagtatagtacttagtactggagtagtatctaagtactagaaagttggttaactgatagtgatgtttggaagaaatggagaaagaaaagaagatgatacagcaattcatgcacgtggctcaatgcatacaaacgtttgtgacggactaaatacaggaaatgagcctgaaaatgacaaggtcacattttagccgaagcagcttcatctttacttactctagtagtagtacagtagagagcaactcactccaatcatccagtgggtcgatcgggcagaggaagtagaaagcagagcagaggagaggagaggagaggaggaatttggtcgagctgagcctcaaattcctgagaaggtgtgagagatggagcctcagctttcgcggtgcccggagacggcaacagcacagccggagaaaggatcggagccgatcgaacggcgacggccacgttcccccctcccctggctggcctgaactagaactagtagtcctaaaactttggatttgcctggccatagaaagaaatgttctggtttatgtggaccctgtgcaccgctgagtgttagctacagggatatgatatcctggattacaagcaaaaaggatttgatgccgcggtagccagaatttcagtttcagtgttaccgtcggagagatgaaatgaaggcagtacagtgaagtgagtggctggtgtgagtgcttggcccgcgaaatgtaccattaggatgacataaaaccatactagtagtaacatgattcaaccctgcttgagagagtgatgtttggaagaaaaaataaaataaaatataatgtagaaaaactagtcgaggatgaaataattgatgatgcatgtgggtgaatgcgatttgtggattgaaggatggatgtaaacgtttgtgagcgatatatattggatgcagggaatgaacctgaaaatgacttgtaacatttgcctggcagccggcggcttgatctttactgaggacggaggaggaattacgttagctcgagagatagagagactactcctgcagggaagtgaggcgaggaggaagaacgaagcaattaagcaggaaggaaggagagagcaacagcgcatgtattgtatgcagccggagcgccgaggatgcggcggcgccggcattggggcaggagaaagaagaggtcgtccaacggcggagacggagacgattgattgggttcccgatgggccgtttctgacattcagcccacggcccaaaaaccaccctccatcgtgccgctcttcttcctgggccgaacgctctcccatctcttctcttaaaagaaagcccaccgttatttgtctgtccatcgagaggattttagttttttttttgttttctcggagaaaaatgtagaattttttgtttcagaacaaaatgcttgcgaaagaacgaaaattgaaggagaaaacgaaggactgagacaattgaaggagacgtccgatttgtagtttgcctgtactagtacggtatgtgtccaggcatttttgttttctattttaatttctgatgagacgctgattacgaaatgaccaagcagaactgaactgtgctataccatactatgtgctgcttcgcaacggaaaagctagtgggcgatcaatctcccctcctcctccacgtgatttccttttttggcaccatattactttcctattttagtaaatttatacatctaaagtttgtacatctcaagtttacacatctaaagtttatacacataaagtttagagacccaaagtttataagtcaaaagtttatatatatatagtatttctatacataaatttttctaactatttttttattttttaaaaaaattatggtgtcgtaggaagagaagaaggggagaaagaaggggggagaggagccgtatagggaggggatgggggtcgattagggctcccataggatggcctattcaaccaaagaaaaagccaaaatttgaattttcaaacttaattttgatattgattttgaggtatttttaacgtagtttatttttcaacattggcttttaaatcaccaagaacacatatataaaagttttacctataaatttatttttatcctctaataagccgttaaaaagccaaacgatgaggcactagctttacccgcttggcaaatccagctggagtagctccctgggacgtgacgtggcttgggttgatttactagagtagtatttttttttcttaaaacgaaatgcacaagaaaggcaggggaaaataaagaaaaggaagaaaaagagagagcggggaagcggcgcgggggtgggggcgagtcgaccgttggggtgcgtaacgttccaaagcccatcacaacacaagaaaaggaagcaaacggaccattggttgtgtttgctctggattccatcttcctcctcagctcctcctcctcacaaccagcttcttcctcctccacctcgcccaattctctcctccacggctccacctctgctcgatcggatcaagatcagaatcacgatcaggtatctcctcttgttcatcatcaagattccatccatccaataattcgcctctatttcatcatccccgccccacgccttcaatcgcagatcgatccgcccgccatgagcacgctatccgccggggtcctcctcaagctgctcgacggcatgaaggccggcgcagccaagcccgtcggggagcaccgcaccgcgctgctccaggtcaccgacatcgtccccgccgacctcgacgacaaggacctcctcccccgccatggcaagttctacgtcaaggtctccgactcctcccactccatctacgccaccctcccgctcccccaggccgatctcgtcctcagcaacaagctccagctcggccagttcgtccacctcgaccgcctcgacccgggctcccccgtccccgtcatcgtcggcgccaggccccttcccggccgccacccgctcgtcgtcggcacccccgacccggccacccgcgccaagcccgccgcgcccaggaggggctcctggggccctgagaaccatgccggaatcctcgcctcccccagggtcatcaagcccaccacgctcaacttcgaagacaggacgcccgtcaaggagagaccggccgcgccctcgccggcgcggagcaccgccttctccctcaggaagagcagcagcgtcctccccaggatcaccaggagcaagagcttcgtcgccgacagggctcctgaccaccccaagatccccaagagcccattccccgccgtccgtaaccttacctctatatactccctcttcaattcgattaga

SEQ ID NO: 1943 - DNA, 16881 bp, Oryza sativa
  unsure (1)..(16881): unsure at all n locations
cgcgcgccagataagatacggctgcgtcagcaacaccncatcatccggtgcccgggaagctcaatctcctggggaaggcaagtccctcaactcaatttccatcctgaattcgcagcgtcctgatgcagtcgtctgattgggttgctgatttcacttcgttccttgattcaggaagccatggagcagagggagcaagctcagaaggccgccctcgaggcgctgcgcaacgcctccgccacggacaacgtagtcaggatctacaagtacgatcctttctttctcttttccttctctatctgatggcaatggtgaatgtggcgattctcgcttccaagcaaattcgattgaggtgctagttgctgtattacttatcattgagtgatcgattctatgttggtcaaccggaccaggatgttcgctgaattgagcaagacggcgaggcccgacgcaccggccacctgcttcgagagcttcctcagcttccaccaggaggccgtgcaggccgtgaccgacatcgagtcgatccaggcggccacctcgatggccggcgccgtggcagccgatgagccgccggtcttgcaggagattgcgcagaacaggtcgtcgttgtccaagaggagaggagccctgggcgtgtccaagtcggtgtcgttcgcgccgggcacgctggatgacggcggcggcaagaaccggagctccaacgccagcagaaagtgccttgtactagacaagatcggagaagacggcgacgagaagcgatcttcttctggtagtactaccaccggtgctctcgggtcgtcgttgaggctggcgaagcagatgcaatgtgaggcgtcgagctggtttatggacttcgtggaggctgcgctggagactggcctgaagaagaagagcaaggcgtcggcgacggcggatgggcggaagcagagtagctgctgctgcccgcagtcgctgatactgagggtgatcaactgggtagagatggagcagagtggcgatggcagcagcaggaagcccagtcacccgagagcggctgccattgccaggaagcttaggataaaggccaagaacccttaattcctgctagtttattcttttgcttgttgtaggcattgagaaggttatctgtagaatctgtagatcaaggaaaggaagttccaggatagagatgcggattcttttgcttcatggtatatgaagctgttctgccctcctccctgtgacataaattgacatccatactatacagtagtcaatcagccacagaaggaagaaaacacctctgcttgagcaagtgctacgctctagtttgagtacaagtagtaccatccgttattattcattttaacttgttttttttatcattgtcttatcttgtgttttgcatgatgggggtaagacaaccatttgcttgactaattcaacctgctttcgcggtgatagaaattgttctgatcacgtggcatgaatgctttgctatacatgaaagtttgaaatttctgttttatctgatgaatggactgttgtgttgatgtggtcctgtgcaaacttgtatatatccgatgaataaggagattcagatgtagtaaaagtaccatgtaggaggagaggacaggaggattgctgctgcatttgcaatcgagccattcagctagttggtttggaacttgaaatccagccacttcacggcagatgttgtaaatgtaatgcgctaaagcttcagcaatccagatgaatgtttagttcacactgaagtttggaagtttggttgaaattggtacgatgtgatggaaaagttgtgtgtgtatgaaagttttgatgtaatggaaagttagaagtttggaaaaaaaactttggaactaaacagggccgaaattgacttgttgatactagaattttaaggccgtcagaaccttctctggcctgcaaaacataatgtgcaagatgaatgaaggaacccagaagcatatgatgacaaagtcaaaaggtatccatccagctttacatgttaagcatattggatatgctttggatcggtttggcacaaagtggaactacaaattgaaatgagattggatcataccttgatctcctgaagttcccatctctctgtctatgttcttctttcttctcttctaatttggaagcacagagagaatcatgtcttggttcttccctgtgtttcagtgggtttttcttgatcgggtagcaagagaaaacttagggtttaacacttaggtattgatctctatttatagccattgcacacagggggaaccgacactagggtatggcggtaatcccccgatcagggatgttcatgagagatcgatcactgtagcgatcgccctaaacaaaatatctctttgccgactttaggtttagctgcaagatcatattttgcgttcacactaacattctcccccttgatcgtgaggctaaacttataagtccatttctcaataaaatagtataccaagacaaaagattacagtgaccaatataaagcatcacagaatccagtgactatagcataccattatattttaaaataaacttctttaatcttacgagctctttgaacttattacattaggcttatacaaacttatggactcacttttcaacaaaacagtatatcaagacactagattacagtagtcaaaatgcatgccggcaagtatatcaagcaccactgaaccaagtgactatggttcctatttaatttcaaaatgagtccgtcttattttttatggggagtcagtgccatataggttccttcttattccaggatcgaaggcttttctaccaaacgcatgccggcaacatgttctttaaatacaacgggtggtaggccttttgtgagtggatccgctaacatcaacttagtgttcatatactcaacgcttattgtctgatcctggatcatttctttcacaacatggtacttgatatcaatgtacttggcagaagcacttgatttgttgctactcgaatagtatactgctggtttgttatcacagtataatttgagtggtttcgatatactgtcgaccactctcaatcccgggataaagtttttcagtcatattgcctgcccagtagctttataacatgccacatactcagcctgcattgtcgacgatgcagtaactttttgtttggagcttttccacgatatagctccccctgcaagggtgaatatgtaacctgacgtggatttcttatcatcaatacaccctgcaagatcagagtccgaataaccgacaacttcaaggttttcagactttctatatgtgagcatgaggtctttagtgccttgaagatacaaggtcttcttagctaatttccagtgttgtagacctggattagattgatatctgccaagcatcccggtaacaaaagctaagtcagggcgagtgcatacttgtgcatacattatgcttctgacaactgaagcatatggtattgacttcatctgcgcaacttcatactcattcttaggacattggaattttccatacttatcacccttcattataggagcaggcgaggctgaacaattatgcatattatacttcttcagtatatgctttctgagatagccccaaaacaccatttgatctgtctcggtaaatctctatacccaacacataagtggcttcaccgagatctttcatttcaaacttagaggccataaatttctttgtttccagtagcatatttttgtcattattggctaagagtatgtcatcgacatataatattaggaagatgaacttactctccttaaacttagcgtatatacagtcatcctttttattctccttaaaaccaaattgtcttatgatttggtcaaactttagataccactgccttgatgcttgctttagtccataaatcgatttctttagatgacaacccatatgttcttttcctttcataacaaaaccttctggttgtgccatgtatacatcttcgtacaaatcaccgttcaggaatgccgtcttaacatccatttggtgtaattccaaatcataatgggcaactagtgccataataattctaaacgaatccttagtagagactggagaaagtgtttcattataatcaatcccttctctttgcgtaaatccttttgctacaagccttgctttgaacctttcgatatttcccttgaggtcacgtttagtcttatagacccatttgcagccaactgttttggctccttcgggaatttctactaagtcccagaccttattagtactcatggacttcattttgtctttcatagcttttagccattcagacgaatgttcactcttcattgcttctttaaatgagatgggatcattatctagtataggctcattcacctcttcactcataggttcattcacctcttcattcatgtaagtgacatagtcacttggaatcgctgactttctaactcgtcgtgatcttctgacgggttcgttatttttctcatctatcacaacatggggctgctgagcattctcattattctcatcatttgatacactactagaagtagttgcaggagcttcagcaggtgttgcatcattatttctttctattaaaggtgcaacatgagtatgtgttgagaaaacgggttcttcaattataggcattggaacataattccgtttctcttccagaacaacttctctgggtgtcatactccccttgattatgtcattttccaagaacacagcgtgtcttgtctcaataaactttgtaaactgatttcggcagtagaatctatatgccttcgacttatcaggataaccgataaaatgacaactgattgttttgaggtctaattttcccatgtttggattaaaaaatcgtgcttcagcaggacaaccccacacatgaaaatagttcagggttggtttcttcccagtccataactcaaaaggtgtcttaggaactgatttactgggaaccctgttaagaatgtgtgcagctgtcttaagagcttccatccataactttaccggcagaggggagtgacttaacatacttcgtaccatatacataagagtgcgattatgcctttcagctactccattttgctggggttcacccggtgctgagtactgggccttaatgccattttcttgtaagaacctcgcaaaaggtccaggaatttgaccataagtagtatgtctaccatagtattcaccaccatggtcagaccttacaattttgatctttcgatcatgttgattctcaacttctgctttgaaaattttaaatttgtctaatgcctcagatctttctttgattggatagatatatccatagcgagagtagtcgtcggtaaatgttatgaataaatcaaatccatccactgactttacattaaatggaccacagatgtttgtgtggatgatttccaaaactcccatacttcgatttgcacctttcttgatttgcttggaatattttcctttgatgcaatcaatgcagtgatcaacatctgcatctgagaagtccaaaggacagaggatgttttctttaatgagacgctcaattctccccctcgaaatatggcccaaacgatagtgccataatttcgaagaagtctcattatcgttatgttttcgtttggtactgacatttgcatttgaggagtcaacattataggtggcatcgcacacagaaatttgataaagttgttcctgtccaacggcgagaccaacctctttattatcatgcataattatacatctattgtttccaaaagtacaatagtaaccaccgttatctaaacgtgaaactgaaactaagttccttttcatagagggtacataaaggacgtcatgcagttgaagtttaaagccagtatgaagtgtgagagtgaagtctccaatggccttaacttcagtttcaactccattagcatctctaattcttctttcccctcttcttagggtcctcctcatagcgaatccctacaaggaatttgcaacatgaattgtcgctcctgagtcaatccaccaagaattggtggcataatcaatattcagggattcatcaacaaaagaaataacatcagtacctttcttactaagccatctcataaacccaatacattccttttgccggtgtccactctttccacaaaactagcacccatccttttcttttcccttttcttctgtatagggatttcctccagatttattctgctgggattgatttgaacattgccccttttctttaaattaactaggcttaggcttcaaatactccttaaatttcttatacttttttcttctcagagtgtttaaatagatttgcatggtcaactctttctgccttaagcctttcctcttcttgtacacacatggctattaattcatcaatgccccacttgatcttcattgcattataattgatcgtaaatggagaaaactcctggggcagagatgacataatgaaatggacaagaaaaccttcagagatttccatttccattgatttaagcttagaagccctgtgacatttcttcataatatgttccctcagatttccagtaaaatcatatctttcattgaccaatcttttaataagagtggtggcataaaccttagaagagcctttaaattgttcttcaactttagcaagatattctctggttgtctgagtatctgggactgctcctcttattgcgtcaataatggagctcttgataatcataaggcatttacggtttgaaatatcccattttgcctttacttcatcatatttcctttttagggtctcataattctcattttccggtctaggctcaaccggaggatcattatggagggcataatcaatatccaacagagctagagtaatttccagcttctccttccatgaagcataattacttccattaagttgttcaatattgcccattattccggcaatttgtgaggcataagatgctgcataggagagaatcagcagctaaataagtaccttcttttattgatcaaattcaaaacggctttggccagagaaggaaatgaacaataaaattttgtgaataagtatttattaatcagctttggccagaataataaatacaaaccacactttatcaatttgtttaaaactccttttattaattcaatcaaaacagctttggccagatttgaattgaattaataaaattttgtgatcaaataaaagtcaatcagctttggccagaatgacaattatttgtcacacttaattataatatttatttgtagcggaaataaactcataatacataaaacaataataactttaagtaataaacataatgtaataatcataaaataaataaataaatgaaagagaattttatcacataacaaagtcacttattattcttattatcattaactaaaacataataaaatttcttcaatgtttaaacacaaaaaaatcataatcataattcttcaaaaaggaaaattttaattgtaatattatatcagcccaattcttttaattaggcccattactatgcagcccgttactatgcagcccacacattttttttaatcttgaactgggccgctttctcgagccaggccgaatgcggcctggcccgttattgccgcgccgccttccgcctgggctccaggcccatcaacctgggcctgggccggcgtttgccgcctcccgcacggcctcatcagcccgcgtcgggagcgagccgatccgagccgtccatctcatcggacggccgggatcgctcccgcgcgggacaaaaccgccccccccccccggcgaaaccctagccccattctttccccttctctttctctcacacccgcggcgacaatgagatggcggcgagccagcgcacgacgggtcggagatagcgtcgtcgagctttgcttgccggggctgcgtaccgccatatctggcgcgcatccccatcgagcaacgctcgacggtgccctaagcacccgtcggtcgctcgcgcaaggaaaatccgcggcggcgacggctacctcagcaaggcggcgacggcgagacgaggctggcgacgagcacgtgaggaggaggagccgggccagcacggcgggtcgcgaggccgctcggggaccaagtcctcagccgcgcgctcgcctcttacagcgttggtggcgacgcggtgttcgccgccggccaccatggcccttaggtaagcccgccgtgctcctttttccccttgattttagggttagggtttcatgatttggggaaattttggggtcttactgtagctagggtttcggttcttggggaattatctgagatttgcatgaattttgccttccccttcttctaatctcttcaagccgaaaccctagtcggcctaatttcatttcttacacctcgggattgcatgattttgggcttaactgaactttaacagagggatttgggcatgaacacgaagaacaacttgaacataaacacttattgagttccaatttgaggccaacccggtgctctgataccattgttggatatgctttggatcggtttggcacaaagtggaactacaaattgaaatgggattggatcatgccttgatctcttggagttcccatctctctgtctttgttcttctttcttctcttctaatttgaagcacagagagaatcgtgtcttggttcttccctgtgtttcagtgggtttttcttgatcgggtagcaagagaaaacttagggtttaacacttaggtattgatctctatttatagccactgcacacatggggaactgacactagggtatggcggtaatcccccgatcagggatgttcatgagagatcgatcactgtagcgatcgccctaaacaaaatatctctttgccgactttaggtttagccgcaagatcatattttgcgttcacactaacaaagcatacagggaacgtatcataaactatgaaactatgcataaaaagtttcaagcaattaccttcgcactacaacaaaaacattatataaaggcactttatataaaactctaagatcaggagttttatagcgtagagacactttatagaggcactttcaaaattttctagaaaatttttactctagagactctttagaaatatttttagcacattttattagattttatcttgtagaggcattctttcggcactttaaaatgtgtctaacatgtaaagacatttgcttgagacactttaaactctgtagagacacttcttacaataaaaatatactaaatggctaaatataagtaacttaaggcataaacatatacaatgaatgacatggggttgagttggttagtgccttgaagataagaatgatttgttcaaagaagataagaatgatttgttcaagagatcatgagttcaaggattggcaaaaacaagggaaaatattttattctcatttttacattggtttcgtatggttgtggtacaatttaatgtctctagaaaatgtctctaccaccttatagacattttataaaatgcctcttcgtttgtagagacaattcaccataaggcacttattagacttttttaaaatgcctctatagtattgtaaaggcatttgaaaagtgtctctgtagtcctagaaaaatatctctataaagtatttttcttgtagtgtcggtaagcaatattttactggatatgagttcagctaatcaaaggtttcaagcaattaccagtcccaggtccttcatttggctccaattttatactccttctatatgagtagctgcagcattacttttctggaactccttaagctgtgtttagagcgctaactacttaccagaaattctccacgcaagcaatactgagaaatcttcccagctgcatcctgcgggggatagggacaccaaagaaaagattcagcaccgaaacacatttgtgacgattcatttaccagagtaattttgattgcttgtattcagatttatttgtttacactgacaagtgattttgtagcttagtactagtagtaagtagtattgacttggcagatatactcttcacgaaccaagtactagcattagaacgtacgggggatataggacgtgggtgcttgtttaagaatgagaagtacaacaggaaagctatcagacagttactaataggtgttcgacagtattgatatgatacagtcgatatgaacaaaactgaaattcctataaatgagatgcaatactcatctctcgactattgtaatccttgcactcccaaggttgaaggttctaatttggaagatacagaattcagtaacaactggagtactcctatatatactgcatagagaaattaaaatgagtggcagatgtggaagcaggacggctggacggttttgtgtagttggttcgccgccgcccgccgagcaccaacagagacaagatcatcgccgagatttgctttacctcttgttcatcatcgtggtttcattttgctgtgtactgaatcgaggattgcggcgatcacgagaggagggaaccacggagggtaggattggagaggagtggggccgcgaaggaggcgtgccggcgaaagaagcggcggctgtggccggcgacagtgaggtggcgtttacgggacgggaggggaggggcgtgacgcgaggcagcagaatagacgcacgtctttcatctaacggctgagatctccctcacccgacatcaccagttttgcaaaaggaaaaagtaccccgaagatcccttaacttgtcatcgaattacaaaatcgtcctccaaccacaaaactggatacaacgcatcctccaacttacaaaaccagtgcaaattagatccatcggtggttttgactacggttttgtccgacgtgacggctgactcagcgtggaacccacatgtcaggatgccacgtcagcaccctctctcttccatttcctctccatccctcctctctctctctctctcacttttctccttctctgcaactgcaagcggcaagccgcccggcgggtggggagaggtcgtcggggcgaggcgggagaggaggaggcagcgggcgacgaggcggcgatggcggaagctgcgacgctggagggcaagccgcgccgacgctggagagcgaggacgatggtgacgcgttgccgccgtcgtccatccgcggatccccttgggtgtgccgtcgatgtgagccactgctgctgccaccataggctgacggccttgtctccggtcatcccagcgtgttcatcaccgcgtccttggcgccgaccaccgtgctcttcacctgctcactcgcctgaaacacaaacgaattctcctcaaaatccacaacaatggtgttcgacaaggagaaattaaccgaggttgctaatggtgtgtacttgttggaggacgctaccggtcttgtccttgccagcgacggcggattccttggtgtactacgccgtctcggtggtcttctgcttggcggcgccggcggaggaggatgaaatcctgatgcagcacacgcgcttctgatccatctgcgtcaagtggctcaagcgggacgcgaacctacagatgcacatgcgtagacacagtgacaagtacaagagcgtgcccatgctgacaaagccgccggcggcggtggtaaggacaagcagcagctggagcggcggtactcgtgcacgttcactgggtgcaagcgcaacaggctgcacgcaaacttccagccactgaactactgattactgaagacgatcttgtgcattgtttcatcatccttcagtaaaaaaggttgtgttcaaaaattgatttgataaacaaaaacgatgattagaatataacaaaaggcagccggcatggaaattgggacaggtgcagggagccgatgcagaaccctccaccgcgccgtctcgtcggtctcggtggccttctgcttggccttctcggtcttctcgccgaggaagccgctagtctggtccttgctctcggcggccttgtccctcgccgcctacgccgtgccggaggtcttgtccttcgccgcatgtgccgtcacaccgccgccgacttcctccggagagcccacctaaggcagctcactgcgttcctccgccggcggcggcgtggggggaggccctcctgctcccgcgtcgtcgccgccgccgcctcgtcgcccgtcgccgaccgccggagtcccgtctcccgcctcccccaccggtctcctccccacacccgtcggttgccctgctcggtgagagaaaggaagaggagagaggtggagaggggaggggaagaagaggctgaaatgtgggacccatgtggcccccacgctgagtcagctgccacgtcggataaaaccagagtaaaaactgccaagggatctagtttataatagttttgtaagttagaggatgcgttctccggttttgtggttggaggacgattttgtaatttgatgacaagttaagggaccttaggtatactttttcctttgcaaaatgccccctcgttcggattttgctgctgcattcgcaaacctagcagtgtcttatgtttttgggctgaggcccagattggtttaggaagccggaaaaggaggagcaagccgtcaatcagttagatgatggatcatagtgggctgaaagaaaatatgtatagcccgtttcggcctaaagcgaaatgcaagccagctcagactgagctcgctctcaccaccactgcaccacaacaactcctggccatacacgtggacgtggaatagaagaagaagaagagaatattccctgggcattgggcgatgaccgacgagtgggcccgcctgacacgtgtaagagcaagtttaatagtatagcccactactagctccgaataatctatacccgatgtaatagccaattcatacaatagttgcttactatactattaatatctggtcctacctgttatacatacattacgtcttggagtccgtgctgcagctggctatagatctgtaacccgctgctcttatctctctttctttgtttttttaaaatatgtttatagctagcttatagtcttttattgtacttgctctaagcaaggctgagaagccaagcaaacaaaacgaaaagcaaccgtcaagtggaaataaccagcggattaattactaccactaccacaaataattcattaattcattcatccatttattcatttaaaacaacaagcactaagaagcagaaagaaggaagaatccatgttgcattttatcctactggtaccgtttcttttctatggatggaacattttattctagcatttgcttgctttgcctaacgtactctcctccttaattatccattcaatcaaaacaagcaggactactagaaagcaagaggagaaaaagaagaaggaagaatccgtgttgcattttatcatactgtttcttttctatggatagaacattttattcgctagtattgcttgcctaaattaaatcgcgcacaagaaacgtaaactcgtccataccttaattaattattatccaagcgcaaacatgaaacatccctcccgcattaaattggcatctcctaataaatctcacggacttccatatctactcccggtttctgctggattccttcctttttctcatcgcctcgcctgcctcttggccttccccatccccatctctcatcagccgcaaactgctgcaaaccccactagcgctcgcccccaccgtaatctcgcgcgattctcggaggaggagatgggcgagtactgcggcgctgctccggaggaggaccctgccatggccctcgtcacgccgctccccaccaccaccaccaccaccaccacggcggcggcggcggccatcaagcaaccccactactacggctgcttcgaccgctgctccaccaagcaggtcttcgacaacctccacggcaacatctcgctcgacccggttcgttcgttactcctacccctaccatcccattctgcgggattcgttcctcttccccaaccctccgtctcgccctatctcatcacgctggatattgcttctactgttcatttgcttgcttcagattgtttggttactagtagtaacttggggctagtttttgtctcccttttcgatcggttactgcttccatactcggatgatgatgtttttgtcccttcgtgatgattcattgtgccatgcttggatggatggatgctgctgcgatttcttccgattgtcctcgctgtctctatgtgctccattcctccatagattgaacagattgcatcctcaccacgtgtatttccacttaattcatgtgcttctagtagccttgcatgtgcatgcactttctcctttcccttttcttttcaggtttatttattttcgcttcatcatctatatgtgttgctgttggtgtagcgcgtcaacattagtttactaggagacgcatgcgcatttttttccttcatattttaaatggaggggcaatagctgtttatgctccttcctctcttccttccttcttagacctttgctgactagaatattttacgtccacattcacagcgacatgaggtattatggaggtagtaataaattatctgcttgtttattactccttcgttgacgcttgggtccttttagatatgactgctttcaattaacggggtcttattgttaattgttgacattctaaagggtttttggtcttcactcttcagattaaacgggctaggctacctgaacaaaattgttcagttttttttcagatatattttgggtgggttggcagttttaccttgtgtacgccactactgatgtgtctgaaacacgtgctctccttgtcatgtggtggtagaacaaccaatggtgcgaatggaaagtttattatatatagcagttgttctcacgtgttggatgatcatcatgtttacattcagttcccatttagtttccgccatgtagtgtcgcatgttgtatctactagtatatgatgacattagcactgaaaccttttgatgattctaaacattagcactaaaaccttttgatgattctaactcaatgtattgttgattcccacttttaccttttcctgcctgcatccgtttcaacttggaagtacaaatgtttcagttctactgtgtattttcttcaggttgttaccctgtatttaagtctaaatcatacatgcattcagggtttgaagtaatggcatgctgaatcatatacatgtgaataatcatttacttgttcagtggtgaacaattagcccgctctcattttccgttttggatgcttatgctacaatgacactttatcatactgagtgctgttttcacaccgacatatcgtttctcttattagtgttatttatctatttaatttggccattgagtcattaaagctttaagcaacttctgttcctcccacttttccttctcagtaacaccgataactttctctgatgtgcagttggctcgtgagtttgtggatacgaaggagtttcagaggtgactttgattaacccaaattatcgttgatcgtttgtttattcaacttattcatcctctttatggcttcatttgattgcattgtgtcattcaggctgcgggatctaaaacaacttggtgagttattttatcatcattgcagaaatcatttttagcctaatgtattcaatatagatgaaagtgtcaaaatctaaattgaatttcaaaccttataattgtaatttgttgctttttgggtttagaaaaattaaggctacacaatggggtcttgtcctggaaacattttatcccctttactcttttttttcgataatggaagctttattaaaactcagtcaaatacaccaaggtgatacatttcaactgagcacactcctggcctctgcaaaagatgcacacatccacacacaaagaaagacctatctagacccccttcacgaaacagagatattagtggctatcaatccgtacactagatcgccaaccatgctcctgggtaaaaaaactcccgtgacacctagtccaaacgtcgcgataccaccacaatagtatcccgaaggcccggttctttttatcccctttactctatctgcacagagttatttttaatcaaatttactgttaaccacatatcctttcactgttgtggataattttatttggagtaaagtccataaccggttgctaaacttgtaccgctgtgtcatcccagtccctaaactcgcaaatcgaccgttcaggtcctcaaacttgtttgactgtgtcatcccggtccctaaacttgcagatcactcgtttaggtcctccaacttgttcagttgtatcaccccggtccctaaacaggacggtctaaaaactttatatcaaaaagtaattcataactttttcatgtgaactctgaggaatccagacaaaatattcaattgtttgctgtggtcaccaactaaacacaaacatgcatatatttgctaaagaaattatgcacccattccaaaaagtttaaatacgccggttagaccaagttgattaagaagttgaaaagacaaagtacaaaaccttggttgggccaagtaacatgtgcttaaaactctcatttacctgtggaaaaaattatcagagttcctataattcactttgattaaatgacaaacaaaccttctgtgttcttcaatcagatttcagagggaaaaatattactgggataggatagaatctctgcttgcttgctttaatacaaacaggggttgatctcactagagatataatatcggcgcaagtgccccaattggcaaggaccggttgaaattgatacttatgacgattgccatttattgtgtaataaaaacttcccaaaccggttggtctgagttattaattccctcagacatagtcgtatttt

SEQ ID NO: 1944 - DNA, 7476 bp, Oryza sativa
  unsure (1)..(7476): unsure at all n locations
cgggtttaatacaacacgaagagggaaattgcccccccgaaaaataaccccggtggcccagaaaggttgccagcagacagcgcctcaaacaggtattacagccaagtctcgaattacaacagtaaagggacccaaaatatgtgcacatgccttataaaaaatggaccctaaatctaaacatgacaatgtggcaccaaaaatcccttaaattaaaaaaaaataactaccaagttttatatagcgtcgagggctacaaattagaaataaagtttgtcttcattagagttcacatgaaaaagttatgaattattctgaaaaagttatgaattatttttaaatataaagtctttagaccgtcctatttgatccagatgatattcaaatccaagtttagagactggggtgacacaactgaacaagttggaggacctaaacgagtgatctgcaagtttagggaccgggatgacacaattgaacaagtttgaggacctgaacggtcgatttgcgaatttagggaccgcaatgacacagcggtacaagtttagggaccggtgatggactttactcttttatttgtctaaatgggctcatgcttataattagtgctaacctgtcccatggctactgaattttggttagtttgctgttatcatttgtgcaatagcacttactattatggctaactgaatgttctaatgtttagttctcaaagtaacataatgtgagcccttctctatgtttatatctactttttttttaatttatcatagtttataatcgatatttgtggtaacatgctctgtgtacctttcaggccttacatatctggtctacccaggagccgttcacacacgttttgagcattcattaggtgtctattggctagctggggaggctatgaacaatcttcgactgtaccaggttcttacctttgataaaaaagtccaccgatatatttccatgtagcagtttaattattttgtatgaaactaagttttgtttttcttttgacagggagaagagcttggcattgaccgtgttgatatgcaaactgtaaaacttgcaggtctgtttactgaatcataactctgccaaggtttccatattgacaatccttgtgttattctgtttaggccttttgcatgacattggacatggccccttcagtcatttgtttgaacatgagtttcttcctcgtgttgttcctggatcaacctggtgattttcctttcatatatgtggttatgttgtttctaatttgttagttgttttacatatattttccatgtccttagtatgagaagattcaaaatttaaagcaatacatatttatgtcatggcggattacaccacttaaaagactctggtcctatgattattatactagcattacaacttctattttcttcctatccaaactatgaattttagtgtgtatctatgtggatatgatgacatagggtgataatttctcatatttcttcacttccacatgcacgttagcctgttgaaacattgtgagactgcagttggtttcttaattaaactggtccattttgtctattcaggacccatgaaaatatgtctgcactgttgctggacagcattgtcgacaaacaccaaatagacattgaagctgatcatctcaaaattgttatggtaatccacgtttttattcagttattgtggcatttatcaattgccatcagattaacccatctccttctgtcactaagaagaatggctcttagaacctcttatttaatgttttaaaatctatgaatttgacctttccactcttttttcttgtcagccttaagtattcacttcaaaatgtgtgctgttctaagttgacaaagtgtaaccctacatcttgacaagcctctctctctcttttttttttttgcaggaaatgattgttgccagctctaagttcactgcaacagaagtatgtaccttagtctgtattactgccttagttatctgtcagttgaaaatagatgtactaaaattcgatgcaatgaaacttgtttcttcacagagcacaaaggagaagcgctttctttatgacattgttgctaatggtcggaatggtatcgatgttgacaagtatggtccttctatacttctaacttctgatattttctgcattgacatttgtttttcaatcatttggatatgccataagatagagtaaccatgcaggtttgactacattggccgtgattgcagagcatgtggtctgggttgtaatttccagtactggaggtaccttttgttatcatgttttaagtttttttttactaaaccaatctgttaaatttgagagtaggaatacaagaattaaccaagtgttttacatcatattataggaaaataagacatgactgaggaaataataaatcagacaaactgtctgtaaagttttatttacaataaatgctaatgtgatagtcgtcaattcaacggtacttgccaattggcgcaccttggccgatattaaactctagtgagatcaaccctgcttgtattaaaacagacaagaaagattctatactattacagttatatttttccctctgatatctgattgaagaacacagaaagtttgtctgtcatttaatcaaagtgaaatataggtactctgataattttttccacaggtaaatgagagttttaagcacatgttagctggctcagacaaggctttgtactttgtcttttcatactctttatcaacttggtctaatcggcgtattttaaccttttggaatggttgcataatttcctttgcaaaaatatgcatgtttgtgatttgttgctgaccgcagcaaattactgcatattttgtcttgataacccatttgatatattttgacatgtactggcacagttactaacttgctatcatgctgttgtggttcttacctttttgcactgcaggctcttacaaggcatgcgagtcatgggtgatgaaatatgctaccctgccaaagattgtaggtctattattatcttctttttttgtgctatttgttccttttctttttgatatcatgtgacacttgacttgttaacttttcattttgaactacagatttgagcatccataaattgtttacgacacgtgctgatcttcaccgcactgtctatacacatgcgaaagtcaaggtaaggataattatattatgctggccacttttgtgcagcaaagaaccacactgtcctgtccattgccttctaatatattgttatgtaccttaggctgttgaactgatgcttgtggatgcacttgttgaggctaacgaatacttgggaatagctttgcatgcacaagatccagcggacttctggaaggtttggtatcattgcaatttttattatgtatgtagttttattagttgccttcttacttcaaacatctctggaaatttcagttagatgacacgatcattaaaagcattgaaactgctcccaacgatgaactgaacaaagcaaaagggatcattcaacgtattcgccgaagagagctctataaggtagtactactttcggtcatgaatttactatgttcttttatcatatcattttacatgtttatcagagctattgtggcttaaaatatgtgtctgacatcttgtacttggatagctaaatcttccttttgtggtagtatgaaacaactttgttttctttcaacttgcagttctgcaatgaatattctgttccaaaggacaagctggagcactttaagaatataaccgcacaagacatagtttgttcacaggttcatgcctactttgatcctctgaagatctgattttttttcctgaagaatattagttgtatgtttatgattttacccatcttcagaaatcttccaaggtgctgctgaaggaagaagatgttgctgttagcaatgttaagattgatttgacccgtggaaaagataatccccttgaaaggtttttgatttataaacccacttttcagactcttatatttcttagggcgacatatcagattctgacctgttacttttgttggtctgcatatctactatccccagcatcaagttctttaaggtaactatacctgccttgacagtggaatgtcctcataattctcatgtggtctaaagtaggaattcttgttgagccaggattttggttgcgatgagaagttccccatcacagatgagcgggtcagccacctgctacctgcgtacaaccaggacagaattgtccgggtctacgccaagaagcacgagctggtgagtgacaaaacattctggcagagccgctttaccatggatgtattatcttgcagttgcataatgtgttgagtgaaatattgggtgcaggttgaagcggtgtcagaagccttcgagaacctacaactgaggatgtatggtgagaagacacaagttcatgacactcccaggaagaagcgcattagattccactaatcttcagcaactccttgttgccaagtactgtcatcagtgttagttagtagtagctcgtagcatactagtacgacaaaggagaaaggatcataggtagacatacggaaggaaggaaggaaccttttattactgagcgggagcatccaatactactaattacgggttttgtttttgctggtaatctgcacgcataagtaacgcgcagattagttgtacaggtgataggccacagaaaatgtcttgggcagtggtggtgtcacatgacggctggctaccatagcagatagtagtagctgatacgccagtatcgtgatcttctgattttttttttactctgagcctgggctgtctgggactgatggcgttgctcctgctttgctagtgaatggatatataattatattatatatatatatatattggcaaacaacgtttgttatgcttactattctctcattttgtaatgtgtattagtcatctcacgagccgcgagtaaaatggcatgtgaatggattttaaatattcgtccgtgtgcattttgatgcagcagaacgaaatgctgctgtgtaaaaatgcgagtactaataatgtcggagttgttagcgtaatataggggtcaaaatgcggtgaattttaggctgtgtttagattggaatgttggaattgttaagtgtaaagttttggtatatcatatcggatattatataaggtgtcgcatagggtattcgggcactaataaaaaaaatctgttagtaaattgcgagataaatttattaagtctaattaatccatcgctagcaaatgtttattgtaacaccatattattaaaagattcatcttgtaaattagttgtaatatgtataattagttttttttaagtctatatttaatactcccttcgtcccaaaatgtttgccgtcgttgacttttaattatgtttgaccgttcgtcttattcaaaaattttaagtattttttaattctttttctatcatttgattcattgttaaatatacttttatgtatacatatagttttatatatttcataaaaatttttgaataagacgaacagtcaaacgtgttttaaaaagtcaacggtgtcaaacattttaggacagagggagtactttatgaaggggtttgaacgtacgatgtgatgtgaaaagtttgaaagaaaaaggctgatctttcaaaggtttgaacatcgagcacatttttctcctatgcccttttgctgaatgtatttgggatagcatcaagcaacattttgatttgaagctatgcaggactgatctgtcaaatatgaagcagtgggattttgatttcctggggagaagttcaagcatccaaaagacggcgctggctgtcacgttgtggcatatatgggaggctagaaatcactccaggaataatcctaccttagctaatccaagacaggtcatccagaaaatcttggcttatgtggagatgattgaacaacactgttgccgtgctgcgcaggcggttaggctggatttttcacattttgatccttttaaaaaacttatttcgcaaatagacccctgaaaaaacttatcccagaaatggtcctttttggggcgccagagtggctggcgccgtcatccaacgggagtcctcctaccaccgtggcgcacgcgaaccgacgtggcaggaggagggcgccatccatgctggcgccgccccagggaggagggcgccagcatggctagcgccgccgcctccattcctgtttctctgtatggagttgcaacggtgtcatttttattttattttttcggatgttttttcacactcaggatcacgatacaaccaaccacaaaaaaaatttaaactcgaactaccacttagctaagtctgaaaatatctagcataccacttagtctactttgcacattcactaaaattagaccataactcctttagtaaaaccctttgatcagcatgttaaacataatgcactctaccactatataaattacttaatctaattcaaaatataaccacatgaaatgacatatataagttaaacagtacatagagatgtaatttttttatttttatttcatttttttgatatttttttcacacttaggagaacataggaaccaaccgtataaaaaataaactcaaacggacaaaatatgtgacatgtagaattttccaaaactctaccgaaacggaaaaaaatatgccatctattaaaataggcgtaactttctcatacggactcggaatcaggcaaataatatatgaacggacatctacagaaaaagttctgtagattaaaacctctaaattctgcttgcaagattgtgttttcgaggagagaagtttttcggtggagctttggaaaattccaaatgtcacatatttcgtccgtttgagtttattttttacgtggttggttcctgtgagttcccaagtgtgaaaaaaatatcaaaaaaataaaataaaaataaaaaagttgcacatctctctcctctgcactagttcggagagaggagaggagaggaaaaattctacatgtcacatgttacgtccatttgagttcaatttttctatggttggttcttgtgtgtccctaagcgtgaaaaaaatatcaaacaaataaaacaaaaataaaaaatttcgggggggaggggggcgccagccactctggcgcactccccctagccacctcaacatcgccccaccacgtcngcggtgggaccgggctcnnatagntatancacattttttcctacccggcgctagagcccgctatttgtttgagtatccaatttcaaaccatcgatttcttttttacggctccctaaccgttccctatgtttcgtttcaaaacaccccatctcttgacttctccccgtatatgttttcctttgtgaaaccttccgtttgagccaaatcatggctggtgcccacacccttgtcctaaataaatttcggatgcttcccgcttttggtttctttaacacaacactcctcg

SEQ ID NO: 1945 - DNA, 2728 bp, Oryza sativa
accacaagccagcgtgggcaacggctttacctttcgtatagcatggttcattgcggggcaccagactgagaagtggcggagatagcccacgggggtcgctggggagtccatgccttatttataagggggtgattatgatccaggaatggtgcactgcggtggattgtgttatgcaaggggtaatgtcacagcccctttccgaggtaccgtggtggtactgaggcacatggtgacatgatgtggggctgtgtcttgtgggtacagtggtacacctctggccagagtaaaactattcgaatagccgtgcccacggttatgggcgggttgagcaatgtttttcgtgattagtcccacacttctcacaataattatggatgttatatctggtaataatttgcttagctcctggattggagattagatctgtacagccgggtatggttgtttcagaatggttgggcctgagcagcatgggcgtgttgttcagtgttgattaaaatttctgattaattactccactgttttacttctcttaaatgttttgctaaatgctgcttttgcaaatgagcctatattatgccaacctttggtatctttgcgcacttgcatatttgctgtgtggcttgctgagtatgtcatatgctcaccttgcaataatcaatcaacctcagttgaagaaaaaggatccagaaggagaagacgtttggcttataccccagttgagctgcctgtgggagtggagccggagcttcgctagatttttttttttccgctgcagttttcttcatggtgaggactaagtgcctctttagtaagtatttatcgttttagatattttgatgaatctgtatattaaattgttagtttgtgtacctcggctgattcctggacgaggattttatgcacaaataagttcggaaattactagtgaattttcgggcgtgacaacttacgccatggagtaatcttaacaaaagataatctgattaaaaggaattggagaggaaacaagtctagttctttctgccacaaagatgaaactattaatcatttgttctttgattgttattttgcccgcgcggtttggtctttaattcagtttgcttcgaatattagttttatctaatagtacaactcatatgtttgggcattggataagaagacaatcacgcaatttgagatctttggtcttattaggtgcaactaccactatttggtctatttggcttttcagaaataatgtggtttttgaaaggaaaaaacatatcttctcctttgcaggttatctttttgattacacattggctccgctcataggctatgcttcagaaggtcaatttgcagggtactatcattgcggtttgtcaacaattagagttagtggccatatagtagttttctaccccagcacatgggtgacgttctaggctacggttagcgggctcctaaagttctttttgtttctgctattttggatgatgagtttatcttttgtttctttcttgttggctgtgtgtactctttggtgcagaagccgaatgtgctctcagaataattgtatcacttgatgaaatttactgagattaataaagcttccattatgtaaaaaactggttctgaataggctaaaaaaaacaccattccacaatgctttgctgaaagggaacaagttaataaggtcaaagaattctcctactaatgaccatgaaactgtgttaccagaaccataaacaattacagttgctctcatctaaatctaatactgcttaatcaaaactgtaacataacatatgatgaaatagagacaaacgaggttagctccacaatcatttgggtgttgctccttaatcaaaactgtaattctcttgaaaaaaacaagctatgtgtggcaaatggtttggtcatcactcccaataaagcaacgtacagaacatccacgatctaattactgcaaagttactgcaaagtttccataatgccaaggttaggcttgttgcgcacagtaagaaaagatggcgattgtccaacatgttctagcaatttcttgttttttcccatcggatttgattttttatcattgttcaaatgactttagaatgtgtatctgcacttcattgttcaaaagagagtagtggtggctcgctagatgatcaacagtaacaacgaacaggtaaaaaagagtttaaatatgaacaactgcagatgaaagagtaaaaaacaaaggagttgggacatcacgtcttaccttgggtgatcagatgtagaatacttgtaaatcttggtttgattcttctaatctcttgagttgatccttcaggtcgacgctgcaacgcattgctagtagttttttcagtgaagctgggatgccctcctcgggcaacgatctgatttcaggacatccgacgatgcctaatgtgcagatagaagaaaggagatgcaacccttcgggaagggactgcagacggtggcactcatagaattctagatttcggagggaggtgaggagctgaagtgcctgctcctgctcttttgtgaaatttttcatccacaaatcataagtgaacctcaacctgtagagggtggaagcgaggaggctgcaaatgggggcaacaaacaccgctgagatgctgtccacctcaagcttcttaagctgttggaatgaaccaacaggtattgccttcgtcgttgacaccgctgcgaacaaatgtgctgctacggagcagcgatg

SEQ ID NO: 1946 - DNA, 1069 bp, Oryza sativa
tttcacacaaatatcatcacataaccaactaggaccagtggaaccaccatgatttcttattccaaatgctctaagattagaaggtggctgaagaccttcaataatctcagatccactattctgctgctctgcaccccaaactagttctagtgtctttagattccttttcaacatcaattcagcaccatttgcttcttccgttgttgctatattttcaagattatttatttgtagtgctcctccaagctctttcaaataccccaattctctaagttcaaacccagtgcgctctttcttaacatggaattcttgcagcctccgtaaatacttcatctttccaatcccacgaatattggaacaaagttcttttttggcaaggaaataatgtaaattggctagacgattaatgtcgtcaggcaaaatataattaccatggcctaggtccaaaaacttcatgtgataaaatctacatattgtggctggcaaagacatttctaagttatgaggtacttcaagctttaggtatcgaaggtgaatcagttttgaaaagttgaaagggaaagatttgatagagtttacaaacataaatagaacacgaaggcattttgttttttttgaatatatttttgaaaaatatagccatattgtcattgtatcgtccaaaaaacatcaaagtccgtaaattttctatgtctatttttctcttcaaattttccatttctctctcaaaactttggccatatttatgatgtacagtgatagatatatgtcgaatagattgtgggatgttatcagatctaaaactttgtggacttatatttagagaacttttacggtacattctactgtaagtatatacttgcagtatatagaaaggtaagtttggtatttgtgaaaaatatagaaagggctgtttagtaatttgaatttgagatttatttgcacccggagttaattctcggacgggttgtttagttggtattagttctggatctcgtagtacgttctgctagagcagcagcgcttctttgggaatacattgtgcgtggcggcgaaccgattgtcgacg

SEQ ID NO: 1947 - DNA, 1409 bp, Oryza sativa
tcaattgaagcttgttcgcaatatgagggtgcagagcgacgtgtggtttgcggactacctccttcgagttgggaatggcaccgaggaggtgaaacggatatttgcatgtcgtgcaaagagaatgaaacggacctcgaaaggctcatcgatactgtgttccccaacctaaacgataatcttacgaacccaaactacatcacatgtaggaccataatgtccacccggaatgagttcgtggatcgaattaacatgaaaatgattgggcggtttagaggagaggtggtgacatatcatagctttgatcgaccagaggatgacccttataactattacccgcctgaattcttgaactctctaactctaaatgggctacctccgcatgtgcttaagctgaagattaactgccccatcatgctattgaggaacattgacccagccaacggactttgcaatgggacaaggctggtggttcgtgagttcggaagaaatgctattgacgtagagattgtggtagggcagcatgctggtaagagagttttccttcctcggatacctcaatgtccttcggatgatgagatgttcccctttcgcttcaagaggaagcaatttctggttagattgagctttgcattgaccatcaataaggcgcagggacaaacaattccaaatgcaggcgtctatttaccagagtctgtcttctctcatggtcaactatacgtcacgttgtctagagcaacctctagaacaaacataaaaatactatcgatgccggtagaagacaagaaacaaaagaaaaagtctaagcgtactggcgtgaaggacaatgagaagaaaggaaagaaattgtctaaacagacagcagcatacacaaaaaatattgtgtatagagaggtcctcacagattagaaaaggtatattatgtgactattaaccatccataatatgcttgcttaaattccattctttctgtaatttttatattccaagtctaacatttcgtgtgtttttttcttggacagcagtaaacattactttcggtgggattttggcacggactatatgcaccattacgggtattgtgatactactttttttctggatgatattgatctggagcccttgcctcgcctgtaatccatctcctagggtggtcagcaaggaagagcaaaagagggtgcagtggccaagtgtagcagctttgctgctctcccctgctgtcgaccatccatctataccaggccactattagattcacatggacaaaaaaaaataggcaaattttgctacaggacatcgcgacttcgtgggtttagctgtaggacactgcacaaagtcacttttggggaaagacactctcaaaatgtggttatttgccaggggacaccgcaaccaataaaatattaatttct

SEQ ID NO: 1948 - DNA, 866 bp, Oryza sativa
ttatatttcacatctttggtgaatataatgatcttggaatatattttgtgcatagagtttacatctgctcggatttagaacctcctgtacatgtggataaaatatgcaagctagagaaaaatgttattgctaaccaaattgtctcgagtttgcctagttttgattggaagaaacaggttgttgtaaatggactacgcaaagagcaccatatggaaaaaccgaggacggttttccgtgaagaaggggaggatgatgtgaccatggctaccacggatgcaaccattgctcacatcatggatgaacaagaagatatcgagatcaagtactccaagtgctggaatccgattcggccacctactacactgctgatttcaaacggccaccgaatctgcatacgacctccgttttcggcccgggagtacttgatggaaagctctcggagccctctttctaacggatccagcctcttctctgaattctatctcgtgtggccagaatcacaggaacaaggtgttgcatcacctataatgggcctatgggcttgtaacttcatttgggaacccggcccaggtggggcccatgtggggtgcgccccaagctggtggagcacgacctaggcacccctaggtcgtcctcccacccctatatatagctagttaccccttcagggtttctcgggttttgttagattaaagtttagccattgctacttgcttgcagcgcgcgtgtcggctagaccgtccgtctgcttgttcttcggaaccccaacttatcatttgtattaaattcctatttgccatatcagattgcttttatcttgttcttgcttgtttcttcgatttgcttgcaggaatagggttgatctg

SEQ ID NO: 1949 - DNA, 1034 bp, Oryza sativa
aaaaggaaaaaaaaagaaggaagaaagaagaaagaaagaaaagaggaaatactattatgtttgagctaaacttcatatatcagagttgtgcatgagttgttcctagtgctatcttggggtattgtttgtgtctaggctcgcgtctctagtacgttctagcctaagaccagcacggtcttgactttgaacaattattcaactttgcattatctgatttgagcattggctattcctttgctacatattaaagcctacccagagctccacatatttgattacagccgtaccgcaagtgtttgccaaagcatcgatacatccaaccttcattggggtgcttggttgagtcggtgtatgtcaccattccacttgcattggtaagatcttgtaagagcttggttaaaagcttgagtgtgtgcgatttttgagctgccactacctagtagttaataggaacgcgcatatttttgtgtatgtttcttgttttctactaacaatggcagggatatgcaagataattggggatagctgtgctcaacatcgacatcttcgtcgagacacgaggagggatcaacatgaccattataaggtaagtgatgatgttctaggtaagatcaaatctgcactgccttatttcgagggaaactatgatcctcgtgcttacattaattgggagctagcggttgatagtgaatttcaaaagcatgtcttgtcggagaaacaaaaggttatgtgtgcctctagtgttttaattaaacatgcttctaatgattggaaacatctttgtaggcataacaaaataccacaatcttggaaagacctgaaacgatatttcagagatatttatgttcccatgtattatgctgacattttgttcaacaaactgcaatgtttaaaacaagataccagagctgttacttcatactatcatgatatgcaagcttgtttattacgtgtggtttagatgaatgcgaagaagctaaagaattgaggtttttatgtgggcttaacaaagaaattcaggacatgcttgattg

SEQ ID NO: 1950 - DNA, 737 bp, Oryza sativa
  unsure (1)..(737): unsure at all n locations
gtttaatgcacattcagcttagaaattctggttcatgaatttctaggcgagacatcctagcttcctccacgcccggaatccccgcctcatcccctctcgcaggcgatcgatcctccaccctcccgtacgcggtaggcctcccgcctccgccaatcaacgccgtcgtcctctcccgtctcgccgatgggatattgacccggcaccaacgtctttctcgctttcgtctccccgcgccgacgagagtggcgtcccgaccgtattcccactttctcagttccccacgagaaaatggacatttcgccatgttcaaaacgcggtttcgctagaatgccatcccgaagacgtgattcgataaactgccaatatgaagcgtgcgtctaccgccactttgccattttcgctattttattcattttcgaaaagattttctctcctctactaggtgttgagacaaaatttccccttatcaactcagagaacacggtgagagaggagacagaaaaggggcgccgacgccgctgctgccggccggcgccgcctctccgcatcatgcgcggcaacatcgtgtgcgtccgccgcggcggcctttgcatgctctgcccggcggcggagcgggtgaccgacgaagagatgatgaggggcaccaacgccgcgccgncgncggtgcccggaacgggatcgatcatcgacgaggccctctgcctgatgaagctccgcgagaacgtcgtcgactcgat

SEQ ID NO: 1951 - DNA, 13748 bp, Oryza sativa
gcaatttgtttcactgccctctctgctctttttactagaggcacaataggtgttataaatactcttcaaattaaagaaacaaatacatccaaaaaaatggtgcaacagtttcctcattaaaaataaggacaatttagtgcaaactgcaaaggttagttcacttcagccaatttattaactttagtattgatgccaaacaaagattgctaaccgaatagcagtatatgctgtatgcctacaaaaaatatatacatgctaacatagttgttggacttacattttgcgataaatttgtcatcccattcatcataagcagctttgtccatgttgccatcctcatctccctcgctgtcatcagtttcattctcagaaataccctttttttaaataaaaaaaaatgttaaacagtgccaacagatagaaaacaaactgattatagttagttaactacataatcaaaagaggctgctaactaaagagaagaccacaaataaatctctggtgatcatggtccttagagtgaagtatattttatactacagtaacagctcaagtgtagtgaacaaccctcaactatctaaaccagttaacatatcccatgtaagataaaaaaaactggattaagtggtggtttcatggttttgacatcccgtaaatatactttttgactaatatggcaactattttttacattttctattaattgggtgcaatattatagagaacttatattaaagaaaaggttaaaatggggctggatttcccttgggggtattttaaccggttatgttggttgtgcttgagggttgattttggaccaagatcataatgcctgctattgctatagtggtattcagtaatatcaagattgggaaatgtacccgcaccccggaccccggtacaggcataatggactagagtaaaaaggcagtagtagagaaataactgatcgtcatgtgtatatatacgaggcgattacccgaaagagaaaggaagggagcatagaatagaaattacctcgagatcgaagacggggtgttccaggtcatcctcagactccatatctgaaatccatccatccattcagtaaaaagattcaagtaaaaaggaagaaaaaatgacggctggtacatgaaaaggaagaggggcggaccgtggtcgtggagggggatcatgtcgcggtgcttgtggactggaaatacccacccacccacccaacacagatggataaagcgtgagatgctggaggtgaaagaggaaagaggagagagagggggtcaggtcaacgttgtcttacaggcgtcgatctcgtcgtcgtcggaggcggaggcggccatcaccggcggcttcacggtcgggggcctcttccacttccccttccccttctccttccccatgcgagcagaagcagagcggatgaggcggcggcgttgttgttgatttgtggggttttagggttttggagatgttgcggcggtgcaggagaggaggcggggcaacacccacatgggcttttctgcctcctcctattgggcttcacaggagaccactggcctggcccagtacgtgattatttctctctctttccatttttttatggaaaaagtgcacccaaggtccctcaacttgtcatcgaattacaaaatcgtcacccaaccacaaaaccggatatccggcgtcccccaactaaccaaaatcggtcataatagatccctcggcggttttaaccccggttttgtcctatgtggcgggtgactcaacgtgggacccacgtgggccccacatgtcaggctgccacatcagcacacgaaccttcttgtgcttggcgttgagctccttagagacggaggccttctcgttcctggctgcgctgcgcgccccccgaaatccctcgaccccaaatggaaactcctcccgaatccgaaggcaaaccaggcgccagaccaggattcaccgtctcggtgcccttcccccctctcctcctccctgatctcgccgcgtcaaggggaagagagagagatgggcagcgaggagaggggagggatctgtgcgtgcgtgtcctccccggcttgaccttcctcccctcctcccccgatttcctttcctttaccttctatattttttcaattataaaaaaaatacctgtgcgttgcaataggtgaaggctattttaatcttattattattgttatacggtttaactaagttgaaattaactctgggaatttgattggatatttttttttagaaaatcatgagatgtaattaggagtttgcatgcgagttttttcaaagagatttcttatatgactccttatgtatttctaaaagcaaacaaacttaaaatccgacttaaacatggatctgtatttctaaaagcgaacagactttaaaaaccgactcaaacacggatgacatatcaaaataatagcaaaaacatctttaatttttataatagtaaagatatatctctgttccaatatgtaggatgggtctgagtctaatcccatcttagtttactaaattttggaacgaagagagtatgtggttttctttttgtctccatcagcgaagtaaaagactaaaaccaattaaataaacgaatttgttaaatgtcattcgacataaatctaaggatgatatctatagattttggaccattatctcctttgactcctgtgagcttcccctcttctccagcactggcaacacccctaattccgacaagggacatacacaagttcatatgaggtcccttaacttgtaaatgaatctgattttcgtccctcaaccagaaaaccaaacacaacgggtcccttaactattaaaaccagtgcagattagatcctcggcggttttgaaggtggttttggctgatgtggcgtctacgtggctaatttgactcggtcttcatctgacgtggcattgacgtggcgcttacgtggcaattcgatcttggaaaaataataaaacctgtgggacccacatgtctcagtttcacccacaaattaataaaaaatagtggggcctacatgggccccacatgtcttcatcttctcttccgcatgcgagcgaggcgggcggtgacctcagtgacgcgccgcctcactccacctctgagccgccgccttcctttcccctcccccgccctcgccgccgctggcgtgtggcgccagacgagacgactgttggatcccgcgtgcaccttgctgccgccgacggcgagctcgacgtaccacatgttgagcgccatctgccagaggacgaaacgaagcctccctgctcgacggaggcggcgtcgcggccgctgggcccacggttgcagcagctggtagccgcccgacgccgccatgtactgctgcagaatatactgtgccgacgccgactcttgtatttttcacagtgagtgagtaccagatgcacagccatgaatcaaccacatcgatctcctagaagcgaagcaccaaacaagcaggtgaagcaagaaatgtgccgtacaatgagggtccccttgatagagaggagaggcaggggatctgctagcttcaaagggatgggggccagcggcgtgcccatgacgcgggggaggaggtggagttcgaagcagcggaacgagtcgctcgaagcctcgaacccccgggaccggcggtggctcggaggtggagtgcggcggtggcgcgcgagatcagcgcctcgccgaggtggccgcccgctgccagcctcgctcgcatgcgggaagagaagatgaagagaggggagaggaagagaagagaggggacatggagagagagagaggaggaagaagaggggtgagttggactgacatgtggggctcacgtgggtcctactattttctgagtgagactgacaggtgggtcccacggggttttattatttttccggatcgaattgccacataagcaccacgtcaatgccacgtcagatgaagaccgagtcaaagtagccacgtaggcgccacatcagccaaaaccgccgaggtacctaatttgtaccggttttgatagttgagggacccgaggtgtctggttttccggttgagggacaaaaatcagattcgttgacaagttaagggacctcatatgaacttattccgagtggttataggagggggaagagggtgtttccccaacacttagagagatggtcggtggacataggcaggcagcgatgtgctggagccacgaggttggcaacgatggtggcccaacgttggcatcgtagggcaaatgatgaaactggttaagacgtggtggtggatcccaacaacagggagccgccagagactgggaggacgacgaggtaaaggcactcgtagccatcaccttgggaagagaatgggaaaggaaaaatggagggggccttgtcggcattgttttaccacttacgggtaaccgacgaggccaagcatggaagagttgcgtgtgcaagcacgtgaaagtagtgtgcggttaggtggacttatgagggaaggagaaaaactagggtttaagtatgttgcacaaatttcaaagtgatccaatggtccaaaatttaggagttatttttatgtcaaaagctacatagacaatcccttaaaaagtcatttataggtacaacttgtttatccgtattattaagggtctaatggctaatgctgagaatagaataggacaaaacaaaacaaaaaaaacatatcatatttcaaattttagaaatgggaaaaaacattatgctaaggatccgtttggtattgagtttaggagtgtcaatttgctcgttttcagttaccatgtttcaggaaccgcaaaaggtgtgttttttcaagaactttttttatacaagttttctttaaaaaatgaaatataactgttttaaagttagcaacaattaatggttttaaaattcatatttaatctaaaataagaagaaaatggtcatccaaatgatttatgaagctaacattatccaactgcataaaaacttgaataagggtggtgtgtactgcgaaatttgaaaactaaatattatatggcacaacttaaaatatatatagttttatacgatttcgacaaaaatcctactatttgctaaagaaaatttgtttgtgggccttgttcacgtcgcttaggctgggttccttcatttttgcttcccaacacgaagagtgcacacggaaacggaacaggcaattggcacgtgattaattaagtattagctatttttttttcaaaaattaatcaaatatgattttttaagcaactttcatatataatatttttataaaacacacaccatttagcagtttgaaagtgtacgtacggaaaacgagaggggagagttgggaatcggctggaacgaatgcagccttattgttgtgttagccacactcgcaaaaaattaaaaaaaaatgaaatttaattttagaagttttgtttatcgcaatttattttactaaaatggctttcaaacggcaaacaacaaaatactactccctccatcccaaaatataagcatttttagcatagtaacatgtcaaacatttttaactttagccattaatagcaaaataaaaaggtcaatcatgtaaacaaattatcataatatacaactcttttatttaaaatatcttatttttataaatattagtgatcaaaatagtatctcagagaccattgccaggatctataaatggttatattttaggacggagatagtatatagtaataaaatattttattttgggctgaatcgttttttttgttggtgtgctttgaatgcacaaggcatgtcccggtggtgctcgcagttgcagttgcttcgctttggttctcccaaaaaattgagcaccacaaataggggtgcgctcggctcgtggtcggctcgttgagaaaagctaacgagctgagccaagggtttagctcgagctggctcgcaagctgctcacgaggccaacgagccagagaaacaccaggaccaggagtccactccgagccgggctacctaaccagaaaagcccattagtggcccaatagcctatttccttgagtaaacaaaccctagaatccctaattcacagagaagaggcacgcagacagtaaggaacacaggcgccgcggccacaacccacacgcgaaccggcgaacacgagcgagagtgcgagagcgagacgcatcctgccaccaccggcgaccaaggcccgcagcgagccggtcgcacggtggcacctcgcgtcctcggcccctcctcctcgccatccgcccatccctcgtcggtcgcggcctccccgaacgagctggctccgagccgagccagctcggtacactaacgagctggagcgagccgagccgagccaagatatccacccctagtgtggccacaaacaacaagagagagcagacaccaccacaccatccaaccaaccaaattcctctctcctccgccgcgcccgcgccgcagcaagcaggagggcctccgcccgtgcgatgccggcggcggctaggctacgggcggcccggtgatggcgaccttcttccgcagcgccaacctcgcctccagggtcttcgaccgccagttcctctccccacgccccggcgctactgtacgcccaccgccccccattcctttctctttctacggactatatattgactagtattcctttcttatttgctgccttcctttcttattgagtatatgcctgacctacctacccacatagaatttcccttttctcgcttcaacaattgtcaattcactattatcatcgtcacacgtctcgactactagttcgcatcgcgcactgtctattcaattatactagcagatttcatcatcttcttttttccccctcttgttgacaggttaacactgttagacagttctatgagaacttggttccgagttacactatatgtgacatagattgcccagattattcatttcgtaaattcactgatgatggcaactatcttgtggcttttagccggaaccaccaagatttaatcgtgtaccgtcccatctggccaacattttcatgcaatgagccatgcgactctcatgatcttccacccaaagcaaagaaattcgacagcttctttaagcagctctactcaatttcacttgcatctagcaatgaatacatctgcaaggactttttcctttacatggagtgccatcagtttggcttatttgccacatcaactgcacaaagcaacgattcaagtgccactgagggtgctattcatggggtaccatcaattgagaaaattactttctatcttgtcaggtacaatcatcttgtttcgctaggaatgcacttttagttgtccgttatgatgtctatgtattataaccatcctttcctttcgtttgaatggttctcgacttctatatttctcttgttcaggctagacgatggcgcaatactagatgagaaagctttccgcaatgattttatcaatctggctcatagtattggagcttacttgtatgaggacctgctatgcattgtctctcttcgatatcaaacaattcatgtcctacagatacgagattcaggcaaccttgttgaagtacgcaaaattggtgcattttgccaggaagatgatgagctatttctccattcacatggtcaggtacctactgatccctacggcaagattgctggatctatatttagtttacatcatagttggtactggtcatgtattacctgtctaatcaaattggtgttgattgcactggaaccatgggcattcatagttcaaataatagtaactagaaagaagcacgcgctacgctgcgtgtgatctaacaattactgtttgcacttaaaacaaaaatcatctttcaccatacttcgtacttttctttgctctgccatccaagcatgctctgtaatatgatcaaattgtaaataaaaaaactaaattgcatcattaaggtaaaatatggtataaatttatcttgcttcccccaaaagatagatatcaccgtaacatctgaacttaacatgttcaccaatcctcgataatgcaaagggtaaagaatagaagatatctttgcattgatccaattcaagattattcaaaattgacttcagagtcaggataacacattagttacactgaccagatataatctgatatttgagatttatttgattgaggaatttttttcataaaaaagaattagtagctatggccagtaaagatccaaccaccagcttgcaggtgcttgagatgtactgcacgcttgctgatccctatcaccatctacaatgataataataagagcaatccatgagaattggtctagacagtttttacaatagaaggtaaatatgcccacaaaatatatagagaagttggtaagggaagcatgactaactcaaaaaactaaaatatgtatggctgtgaagtagggagaaatggtgtttccatacgacttaactaaaatgcctcatttgtatcacaaagaactaaactgcattgtaataattaacctagtgaaaacttaatatgtggtagaaaaataacagatcatgtagttagtgaaatatggctatcgttccatattgagaaggaaattattgctcaggtaagtggtcatgcaatccaagatataccatataagcctctatcatcttagtgtgcttggttcttcaactgatagcttcgttcattattttttttcatgagctgaggacaatgggttgcccctctcaacaaaagtaggagttttgttttgcaagaaggatctgtcaccttgcttgtctcaagataaagaacaactaagacataaatataaatcatggatgctgtatacaaaagaacaattttcatgaactcctatccaaaaagtaagtacacttgctataacaataggatattttgtaaagaaataggaagaacatggagccgatggcaactatattagtggtacatgcgctcatgtgtaatcaaggaaaactaatgtatatagacaacccatcatagaatgaagaagcgcatctagaatttctcataggatctctttaaaaaaaatcaaaactgaaaacacgttgcagaacctttcatgtgggtctgaacttatcccacaatcatttatgaatattcttcatttgtatcttgtacatataaattggaagacctacaaactataactgtcactttgtcagataggttgttgctttctcataggtgggacagagcatatacttgacatttgacatcatgatgaattaagcctaaatcattttgctgaaatagaatagaacattgctctggaagtttggatacctcaatataattcaaatgcaagcatcagcagttgctgaaagtgagatgtcttgttcattttccaaaatgatggtcattcaacagtttgtcgatgagataaacattgcatgattgtaatattctgcaaattaaaaacatgatgaaccaaaacttagttgatttgaaaatttaatatgacaactaaagcaaatatgaaagtactggattaaggagctgaattctacaacttccatatacaaagaatggcattatctgccatgtaaatggggtgaaaaccctctgcaagttgacagatcaagttatagtcgaactgcaatacacagacttcttatcagaagttacctctgtccttaaacttgatacctgcaactttgcagtttttcacattctctgatttggacttcaaagattgcaaatatcagctagatgtaaattgcatactaagaaaagaaaatcatataattgaaattaggatgaagcatgaaccaattacctcataaattggaatgtggtctgaatataaataaataatgtagtctctgaaaactgcatcagagtagcacaatcttttgcccatcttttcccctagttcctctattgctcccttctcacttcaattccattgggtctagcagtagcacaatgggatcaccctcctctgctttcttcagtaggaatatcgctgtaaggaaaaaaaagaaagaaagagggcagccgctagcatacctctcgttcgggtggctggatcttccgatgtggcaatgacggctagaagagcgcggtggcggcagctgcggtgatgtcggcggcggcgacgttggcggcggcgacaacggcgatgacggcgtatgcgaggggaggagaagagcgagggagcgggccggcgcgcatgagggaggaggaggcgaggcggcgcgcttgcgcggctgcgggcgaagcggacaatgaggctagggtttggtgcaatctctgccgtccgtttgtgatccgacgatatcacaggtgtggaagcgccggcacggtaggacagatgtacgacccagatcgatcgtagcacaagatcggacggtggggtagctgggactggcacataattaactggaagttcagggacctttgtgcaaaaatacgctgacgtggcgctctaattctcaagcatttccacggcgtttaagtaaactaatatatgagagctactggagcatcaccaggagattatataaagaggagtaatcattccagttttaatgggttgccagataaaacaacaaataggtcaataaccactgatttcaacacccattctttgctgaaaaataaattaggctataaccaagaatatttattggactgaattgatcttctagactgtagcaagcaatatttttggtgctatgttaaaaatagagagaaagaaaagaaaattgtatgcctgcatctgtccaggagtgcttttgttctgacatatttgattatctatttgctaatgacattcttctattgttttcatattgtttctgttatgtaaacggtataacttacaggagactagtgatagagaagcagatatgcacttccccatttgttgcttgaaatatatttctcgtaattttatttccaccatgttcattcattcattcattcattactactagttctttggatttttttttaactttggctccttgtttcccccactatttttattgcacaaaagcgccttctcagtctaggaaaatattcatgtccatgatctattattcttgatcaacaatagttgatattattctagttatgaacttatgcacgataaatctaaatcaaatctacgtatgaatcacaaactgtcaatgtacttgatgcctgcaggctgcacgaggtgtttcttttcttcctggcatcaagcaacggttgttgtcatttatttttcgcaagacatggaatgaggaatctgatcagaccttggttagccatcttttctagttcattcatttggtattagttttgaattaaggtgtgcgttgtcttctgtgccatggtcctgttccaaggttgatcacatacttttgaatattgatgtaaagtagatattatatttaagttgtcccaactgacatgcccactgctaaaagtaatatttataccttttttccatccttctcttgtatatttcctctttcattggtactgttgtgttctgtctttggaacttaatttgttgtggagcaaaatattttgttttaattgtttgttgaaccaatggatttgtttacagagagtccagcatctgaagaagaagttctattttcactttcaagactatgttgatcttatcatatggaaggtacctacatacatccactgctcactttgtctcttactctctttccctacttttatttcttgaaaagtttcttaaccctttacctggaaccaatatagttaattttagctaactctcagtaataacacaaccttgatgatagagcatgtgctgataaccaaacattccatattctatcaaatatacatatatatatttttcgtaaaggtgcttataacatgatagttgaacaggtgcagtttttggatcgtcatcacctatttatcaagtttggtagtgtggatggaggggtaaatccatttttccagacatcttaccagtcagttgtgcataacctgatgtcatttaactgtaagtacatttatgtttctttaggtttctcgcagcactgaacagaattcagcattctttgctgtgtacaacatggagacgacagatattgtttcactctatcaggtacctattctcattgaaacatgttgttggagttgtttccgtttgttacgttcagcctattatgcaatttatcaacagaattcttcggaggagctctattcattgtttgaatatttttatgaccattttcacacaaatccacaaaattcatcgcatggaaattttatctcgtcacattccaataatgttcatgctctcgatcaacttcggacaattaaaaataaagcaaacagcacctcacaggtaatattgatagcatcaggggtatgatttttattttttgactcactacagttcttggctctgttagtctgtttatattgtttccacaagatgtgagattgtttaaaagttattgtgctaatgcctacatcttttgcaatgttctgattagaaaccgtacgagtttcaattattaagtcaatactgctcagttctacatgcttggatataatgtacagcaacactaaatcaccaacattgaactgaataatgtagagcaacgctaaatcccaaatgcataatgaaagttttcttaaacattgaactgaaaattttctgaatcgtcttggcattgaactgtatgtgaggaatttaaaaggtatccctgtattaccgttaagccttgaaccttgtgagcttgagcagtcttccagtaagggcctttttttatgtctgcttctattaacaccaggacaagtggtttgcttgtgaaaattttagaatgagccaaatctttgtgatgaaaagctagaggtgtgaaattactagttgatgatctttgatatttcttgaaatccacatttattttatgttactcttactatttatatatggcataaggcatatgctaactaatttgtgatgctgacttttggtaaatgcctgctctatatttagcagtttgtgaaaaagatgatggcgtcactaccttacacttgtcaatcacaaagtccttcgccatactttgacctatcattgtttcggtatgatgagaaggttcgctcttcaacttgtttgaaataattatacatcagaaagcagttgatattttcgaaatttatttttggctacttttacagtttacagtttacagtcaagttcaaacacatagaagatgctaccttgactaacaaatatgtgacacaatcttctctaaatataagccatgcgaggcacttttgtctattttatcccccttttgactttgctaaataaaaactaccactggcatgaattatggttgttcttttccatgtgggcataactgaagggtaagaaaatcatctacccactttcataggtccctttgatccactcctatgaataaatgttagttttttttcttattgttatttagttcttgacatttccttgtccctcgttttcagctgatttcagcgattgatcggcacagacactgtacagagcatccaataaaatttatatcagtgaaacagccaaatgttgtcaaattcaagataaaaccaggtatttcttactagatcatcgtcgttagcaattattatctagattctgaagttcgtgcttgtatcttcatataattatcaaggacattgtgtaatattacaattacgaaggccgcatcatatgaataaaccaaaataatggttaacatgttgtgaaca

SEQ ID NO: 1952 - DNA, 4413 bp, Oryza sativa
atatatatatatatatatatattcagtgcgatttatggacgaactgaattagcatttgtagctatgtaaaggtagagaaaaaaaggaagttgtacgtagctagctagagctttcatttgatatgtagctcggttgctttttaattaattcctgcgaggaaaactgcatgctccatgatcacttgctcgctgctagcttttagttattgtactacagtagattgccgtactattaattgtacttgaactgttaatggaacgaatgccatcgatggatggatggattgatatatgtatgcaatcaattcatcgacgacggaatcgatcggatggatcgatgaaatgcatgacgatctctatatatatatatatatgatgctgatatgattaataaagtcaatgaaggtggggctaaataggagtagtcactaaaagctagctactgaggtcctgtttagatgggactaaaaacttttaagtccctatcacatcggatgtttgaaaattaattataaatattaaacgtagactattaataaaacccatccataatcttggactaatttgcgagacgaatctaatgagcctaattaatccatgattagcctatgtgatgctacagtaaacattctctaattatagattaattaggcttaaaaaatttgtctcgtgaattagcttttatttatgtaattagttttgtaagtagtctatatttaatactctaaattagtgtctaaagacagggactaaagttaagtccctggatctaaacaccacctcaagcttttcgatctgcagcttttcgatctcttctctcttcattcaattcagccctgtttagatcatgtcaacaaattttatcctgtcacatcgaatgtttgacacatatataaaaaatattaaatataaacaaaaaaataactaattacacagattgcgtataaattacgagacaaatcttttaaacctaattgctccatgatctgacaatacggtgctacagtaaacatttgctaatgatggattaattaggcttaataaattcgtctcgcagtttacaggcggattctataatttgttttgttattagtctatgtttaatacttcaaaagtgtatccatatatccgatgtgacacaccaaaactttacacccctggatctaaacacagccgacgattagttgatgtgcacacgcccatgtatatatgcatgctcaccaatgactttactcccgtgctgatgaattgaatactccctccctcacatgatataacaacctaataccagatggaacactttatattacaaagaattcgtgcatactttatgtctaaattcgttgtactataaaacatcccatccaattctaaatttatatattatgaggcaaagggattatatattatgtctttgactatagtattcactcgatcctaaatatgtgtttgggttgagaatgaggtgggataaattggacccatccatgtttttaggatgggatagtcacatctatccgtttggtacgagggatgtgatgatcctacttcttaagggatggccaacatatcagccagagaagaaaaaaagtggttagaatagtatgccagtttttgcggggcaaccgggcaaagccaatgcggatcttagggcaatattcctttctagagatcatccttatctcacatatatattgtcacaccctgaagttcttctcccgagcctaaattaattaataaatggtctcgagaaattacctgtgtaaaatcaagagaggaaccctaattgaagtaatgcaaataataatcgaaaatggcatgtgggatttttcttgagttctacatgtcaaaatatgctaacaggatttttagtggaattttcagagctctagaaataattcaaaccaattaaaatcgagcacaagcattattttaatccctgggaaatccttttcttttttctttccttttccccttcctttttccctaatgagctgccagcccatttcctcctccctcccgcgcccttgctgggccggccgaaggccacagcccagcagccggccgcgcctcctctctcacccggggtcgccgataggtggggcccacctgtcgggtcctcccccaaccttcggacgctgccgcatccgcagccgccgccccgcaaccgcccgctcccgcgcttcccgggccacgccgcccacgtcgccgtctcccccgcgcctcccgctcctccactaccaatcccgctcgctcgcgcccacgagatggccgggattcgaatttcgaatcccgcctctctctcctctcccactcccccacgtcaaccggcgattcccgcctctcctggccacgtccagacccctcctcccctatttaagcatcaccgcccctccctctccctttttccccatttcaccgagctctcccatgccctctaccgccctagagccgtgcacccgccgcagtcgccgccttagccaccttcggctgccgctcgccgccgctagaaccgccgccgagcgcgccgttgccaccttcgggttcgcgagcccgagggctaccccgtccaccccttcgccgtcggactccgcccccggaacccactctgcaccatccgccggtgagttcggccatggccgcggcttcggccagcgttcccgccctctgtgctctctttctctctctccctctctaatttctcccattttgttccttaggtcctctcgaagcccgtccacctctcgccattcgccatcggcgaggaactcccctcccatccctctctatctcccgtaccgccgctgccgcttttgccgcgccgcctcgcttcggggccgtgccgccgtgcgccgccgcatagccgccgccgcgccaccgccgtccgccgccgcgccaccgccgtccgccgcatcgccgccgccgtccgctggtgtcgcgccgccgccgcgccatggccgtcgggccggcttgaggccatccaccttgccgcctgagtggccaccgcgtgcccgccacgtcagcaccacgtggtgcgccgcctccttcccggtccatggacccggtccaccatgaaccggtgccccgagcctatgacatgtggggctcgcctgttggcgccgccctctctctctctccgatgacgtcaccagggttaattattgcgcaataaatacattgaggacttttctgtttatagaaaaaacacaatgaatcttctaaaattcatagaaatttcatccgagctccgtttaagcccattcaagtctcagtaaatcaataaaaaaatgcaaagaatccattaaaaatggttttgttctctgtttcagtagtcttatagcctgtttgtattgtttgctttgtatgtcgcttagattccggctctcccgacgctccggtgtactttgagatagtcgccgaggtccctctagcagcagagcaaggcaagtaatgcttgtcacttgaacatattggtcccatattgcaaatgctctattgtttttctttaaatactgcattgttttataatgatactatgggatgcctacctactgtttcagccatgctatttgttaccttgctcctttgttagcttggggatataacatgactagatattggattagggattgcgtagccatgcttagttcaactagtacacaatgggggatctacattaatgcatagatatcagattctagtattgatattggtttagtgccaccgttccggtgttggttaattaaaatatactaaatggtgggctatgggtgcatggttttgctggtcgcacccatggcaattaaggaccgttcgcgggatgccttggaagaacttatcgtacttaccaccgaacgcgctgatgaagcctagaggggggggtgaataggctgtccctgaaaacttaaaaataaatcgcagcggtaaaattcaaatagacccggaacttcctggtaaggaactctggaacttccggcctgccaggcctggaacttccagtgttcttaggacaggaacttcgggtaacagatgaaagatgaaattcaaatttcgaaacaggagactaagccaatcttctcaagatgatgcacaggtattctaagcaggagatagatcacagaatcatccacagaaacatcacagaaagagacaagaacgatttttccccaagttcggatcttgcgatcctactctccgttgaggagctccaaagagctgggtctcaattaaccccttgcctcacttttgcaaaaaccccagaggaaatccacagctttcaaccacaaacaccctaggcaaatttctagaattaagtgaccaccaagatccaactcaacctacttctagaaattcgccacaagtgtaggttgctctacttggaaaacctctagaatctcagcacaagaacttcatt

SEQ ID NO: 1953 - DNA, 2111 bp, Oryza sativa
ttattcgctctcatgtaaaaatgatctatgcacaaaaattccgctcttattcgcttattttacttgagtcctttattgtttattttataattggatttgagcatgcattgattctccgtcctttgtcttctatagatggccgactgtcccctaatgcaccaaggtcagactatgggaggctttgttgcagagttgtcccgcatggcgtttgtgatcggttttccaagggagccgcagtacaccagcatccaccctctcagtggtgagttcccgcactaggtccacttggagattcacggcatacccacctacctaccctccatggaggtgacagcttgtgggggcacatttgagcatgcttgtgaggaggccgccctcagggtgatggcccatctgagggagctgcatgacgacactctgaacgccaccgcctaccgcttccatcctcgccgcggttccagctccaacaccagcaccttcaagtcagcttggggagagaacgatgtcaccttcggccacatgagtgacgtgatggagggctacgacaagctgcacgccatgctccacaaggcaaccaagaggctcaacgaccagaagcttgtgaggatcgctgagttgcaggatgagttgtaggatattatatacatcatttgtcccataaataatttcctgatcataaacctgaacagttatttgttcatatctattatattattaaaacaactttgaaaggaggcaccacgttcgctgtgggggctagaaattctcacattaatcggagaaaaagaaaaggagagtccaaatagaaatacaatttaaaaatagctgaaattcgaaattaaaaataagcaatattgagagaagagtccatgtaataacccaatacgagattaatcaaaattcggaataaaaataaaataaaatcaaaaattagaaaagaaaagagtccaagtaggaatacaatttaaaaataaatgaaattcgaaattaaaaataagaaatattgagagaagagtccatataagatcaaagaacccaatacgagattaattaaaattcagaataaaaaataaaataatatccaaaattagaaaaattaaaagagacttcaagtaggaatacaattttgaaacaactaaaattcaaaaattcaaaaataaaaatattaaaagaacacttgtattaattaaaatttgaaaaaaaaattctgaaattagaaaaagaaaaagtatttcaattaggaatacaatttataaagaactaaaattggtgataaaaaataaagactgttgaaagaaaaggccatctaaaacaaatgacaagataaattaagtaacatgcttataaaggagtagagtggtggcggttgatacgacatataaaaattgtcaataaaacatcaaatagaattttaataacgattaaaaggagggatgacaggcaggccgtgaagcaaacgggcaaggcggttgctgggacttctagaaagtaaaaaaataaaccccattgataatcatattcgatttttaaaatctcaatgacaataaaaaggaaaaacaacgggcggggtgtataggagtatagttgcagagccgacgacggttggcgggacttatagaaaataaagatttagaatcccaatgacaataaagagtaggcagtggatgggccgtataggagtatagtggcatcgtttaacaggatttctaaaaaataaaacccaacaagacagtaaactctaaaaactacaaagtccaatttttaaatgttcagaacttctaaaaagtaaaaaataaacccaatgataatcatgttcgattttaaaatctcaatgacaataaagaaagaaggcagcgggcgagccataaaagagtacaattgcaaagggccactgacagtttggcgggacttctaacaagtaaaagaacgataattatgttcgatttttaaaatgccaatgacaataaagagaaaatacagtggacgtgtcgtagaggagtataatggcagcgtttgacgagacttctagaaattataaaaacgaaacccaacgagacaataaagtctaaaaactagaagctccaatttttaaaggttttaaggagaatgaa

SEQ ID NO: 1954 - DNA, 12793 bp, Oryza sativa
ctaagttaaacttctcatttttcacccgaatttacggaaaaaataaacacattgtcatctataacattaaattagttttattaaatccatcataaaaggtgtcttcatagtgcattcaattattattatagatattgatatatttttctataaactcgcttaggacaaaacaaaattacgtgaaatatgtaatgaagggagtacgttaaagaaaaaaaatactgtagactgacaacaaaaacccccagcccagcccagcccagcccagcttagtgaggtgaacatatgttggaacactagtgggccgaatgatgagaaataggcctatttatatgttctttgctgtcgggctctgcaaacaaatcctactggatggcctacttcagatgacgcatctaaaaagatcaatcaatttgacagaatttattaaatagagaatttgaggacgtactttggcagcaaatcaacgtcagatacatacaaacagtgttactatttaggagttaaagtaggcatattctagcttttaacggatcgctgtctcgtggtctgctttctcctgcagtgcatctgcacatctgcattcagataataataatggaagagagcatcttaaggcaaagggggaaaaaaagaagagaaggatgtggagaatggaggggacaggtgagctgatgtgaatctgatccgatccgatttgatctagaagcaagtaaaatagcagtagggccggagatattgatgaatctgatgctaccactagtgaaacagtgagcaataaaatagtacttcacagcagggttcccttaccgttttggcggggttatcacacccccacggtcaggtggttaccccgctccacagtatactgccgcagctagtatggagtagttgagttttgtgtgatgttgtaatccgacaggcagaaaagtcttgcgatgcaaatatatctttgcacacaaatacagtacgtagtacgtccgcaacacaattaaccaacagcagcttgtatgcaatgtacgtagatgcatcacaagtaacagtatcacacacacacagacgtgacatgttcatattcgtaccgggaccaaattttatggatcaacaacaaacattccaaacaatgagatggctggattattacagagctggaccaaacaaaacaaaacacttagctagggccagtcgagcgaccacacctgccggcccctccatcgatcagaggcgcctcttattattccataaacctccctcactcatatgtagagatagacagatagatttgatttgatcctgcatgtatgcattgcatgttatgagtttaacgtatacttgcagtttgaaattaccaacaatgtttatgtagctagtgagattgtctgtttgagaaagaagaaaaaaacagagcagagatagtgtctgagaagtataacttacaccagggaacaatcttccagcgctggttgtcaccctcgcaccactcccagagcaccagggtggttccgtcgcgcacgccgccgtggtccttgtctccatggagcgcgtcgaagttgaggtagatgttgttcaccatcctgatgcaccgaaacccactcccaacgtccctgctctccgtccacagcacagactcgtccatgtactctggattgtagcgcaccaaacggacctgtccatccatccatccatccatgacatattatatattcctcctagcaattcttcactgcagtacatactaaccagagatcttacaacacttaacttattgaacgggagttagcgagtgattttacttaactttcgatcagcaggaatggtacagcttgagatcccaaaattgtgttcatggcaattgcatactaataattctttttcacatgacagacaagcacatggacaccccaccccaccaacatgcatgcggcacatggatcatggatgggtggatgccaatcccgaactatcacagatcttaagttgttggttgcgattgtaaggatgcagtaacagagtctcgcaatattttctagacatgacaatgaacatgcaagcatatactattaattgtcccaaccaaaaggaagataaaatagtatcaatggtgcgagcgagtagaagacctcagactaaaaaggatattttaatcctagtgatacagtttggacaagttgtgaatagaaatgtgatattttagtcctgtagagtagcaaatccttaaattaataattcaattccaaactggtttaatgtaggcaagctaatttggacttgcacggacggggtgacacgcacgtctctggattggtgttggttggcaaaagattgtaagagaggcagaggaaaagaggaaatacgtacagggtgggattggccgatggagtgcttgagggcgtcgccggtggccttgttgacgagcgccatggcagggtacccttcctcgtctttcactctcgtgctgtacttcatgtccttcacccagtgctgcatccatcatcacataaataattactagcaattgttttgactgaagatgagggagggggatgaatcgcgcgcgaaattgaacaagtagggagggaggtaggtacctgcgtgtggtcgtcgcgatcggagcggacgaggcagaccttgccatctctgacggcgaggctgtagttgtcctccccggccttgcagtagatcctgtgggtcaccggtggggctcctccgccaccgtggtaagggcgggtctcttggacggggctgatgtactcggatccaccgtagtgcggcgtgggcctctggtggtcggagacctcgtgggaaacgtggacgacgttgccgtagccccctcccccatacgccggaggaggatgagcgtagtcgtgggaaggcgggtggcgagcgtagggatcagccggaggaggcgcttggccgtagggacccggcggaggggctgagtcgtggccgtaggcgggagcgggagcgggatggcggcggcgatcgtcgtcgtcgtcgtcgccgcggtggccgtggtggtggtggcgatgagggaactccatgatggatggatttgggggaatggaggagatttattagagtcaggaggtctagaggagagatggccggcgcctccaatttatgattgggtctcccgtcccgtccccggccccgcgcgggtacccacggcccataatacccccggtaatcgctacagttacagtgggctcaatcacaaaaagttcagagaagaaatcaatcaatccctcaatccaagcatgagctatcacagtgctaggatggagatcgacgagaacgagacacacgatttacaaataaataggactagtttactttgcatgcgtacagatacagatgtggagtaactagctagctagtctccttgcttgaagaaatagacgtacacacaggctatatgtgtgtgagaaagataggacccacatgacaggcaggcagttaccgggtccccatccccgctcacccgatgggtatgaatttcgcccgttaacatccccatggggattatttctctcctgttttggcaccctagtagaggaattccccaccgggtgacggggaacggggccccattgccatccctgcaacttggggttattcacaccatcaacatctaaatcaatccaaattcacccctaaacacgtctaaaataatcagccattcgtatttcctcgattttaaatatctatgctaccctttctgtactcctttgaaattatgtagtgacgatgacagccaatctaccgtcccactattgcttttgccgcttgtacaaattgtcccacaatatcttttaatatcatagagtactctaacatttgattcaaacgagtgaataacaaataagcaaataagtgatactagatattttttatgatatatatattatgatttttgttgttagctagaataatttattgttgagccattttgaaaagaaggaactttgtttaatagtaaatggttgtgagaaatattacattatcacacaatgaaatagaaaagtgatttcagacgtttaaagtcgatctagacattcccatagtgagttgctggttttcgtatcttttaagcatgtgttattagagagatgtatctgggtggagtatgcgcgtatatgtcttatatatgtaactaaaataaaatatacaagaatttctgtatgtaatttcatgagtaatactagtagaaactagggtaattgtgttcctaccattattttatagtttaattatgattttgctcctgttttttgggtttgtgattttgcccctactttttaagtgaagcagccgtctgcctctactctgttaactcatggtaacggtgttaaatgtgtggtgaatggacaaatatacccctactattgaaatcaataattttggcatcaacactggacatgttccaagttaaatttgtgcgtatttcaagttaaatgttgacaaattttgtaaaagttgacagaacacaatatttaggacaattttcacagaattttagcaataattttaacacaatttattatgttaacattttgaattgatgacagaacttgtcctcacagatatacaaaccgaaagttcggttaatcgatacttcggtctcgatcatcggtctgaccgaccagactgaagtatggtatgcaacacggcatgaaggtagccagcttcgatccaaaataacaaatcaagaagatcaatcaaatgaaaatccttgcaaacgaaagcccccaaactagaactcacaagtcaatacatcagcggcccctcgtcttctgtatttccatggcaatcacaaatatagagatagcaaaagggagaagataagagagacaaagatagccatgaactcagaaacgaagagaaattatacacaagtataaagtgttgttgccgtgtaggattagaagctctgggcccttcccctcgaggatgagttgctgctgctcgatgaggaagctgccaccaccatgtttgcggacaaggacgtcgacgctgccgcggtggaccgtagcgcttgtatacgtggaggacgtgctggggtggtgacaagtcggtgcgcgcagcagccggcggctggacgccgggcagtggcgacgacggctgacgagcctggctgtgcgcgcgcccgccggtccgcagcgcgaggatgccgctcctcttcgccctccctaccagcgcgcaaagcgccgccgtccctctccaccgcacgctggcccgcggggccgccgcgcctccctgccgcgccctggccttcgcgcgccgccgcttctcgctagggttctagatcttttcgatttggggaaatcgttccagcaggttggctctttcagtgaaccaagggtaggatggtcattgacaaattagaatatcactttcttttttcgtttaattcgaaaattctaggcccacctaactaccgtcaaaaccagaggcagacggctgcttcacttaaaaaaagcagagacaaaatcacaaaccctaaaaagcgagagtaaaatcacaattgaactgtaaaacaagggaaaaacacaattacccctataaactaacgaaatcttagatagaaaaagaaaatcaataaaaggcaacacgtagtacgttctaccgatcgatagcaaccttcgtgactgaatattcatgtagtacagcgtgagtgtgaggtggcattaatttggtggatgaagacgccaccctcctcgaacgtacgtgaccacccccaccaaattacacgtcctcatatatcaacgatcttctcttctcttctcttctcttctaccactgctctcccagtctagtactccctaaaaaacgaaaagttatggttaaaatactatagataataaagtaagtcacaaataaaataattaataattttaaaattttttgaataagacaagtagtcaaatgttacaattaaaaactcaaaatcccttatattatagaagagagaagtactgtcacaacaaaaacatacacacaccaaggacagctcattgctccacctgatgaaaaaaaattctctgcaacaccccccagactagtggcgcgtgtccgatatctgctgcatcggaccctctttggagcagagccgagccgagcccatcctgctggcgctgattagagccaagctgtccaggaccaggagtacatcgagccgcgccgttttggctgtctttttgcttctgcaattcagaccaaatgaatttacatgatgctgtacaaatatatatggtgttgtgaacctctcgccatctgattttaaatctccgaaacaacaaaaatctccaaaacggatcaactgttggtaactttttttttcattctgccaatcatgaccaatgcttgcataaaaaatgccctattaaaaatctaaaccggctaaaggacactatacagaaacaatttttctatacgaaaacttctatagtttgcaggcagacaggcgagcggcggtagccggagtggcggcgggcctcccccacgtcgctcgtgaatccagtggttgttggatgttttatttcttttgatttatgtaggtattggtggcataaaattggcatttaacagccgccaacagcgatgccggccgtcccccacctagttccgacggtggcagccctctctcgcccggcccgcgcggttccgccagcggtggcgagaggagcccagagaaggaggggagggtcgacgacgacaatggcgggaaagtccctcacctagctagggttttaattttgggggatttttattttttttttggattttgatttttgcgtacgcataagcacttgcacgcgaaaattgaatttttgcgtgcgagtgcaccacccgcatgaaaaaataacgattttcgcagaaattttcaggcatacggacgcctcaacagcacgcaagaataggttttgctcgtttggaaaaatgtttttttagtagtgggagccgatttaggccttgtttagttcccaaaaatgtcacattgaatctttggacacattcatagagcattaaatatagataaaacaaaaaactaattccacagtttgcatggaatcgcgagacaaattttttttgagccaaattagtccatgattagctataagtgctataataacccatatgtgctaatgatggattaattaggcttaataaattcatctcgtggtttccaggcgagttgtgaaattagttttttcattcgagtccgaaaaccccttccgacatccggtcaaacatctgatgtgacacccaaaaattttcttttcgtaaactaaacaagccctaatacgaaataggataaacatccgtctcgtgaatagaacggaaggtttttgggacagaccggacgacttacaaggcaaaccgacgaagatggataaaactagactaaaacttggtaaaaagtagatgcgatatttaaaaagaagttagaccagccgggtcttttcaaattcgatcatacttttctattcccgttctatttgtcaaatttagatgttaacactaatatctgaatttaaatctccaaaacggtggaaatggttgataatttaaatctcgtgatggcaagacacctctgtccacttgaccctagaaaaatccccagaaatattatcaccaatgcttgcataaaaaatgccctattaaaaagtgaaattattcagactttatgtgcagctggtagatgctgctcggtggctttttcaacgatcaagtggacagaggtgtggggtaggagatcggacatcggctcggctccgaagctagactcggctacagtaggaatattggacacgcgtcactagtctgctcggtgtcgcatgggtggtgtcgtgcactcgtgcggcactgccgcagagaatttttttcccacctgattgcattcgattttgaatcttttttccctttttctaattacacggtaggcacccacgcccacacactattacacacaccaaggaatatgtctcctaacacgagacaaaaaaaaagcagcagtatatctttgataacactagaaacccgccgaaagactatgtgtatgtgtgtaatattagtgggcaccaggatttaaactatggctggtgatgccacccactcatgactctgccacaccattagtgcattcgattttgattttgattcttgttcttatttcgactttaattaatttccattcttgctcatgtcttctccagcctaaagtcagtcatctaagaaaggaataagttcactttagatctctcatcttgacgtcgagtttggattacatcctcgaaccacagtaccagatataacaaattcctaatcttataaaaccaggttaaacgaagtcccaagacagtatcaagggtggttatgactcacgtggcactagaaacaaaaatacaaaattaaaccctatgaaacccacgtgtcagtgaaaacaatatattcttccttattactctctctcccctatctagaggaggagaaccaggatgacgccttcaccgacagcgggctagagcgaaaggacgcacagttgctcggcaagtgcgttgtacaagtcgcgctgcgggatgctcggctcgacaccatcgccaccacctagctcctctcccgccgattgcttgtgcgctgcccttttccttgtaagccatcacccaaagatggaaaagagagagaaagagaggtggaggaaggaggaagaaaaaattggtagctgatatgtgaggcccgtgtggtccccgtcgattcagtcaaaatcatacataatactgtcttgagatctctgttaatttagttttgtaaattagagaatgcgttacatctcatattatggttcgaggatgtaaaccaacctcgatgttaagatgagggacctacattgaacttaatcctctgatacatgatctatgtagcgtgtaaaggccaggccggcccactattcgttcatattggcccaggacgtaatacatggagtattcttcattgtcgtctctcgcgtcgcggcattcacttggcccatataagtaaatggagtatacggtgttactactaggaaaaagtacatacaaggtccctcatcttgtcatcggattacaaaatcgtcccccaaccataaaaccagatatacatcatcccttaacttagaaaaccggttcacttttggtcctcaggtggttttgaccccggttttgtctgacgtggcagctgagttagctcaagccccacatgtcagtgaaccctcatcctcttcttctccctcctctctatcctctctctcccctgcaaatgggcgacaggacggagtggcggcggtgggcagtgcggcagcggcggagcaggtgggcagagcaggccgacggggcgcccccaccataaatcccacctcctctagcatcggggacggctttatcagtgagaccgccgccggtggcttggccatgcgccgcggtgtccatgtcggctgccacacggcgaggttctgcgccgatgggagctgtggcggaggcgagaagtggtgggcgtcgctgctggggtggtcgggacaggcggactacatcaacgcgcagccgacgtcgaggaaggaggcgcggccgtcgatagggaacccggcggcggagcagcagggtggtgggaagaggttcagtgtgctgatggaggagaaggcgtggcagccgcaccgacttgctggcatttctccccatgcgccatcatcgaatctgctggcgaatcaccgctcgacgacatggaagtgggggcagcgacgaatggtgttacctgggaggcgctgccggcgaggtagatgacagcctgcgcgcgagatgagtggatggcctccaccaccgtgcggacctagctctccattgtgcagtcgcaagaagttgccactactcctacggctgaactcccccgtcggcccgccttgcccacgcgcagccatggtgcccccgatagcccgtggttcgacggtacgctcatcctcccttccaccacggctataaagccagcacgcgcgcgcactccatgtcgctgccaccatgctctacatcaaccgccgtcatctgccatgtcacatccaatgtggattccacgtatggcagccacgtggcttggacgatgcttgtcactagccagctggaaagcaattctgtgacgagcacctttatcatggatagaagcatttctatgacgaaatctaccgtttagtcatagataaacttatgtgacgcgagttctacgacgaatcctatttcgtcataagttcatcatagatgttactttacgacgattatcacatcttccatgacaaaagtagattgtcatagatgtgctgatctctactagtgcatcttcagtgttcaatcgaccaagctgccaccaccaccaagctccttgtctctccatgaccccatttcactcctcgccggcgcccaatgaccaccaccattgttttccccaaatctggccaccaccgccgccccaaatccccaaatccaaagttccaccgcctccacgctgagagcccaaccgctgctcttcctgccgtcgctcgtttgcacttgagggccacttctccaagccccacccggccaccgcccttcatcgctggagccgcgaccaccgttgccttgccgcgcctcacgttgttaggcgcgagtgagaagaggagcacgaaagagacaggagaaaggagaggatggtgacgtgtcatactggcatgtgggtcccacgctgactaatctgccacactagacaaaactaggttcaataccacctaaggacctaaagtgaaccggtattgtaagttaagggatcctgtataactggtttttgggttgagggacgattttgtatctcggtgacaaatgagggacgtcagatgtactttttccttactactattaatttcaccatgtacgtactgccctatacttagtagtactgcatgtcttcatagtagatttaattatagagagattccatgcgtgcacctgatctgcttgcttaattcctcagtacgcacgtatacaagcgcttgtactgatcagctgtcagcaagcaattgatacctatatataccttacatatacacttgctaattattagcttgattgtgtctttccattcatatatagatcaatatacatcatcatacatataaattaatggtttgtcatattcaggttcgacatcagctatgagctagatatatatatagcggatgcgtgaggcaataacaatcgacaactaacgtaccaacacaagtatgtatgtacatatatctcaaattaatccacaccctttttaatttgctaccttaattatttcgttctcggcctataggaagaaatggctttgattactaaattaaccttgcaactggccggttggtcaaacatgcatttggttgagaatattctccttctcatataagtatatcaatcggatcgatgcatggtttaattaacaactactagctagcttgattctactcctagctaggtaactttcacaagcaaacggttaggtaacagtacatgcatggtttacgtataaactcagtcattctctttatatatatatatatatatcgatcatcgatccattattgttacgtgtgagaattctctatctatatgatgcatatacatatatgtaacgggaccaattggcacgtaattaatatctgtcacgcgcaagttatttactcctaattaattaattaagctcgatcggtgaaggctaatcaatagaaaaattaattagttaccctagctaggacaataacttacaaaagcttctgccccatcgcggttcttgtgttatactcccctggttttagcgtaggaacccattgattttgtgcatgcataacatttgatcatttatcttatttaaaaatttagtataaatatgtggaagtataagttaaggttataatttttctgatgataaaacaagtcacaacaaaataaatagtatttatatttttttaataagacaaatggtcaacgtcacattaaaaatcaatagcatcgggcattaaaaaccaagagtaataaaaaactagagttcagaaatccacaactctcaccctagctagttttttctttaaataattcacccttagctatatatattatgaaatttatacataataatatataataattccacccttcattaaggttgtggacgtttagttcacgccaaaatttaaaagtttagttgaaattgaaacgatatgacggaaaagttggaagtttgtgtgtgtaggaaagttttgatatgatggaaaagttggaaatttgaagaaaaaatttgaaactaaactcggcctaattgctgctggatactcggacaacctgtgatcgagtatgcagtattgagccaaccgtctaactttcatggaattgaagaaagccaaacctttagtacggattctgaattgcaatatgatccatgctagcatgcgtgtatatgaggatcaaactagtgtaatatattaagccatccgaatacatatatatttgtgttaattcccagagacaattaatttgttgtaaaacactgctatatatttggcacatgattaactgttacttacaacgacttacaacaacgtatataattgacactaattgctagctatgtactccagtacacatgtatgtatgtatgtacattcctgacaattaatctattaattaattatctatcagtttgtgatgaacaagaattcaattcaattaaatccaacccctccaataattgtgaacaagcttgg

SEQ ID NO: 1955 - DNA, 2614 bp, Oryza sativa
ggcctccttcttcttgtagattctgcacagcacccactcgtccagctgcgtacgcgcatgaatataattgcgcatatatatatatcgatcagtggatggagtatatggaagaggatatatatatatgtagttagcactagcaccgtagcacgtacgtaccctcatgctggcgctgctggagctggacgatgatgatgaggccagctgcttcatgttactagtataggaggaggaggaggaggcggcggcgttggcgaggcggtactcgtgcatgatccagctggtcttggtgcccttgggcgggcgaccgcggtagaagacgagggccttcttcacgcccagcagtaccgtctgctgcgtctccgagatggagatgggcttgtcggttccggtggccttccagtagccggagccggcggcgcggttgggacggacgccgttggggtacttgcggtcgcgtgggctgaagaagtaccactcgccatccgactccccgaacaccgccatggccggcagctcccacgggttgtacttgtaaatgtccacctcggcgatcaccggtgccgggcagggcgccgccgcggcgcgcttgccgaggtagtggaggaggagctcctcgtccgtcgggtggaaccggaatcccggcggcagccctgcccctgctgctgtgtgatgatcaccgcacgccgccgccggaagctgcaggtcgatggtcatcatatatatatggatatcaatcaattaatctcgtgattgatcaatatttgaatgcaatcgatggaagaagaagaaaaggatagaaatttgagagttgtggatgggggcaggccacctatatatatacacctagctcgatcgatcgatcgagagaccattttattatatataattcctgagtacatacgttaattaattaattaattcttcctcccaagtgaatacataaagtacgtatgatctagtacagtgatacaaatgtcaataccatggggttaattttgtcaacagtacgttgtatatatctattgtccgaaattaattacttactagtaaagttttatatatatttcttccgacccggccgtaaaattcaatggtaagagattgagactcctgttggagcaagtttaatagtatagtcaactactagctccaaattatctatagccaatgtaatagccaattcatataatagttgcttactatactattaatacctggtctcacctgtcatacacatattacgtattagagtccgtgctgcagctggctatatccgctgctcttttctctctttctttatctttttaaaatatgtttataactagcttatataacctgcttctgtacttgctcttaagcagcagcaacagcttgtgtatagtatagagaagccttcgatccgcacgcccagcctctagtactagattggtaaatacagtcctacacacttaattacttcctccgtaaaaaaaaaaaagacaaaccctgatttccgtggccaacgattgaccgtttgtcttatttaaaaaaattatgaaaaaaattaaaaagataagtcacgcataaagtattaatcatgttttatcatctaataacaatgaaaatactaattataaaaaagtttcatataagatggatagtcaaacgttggcacggaaactcagagtttgtttttttcttgacagggggagtagatttttagtacagttccggccagcacccatgtaggagtatattcgatctacaagctaaataattgttatgttgcatgcatggtagcccaaattcgcaggaacataagtaggagtatattatatctttgacagaaacacaagtatttcttccgacgcgcacccaccgcgccggatatacatacgtatatataccggcagagtacatatatatgtaacgtgactgattcgattcgatcggtcactcaaccggaatcgacctccaaacgtgactaaattaagatgcatggaatgacacgcaatctcttagtaatttatactgttcggttcggttcaatcaccatcgccgcgcgtaaatcgaattattcctactctatctacctgggccagcaaatcaggcctctcttaattggctcatcagtttgatctatcatatcacaaaattcaataaaataaaatcaaatcaaatgaattgagctacaccaccatcggctaatcggctatgcaaaacctgcagaccatgcaacatttccaaaattatgtggctaaattcctgcagaaacatcaattaggctgtgttcgtttgtgtgagatagggtgagaaaacacctcgttttccgcgcgcacgcttcccaaaccactaaacgatgcgttttttataaaaattttctatagaaaagttgcttaaaaaaaacacctcgtttttcgcgcgcacgcttcccaaactactaaacgatgcgttttttgtaaaaaatttctataggaaagttgctttaaaaaatcatattaatccatttttaaaatttaaaatagtttatactcaattaatcatatactaatggctcatctcattttacgtgtcttcccaatcttctagactaataaactagctagctgtattctgcacaagtcaaatttgc

SEQ ID NO: 1956 - DNA, 1748 bp, Oryza sativa
catcagtatgctggctggtgtagggcatggttaaaggtttcccacgttttccgagctgtgaatatacttctattcagacgaattgcgaccagtcataattggcatcactatcagtctacaacctgctagacaacctctgtggtctgtgcatcagtattgtagaacacgctgaggcacataacagtttaatattttaatggagaacaaacgttattacaacaagattcacctttcccttgttcggaaggcaagttctatgcctagtcaaaacatagaaaattcaggtattagaacacatgaaagataactaggccctgaatgagcagaaagatgaacgggccaaggctagaatgggccctcgtgcacaacagatacaaagcattgagcatctctcttcttttgaggaaagctacagacatttcaaagttaagaactgttctctcaattagaagaaaaaaaaagcatgcaagaatttagctcaatactccgttcgtttttaaatgactgatagcaggcacgattcacttttgaactttgaccactagtatttttgttatatatttacaaacacaagaaatgatgccatgctattaaagtgtgttatgtcctaaatataagaatcaaacttttgttcaattaggtctaacaacttaagagcaaataatggtcaaagtttaaatgggaaagtcaaacatgtaaattatttagacacggagggagtaggagtaggctataaacgtatcaatagcaggttcacatatatcctccagtccccaagagaaaattgtcgtaccagcagtccccaagcattcctaacacagctccaagttgagaacacagttcttggttgtcttgtttagatttcaattcttccctgatgtcttgtgcacacatactgagccttgactttgcactttcaatgttctgtgcgcgaaaggcctggatatgtaaaagtcagaggtattatcaaaatatatatagagagcattaataaattaatacagagcagaggatgaaggatatatgcaaatttcaaaggtaaaagaagctgagcgtaactgaccctcatcgcttgctggaccagaaaagcccctctctccatggagacatcctcgtaaatgaccttggtcttgttgtcacttgcggcttccccatcgcctgcagcatgtgatctcttgattcgggcatggccatcaatgaagcggtcgacaaggccttgaagctcatcatcgggctcgatcccttggatgtcagcaccacacaatggacagtccttaaagcgcaatatgcatgccctgacaaggaaatccagtgttcagaaggtatatactattgacggacggaaggaattactagtagaaagctagtattgaaatatgatactacgcacttgcagaacttgtgggagcacggggtgcatttgctgctttgatgtagcagagcgtggcagaccatgcagctgagtgggccaagcttgaaggtgttggagtcatagccaaaggggcactttggtggcaccacacgaggatcggtgttagcattgccagttttttcattgtcgtcgtcgtcgtcgtcggtgtgattgatggtggttttgttgtctgatgatgattttacggggcatgtggcgccagcggaggcgagtttggcaaaggggcatagagagctcataatggggttggtcgtatctatcgtaggtggattatttacctgcatgaaagaaagattggtggcaagcagttgagtga

SEQ ID NO: 1957 - DNA, 2911 bp, Oryza sativa
attcctgcagcccctccttgcttcgagtatgctggaatgtacattttgtaggaatatggctgtctgaaggtaaatgtagttcatctaaaaaaggaaggtaaaatagagttaacaaaatgagcttttattttgaattcatttcgctgtcttcccctcctgatcccgaagccttttcctaggggcttagctcaatttgtcactgtatatatagatcgtccatcttgcaacaaggcttgaaagtgttactattaaattagttagtttttttttgatcggttcgatgcgatcagtgcaattcttgcctatgatgattgaccccgagataaacatcaatagttgtttatctaagggctgtgatctctgggtttatgggcttctgtagttaaccatttatttagtccaggaaaccccaggccttgatgatagagtccgtctgtgttgagtgagtacttttgttaataggtgggctcaaaggagagtaattatataagacttacagcgatgtgataaaaggacatcgaatgaacattatgaaccctccgtcccaaaatataaacatttttagcatagtaataagtcaaacatttttaactttgattattaatagctaaaaaaatagaaaagatcaatctttaaaattgatgttattagatttattattaaacaaactatcataatatacagctctttttatttgaaagcattcggcaccaatactcaattaactcataattaagcataaaagtagccttattcggatcacgccacacccagacaattcgcccattgccaatacaccatatgatggattccttggttttagttagtcgctgctcattctaatatcttacttttataggtattgttggtcaaagtagcatctcggagattgtgtcagagagtctaaaagagtttatatattgggacggagggagtatcaaactatccccatgttgacgaaaaaatcgaacccaccggtctaggagatctgcttagctccagtgcaggtccaaaagttgttgagatgcgggcgtgccagtcagtttgatcctgcaactaacaagatatgtaaatagtagatcaaaacagccgatcggctgacaagccgatggggtagttccagccgatagctgataatagccgatgccgatactagccgatagcgatagggtttaagcaatcggctatatgtccaatgtagataatgatataaaggcaatcggctgatgtaataaaataacaatataatcgagtagaaaccaatcggctagaaacaatatataataagcactgatcggaaggttaaagaatacatcggctggaggtccgatgtcataaaatcaacaagattatattaaacaattaaatcttattgcgatcagctaaatccaatatgtatgcaatccttgtaagccgatgcaacgtccagataactcatcggctgaaaccccgatgaaacccttattggcaatcaagaagtaggctagagattatggttctaagcacgacttagtagatcaaacttaactgatgtagcactaagtatgaaaagaaacacaatatctagacaatcaaaccgttgactgattttcagggtggtagatgcctaggctaatctaatctagcaaggcgatttagccgataccggcagaaaccctaaagcgagagacagccgatagagctaaattgagatgctaggactagattaacatagacatatgataaatagcgaggcaaatatattatccaaaccagagtaatccaagaggtcgaatgtcctgatgcagccttgaacgacgccgatgtagacgatacaattgcctggaccggcggaacattggacttatcccttcgccggagatcgaagatgatgcagccctgcgttgggtgccaagttccaccggaacgtaaaaacaaaagtagaagtaaaaagggtggcgatgcgccgaattgtattgatcgtagcgatagattacatagaccccgggtgtacatatttatacccatgggttgatacaagtccttgtcggaaaagaaagaaactttcctaaagataaaaggaaaatataaagtccttataggatactaaacacattttcctaaagataaaaggaaactaacaaactattcctaattaatagataacttgccatgccgcattctctttgaactcggtctcttctgaataagtttcctttagtagatcaatttccttaaccaaatatagcaagaatccgacaaataacgacttgacaattctcatcgggtaatctcaggacttcaaagccgatgctgactctaaaccgatgactactccgggcttaccaaatttcactgttaacacatgccccccagttttggagtatgagaattcatgcttcaaaatttcttgtcttgataactccaaaaccaatcttcctttgcttcttgcaatcggctttcatgagccgatactgatgtgctccaccatgctgaaactgatgcgcttgccccccgagccaatattgttgttcctccgttaaattctccaccttgaccatgatcttggcattgacttcttcttcagacatgtggataaaaaattcgtggtcccaccaagcgtgccaatttgtgttgacgaaaaaatcgaacacaccggcctgggagatttgcttagctccagtgcaggtccaaaggttgttgagatgcgggcgtgccagtcagtttgatcctgcaactgacaagatatgcaaatagtagatcaaaacagccaatcggctgacaagccaatggagtagttccagccgatagccgataatagccgataccgataccagccgatagcgatagggtttaagcaatcggctatatgtccaatgtagataatgatataaaggaaatcggctgatgtaataaaataacaatataatcg

SEQ ID NO: 1958 - DNA, 3630 bp, Oryza sativa
cagcgaaacattgagttatacgtggtcgaaacataaaattcagttattgaaacatttaaatttttttatgaaagacaatgaagacacatattgaaacatattgctatcacgtctgaaacattaaatttaacagattgaaacatatgtttttctttgatcggaatgtaatgatgtgatatcttgttgtaaagatttaattataacaaatataatggtgtgatcatatcatagattggataagtagttcagaagaaaacatattttgaaaatcatacagtgtgtatggatgtgtggtagacagggatgtaagtagtagttttcttgtctgatttttcatgttacggcagacgtccgacactaagcattttcgctaaactcttgatattttttttctctcaagctcccaatctagcttggcatgacgctgtcatatcgcgggttcgtcacgcttggatagtttgggcttagggttttgtgtttcgccttcccggcccctccgagtcccacacacgggaggcaacgtggggggtctctcacggtgcctatcaagtatctgatttgtctgtttcttttttcttttaaaaaagttggacctatgtaataagaattcaaatcctttagggaggaagaacaaacacgtgaatgtttgttataatgtgtcactgaatcagaccgttcatttttttaaactgatatggcaacgcaaatcatgcagaatgttaggtagacatgcggtcccatgcatgctttaattttgtgcctatatatccacaccaaaaatggatattagctacataaatgaatgatgaattaatgcaagaacacctaattagagtagtatatatgaaaactagctagtcgtatatatatctcacttgaaaattaagttcatagtatataataagtacaccatacaccatgcatgttgtaattaaacaaaataattaattcacataattcaatccatacagaggaatagcaggcatgcactgctagctatgtacaacacaaatcaagctgggctcacgcacaaatacacacatatatctatcacgcatgcatgtatacctatatatatcttgtatgtatatacctgtaactataccttgctatacggtgcacgctcacacacatacgtattgctggcagacacatattattagtagtacaatatagctagccatgcaatctataataactaataataataatctctcagcaaatctcactcacatcgatctcacacaagaagccaaaattaaaggcaatgcaaaagccatatgatggatgcataaaatggagtatactagctaattaacccaccaccctctgtcatcacactaattaagctcgcgcatgcatatgtatatatgtatgtatggtatgtatttcagtacttccagatggcagcgtccatgttgcatgccatcgacgagatgtcggcggcgttgttgttctggtcggcagcatcctgcggcgacaccaccagcgacgacggctcgctcaccacgaaccctccgccggccatgtccatctgctgctgctggtggtagtacatggacgggttcccaacaaactgctggggatgggcgccgctgttgatctgaagcgggaagcctgcaggcagagtggagtaggaaggcggcgccatgagtgagagtgaagcggtggtggagaagtcgtccaacatctgcagctggtcagacatggatggcatctgcatctgcatggggacttggatgatgccggcggaggccatggccatctgctgctgctgctggtagttggcggcggcgggcacctgatgaggagcaaccggcaccggcttcttgatgccggagctcttgtggaagatcctgcagacggcccagtcgtcctgcctcgggggctctgcggaggatggcggcggcggcggagaggcgtcggcgagcctgtactcgtgcatgacccagttggtcttgtcgcccttgggagccctgcccttgtagaagacgagcgtcttcttcatgccgatgagcatgtggtggtcgcggaagatctccttgtccttccccgtcgccttccagtatccagcctccgtcgccctgttcgtcctcatccccgtcgggtacttccgatccttctggcagtagaaataccactccttctccccattcatcttcgccttccctacatttatttatttttacttttcacatgcatcatatcatatcatataaatttccctaattatatatataatttctctcaattcaaaataatactagaatgtttacctggcaaatcccatggctcgcacttgttgagatccacctctccaatggcagcaacgcaaaagcccctgctgtccacaaccttgggtgcaaggtaaaaggtgataatctcctcgtccgttgggtgaaacctaaagcccggaggcaggtccggctgccgctccacctgctgttgctgctctcccatgctcaccacctactactgctctcaacgatcgctagcttcaacctgacatatatagccaataatacatatatctatctatataagcaaatcattaaccaaattaatttagcaaatcgatgtagtatgtaaatgccaaaaatctcaacttctagatagtgcaaacataattaagctatagtactcttcatatattgaacatatatacctcaacaagctcgcatgcaaattaacaagcaccccaatgtagaagcgaattaagattgatggatggtgttgtgatgaatgcaggaagatgtaggccggagggttgggttaaataggggggacgcgtgtgcacacaagccacttgtcagggaagactccatctctactttaactcctaccgttgtttgtttccgatggtctgtttcatctttccaattgtgaatgcttatgccccgcgtgccatctatggatacatcttctgacgggctcatttctctatgggtgccacagctggaatcgatcgatataccgaggctttactgtcctggctcgtcatattcttgcatcgagatacatctatcgttatgatgtatcgcgtgtttggctactttaagtcctttagctatagctgcattgctttaccatttgtcttgatcgtttttgcatgcttccctaattgtctcgctgcatccaaagtgtatcgctttattgttggcttaatgctcacaagcaacaccgatcctcatgttgatcacgcatatacagtcaggttgttgctaaatcttgtaggataaaaagatatatcaatccagacaatataattaaactcgcgtgcaaagctagtgctagcatagtcataatcttgtgatctgcatatagaaacacatggctagagtaaagaagaggaaaaagaacatgagaaatcgagatgattctattctacctcagtacaaatttcatatatatgtagtagattcaaacattcatatgtgtcacactgttttaataaaatggctcgaataatatatatacttgtgtgacgtggatcccctcacattccagcaatcccagagggattcattcttatagatagatgtataaaaaatgtttcgtatccttcactaaaacagaacacgggtagcctgtccataaatagtaggcatgtatatcatatatattaaattt

SEQ ID NO: 1959 - DNA, 987 bp, Oryza sativa
ccgtgatgacctttcttcaataaggactatagccggtggtagtgtcgccaacacaattcgaggtctcgcagcaggttttgggatatcaactggaataattggagcttgtggagatgacagccagggcgttttgtttgtcagcaacatgagctttagtggagtagacctcacagattaaggacaaaaaaggggcacactgctcaggtagtctaaaatctgaagccaatatctatctattttttgcccttattttgctgcttagtggataaggctgaaaataatacctattatagtgtgcatgcttggtcgatgcaagtggcaatcgcaccatgcgcccttgcctatctagtgcagtcaagctccaggtaacccttgcttgatgcagtcttacactgttacttttctcttaacagtcgtaggcttgatacgatcatttactcattaacaggccaacgagttcaaaaaggaggacttcaaaggctccaaggtggtccttttcctcttacgccacattctgtgcacacaaattccagcatatgttaccatcacacaaaaaatcttactatgtcataataaatatgtttattttttgacatggaatgtttttgtcatcatgatgtaatgcagtggttggttgtacgatatgcaagacagaacatggaacagatccttgaagctattaggattgctaaacaagaaggtctctcagtatcattggatttggctagttttgaggtctgaccgcagctcattggtaccgtaaggtctttttttggtacaggcaccagtctgattttgtttatttattacacagatggttcgtgactataggacacaactcattgaccttttggaaactggcaacattgacctttgctttgccaatgaggatgaagctagagagcttctagggtgataccctcatcgccttattgtttcagatgttcttcagtgagtgatacctattatagtatatctgatgtgtgc

SEQ ID NO: 1960 - DNA, 934 bp, Oryza sativa
attcctgcagccccacttgtcatccaattgtttttgtagaaagtcgagaaccgagagacgctgcaaaagtattacagtacatgataaaagtcagtcgtcgagagcaccacaaataggagcgcatggatgaaaggcagtacacaaggataagtagtagctacccgctgctcaagactggcctctccagattccagcttcaaattctcaaggcatttaattgcttcctcaaaaccctcaactgccatgctttcgttcccaagatttctatcgacatccgcaactttggcaagagaagttgctacatcaatgacctatatccacaagtagacagatcatgaacagcaaaagaaaaaacactcaagaatatgtctgttccatgtagcagctaaagcctaccacaatcttacaaaatgctttgttatcttcttttggttctactgacattaaaatttagagaagataaagggcttgtttggtttgcaaccattttgtgtgttgtacaaatttctgtgaagttgttcatttggtttgtagccaatactttttatgtgtacgcgttttaattggttttcattaccaaaattttggcagtgccaattttttggccacagactaagtaatgaaataaagccatcatctcaatggtattgacaattttattggcacggttgaattgggaacaagcataaatataggttaaaagatctgtagccatcatttatggcaaattgccaaacttcctagtatggtctggcacttgctaccacagacttcagacaacaatttgcttcagagaaaggaatacaaaaattctgtgtaggaaccccttttttacatccatttttctctgcctactagtatgtattatgtgcaatgtcaatcagtaccaggaccatgaattatgggataaaatagctactggtccatgtgcaat

SEQ ID NO: 1961 - DNA, 595 bp, Oryza sativa
ggtgcggacattgggagttcatgatcttgtcgaaggtgttgacgcgcgaacgtgtgtcggaggttggcgcagtagttgccacaagttcctcgggcttacgcttgcgatccttgtgatgagtacttccactccccccagtagtcggcgtatctttcttcggcttccaagtggtgctcgactgcttggacgtggaaatagcatcttcggctttggcatactcattagctttttcaaacatctgcttgactgtcctgggaggcttacgcccgaacttgccgactagatcttcgtggtgaatgcccttggtgaaggcggcgatgatgacgtcatcggtgatgtcggagatcttattgcgttgttcagagaaacgtcggatataatctcgcagggattctctggacttctggacaacgttggaaagatcaactgagtgccagggcgttcgaaggtgccctggaaattggcgatgaagtgttcgcgaagttccacccaagatccaattgtgccacggggtaacccgtgaagctaggaccgggcagaatccggtagggccacaggcagattattcgccatgggtttgctatctcctcctgca

SEQ ID NO: 1962 - DNA, 2712 bp, Oryza sativa
tacatcttcttcttcttcttctacactcgcacacaaatttatatataaaacaagatttctttttttttccccgccacctacaccctttcttcggctacactttctccgcacgaccatgtaaatgtaatggggataccattagtatattattaataattaatttacgacctgtgttgtgttcatcctcatgtctgtcacaccttcttctttaacttcactatactctactgtgtccttgtatcagatgccagggttctcattattcatacttactaccttattattattattattattattattaactgccacccatttctctgcagcatcatgccctgatggttggcaaatcactcctgctctcgacaagtgtttcatctacatacctacacccctttcttgggacagatccgaggctctctgccgcaacaacttcaccgctcatttggctgccctatcatcacttcaagacctcaatcttgcaaagtctctctgtggaccttccccctctggatgctgggtcggaggtcatcgcaacaacactgcctcggcttttgcttggaaatggtccgatgattcatcttcttggaatgatactgccttccctgctgacccattgcgcgccaactgcagcactactgggtgtgctcttgctaccaccaatgatgcatgcactttggttaccaatacccatgccgcacttaccgcaaaaagatgcagcgactcacatggactcatctgtatgatcaatcatggtgagtatcccttttgctaatactggtgccatctgtataatctattatctctttatcacaaatcattatttcctctcaccatatgcaaatatgtttgttctgtactgctgatcaactctactttatgtcagaagaccgatgctaccatgatcactgccacaaggagtatttcatagtgctcgtcgttgtaagcggattcattctcttgaccactctagcagtagtagtttggctacttgtctataggcgaagcaagaggaggagaagatcgcgtgaaggttccagtacttcagctaccgcgttagttccaccgctatggaaagtgttcaccagtgaagaacttagatcaatcacaaagaacttcagtgagggcaaccggcttcctgggaatgcaaagactggtggaacctatagcggaattttgccagatggatccagagtagcaatcaagaggctgaagagatcaagcctacaaaggaaaaaagatttctactctgagattgggagagttgcaaagctgtatcatcctaatttagttgcagtaaaaggatgttgtacgatcatggtgaccgctttattgtttatgagtttgttgccaatgggccgttggatgtttggctacatcatgtccctagaggagggcggtgccttgattggccaatgaggatgagagttgctacaactcttgcacaagggatcgcgtaagtcatcctagccatctgtacagaatctttgattacttgcctatttttcacaaacatgttactctacttcttactgagatgtttaggtccctctaacatagatccatgcataaacctagcttgcgtgcactcgtgtgcatgcagatttttcgtaccgcttgcatgcgcctcctgcactaatttatatccagacctatttggaactcatttgggttaccattttaggatggtttgtctttgcattaaatttcaaggtttcattcagagttttgttgtttcccgtcattcagctcccatggttgatcattatatgtttttggttgcttattaattgacaccggtgggctgcataaatgtacgtggtagcatgcatgggaaaccactaagtatacttacactttaattatgtcataataaagacaattagagaagccacctgttgtcttacggttctatcgctgcaggtgcatgattctagagttctcgaattatattgatggcttctacatccatataatcttttaaagctatattactcaagagtgttgtttgggttcccgtggaactaaaattaggccaaatgcgtatacgtcaatgcaagcccttatggcgttgtgttttgttttgctactattagttgctatttacttaccagtgctcattttgatccagatttttgcatgacaaggtgaagccgcaggtcgtgcaccgtgatatccgtgcaagcaacgtgctacttgacgaggaatttggttcccatctgatgggggttgggctgtccaagtttgtaccatgggaagtaatgcacgagaggactgtgaaggctgcaacctatgggtaccttgctcctgaattcatatacaggaatgaactgacaacaaagagcgatgtctacagctttggtgtgctccttctagagatcatcagtggccgtcggcctactcagtctgtcgagtctgttggatggcagactatatttgagtgggcaacacctctagtccagtcacaccggtacctagagctgttagacccactgattcaggagttgccagatgtaggtgtcatccagaaagttgttgacttggtctatgcctgcacccagcatgtcccttcggtgcgaccaaggatgtctcatgtggtccatcagctccagcaacttgagctaaagtcagcagcatcagaacaactgagcggcacaagcactagcgctacatctccaatgttaccattggaggttcggactcctcgctgaa

SEQ ID NO: 1963 - DNA, 4558 bp, Oryza sativa
ataatatttccattagcaaaccttagataatgaggtttcgatcaaattctggacttccttggtaccggtagagttgcaaggtcgactcacaactgggagaggcagtatctcttcagatccagcaagcctctacagcatgatatgctcttactgttagaaccaagcaaaagcaaaccacatacacttgcaattacggtaatggatgttcatggactaaacaaacagcataaaagtgcagtgcggtgtgccttgaattattattgcaatagagcagggcggggggcgtcgcctgtaccctcagaagcatcggtcccttctcagatggttggagaagataataacactcaagggatcctatcttcatcgtttcagtattgcattttgaggagcacacaagtccctgatcaagcttgaaaagtgtctcacatagaccatagaaaactgcacagaatatgagaatacacactatagatgttgaaatgtcacgaccatttaagaagccaaagacatattgcagatataccgttagacctacgttgggtgttctgatctgagcactcatcatcaagagcaacctcaacatcattagagctgggaatcacaatatgaggcgtcccaattatgagtcctattaacagagtttgccattaaattttgtacggagaagatacagagcctctaaagactaactaatgtaatgcctatcacaatagctaacagtgttggttaccttcatttagtgaggctaaattggtgcgctcaatcacgtcaaaagaaatggaggatgaggctcgtcgcaagcttgaaacgccttctgagtcaggaagaaacagtactgtctgttccccaattttcacagcagtatcagtaacatcagaagctgtgagctgtcggctagttattgggcacatccattttgccttatttgtgttagcaaggtcaatagggcgaccatggcacctgcatatctgttcaatatggtctggattaacataggtaacataaacctgcaagaagctacaggattgcttaaagtaaagtgtgtagacatgatagttattgtccgaagtaaatgaaaagctaaaaaaagggcatgatgaaatcaccaaatccatatggcaaaattccttcagaaacttgcaaggacaagatgaaagtgaacgtcaaaagaaattaaccaccataatcagtacagttaattagtaatatgtgacacgtataaattgcttcacctgacatgatggaaaaccatcaatgatgtgatttgctgaagcatacatgctgcaagatatttgattaacagtgctgataatgggaactctgaatacaaatacagcctgcaatgcctcctccttgtcatcctttagctcttctaaccacctcttgactaatccatgcaaaacttgagtctctgcatttccaagtttgtagttacaggatgacactattatagtttgcgttaatcaagagggttgttttacttgtatataaggagataaacaagaacctcaccaggactgtatcttcgtaccacacagttttcaaggtcacaaattgtgtctatgaaaccattggaattttcagaaacaccatcacatacgaatgcagctcctgtttccagcaatacaaactccactgtaatacactgttctgctgcgtcctgatgatgtcaaaagaaaaggaatattaagcgggttacttgatcccttggaaagaaagttgcaaagacaatcgtccacaccatgagagatcttcggagagcttgtgtgttttgtgcagacatacataaagcaatcacttttttggaggtatcatcagtggcccaagaatagatagctcgattgctaaaaagatttgttaatgacacatctgcagaggagaaaaattgagtaagataatattttttgtatttgaagagcgtgcattgtactcagttagagagcagagattcagtcgtttatgttgcctagtaagtttggttatggaaatgatcaaacattgaacacggagatcatccctagttagcatgaatataattattacctccagtagtatgtagagatccatgttggttaggacgaaaggcatcgagaggcaaattgttgacagcatgatggaagtctcgaaggttaaatttctctccaggcctatacaccaccttgagctggtggaagttgacatgttatgttagtgagtttgggaaattcacaaaagtgaggggaggaatatgtatttggctggtttgagattagtgagcaccgtaaatagaaatctacttacatgagcatgcagtaacacattttatatggtgagtcggtattggttaagttgttcatgaaggcagcttagtagtttcagtgagggatatgattggcaatcaatcgagatatgaatgatgcaataaaaaacagtagtaattccacaatgagccacagacttagtcagtgtatattggccatcttttacaagtaaaacaaacagctcagatttgcaaagcatgtagagtgaaaacttaaagaaaaacagagatgaatccagagtgcaaacatccagcatcgcagtgagaaacaagctcattatctaaaaattaaaaaagaagaatagtcagaaacaagggcagttacagataatagagattgtggtgtgtgatttactagtgatggtgccggttggttcaatcaatcatttactgctagtccactagggagtgaagaagtatggcaatcggggcagttaatagagagagagagagagagagagactaaaattcggaaaagtgaaagtgcaggcaagagaaaaacgaattaaacctgaggaggcgaggaggaggcggcggggtggacgtagcagagggcgaggcggtcggggaggtcggcggaggggatggcggcgtagaggttggcgaggtggagtaggcactgcatgcgtagcgtagatatatagagcttaattaattaatttgaagtttgcttgctcgatcagaagtagccgccatggccgccatagccgccaccaccaccaccaacacgaggtagaaggaggaggtgacgtcacgtcacctgcttgaggaggtggaggagcggaggggggatgttccgcatgtcgagcaggaagcagagcagcgccatggatctcgatctcgaactctcctcctcctctgcttctccttgtccggccagatcaaatcaacaaaaccaaatcgatccgtttgaatttcggagacgccgcgcgagccaagccaagccaagccactctttctttttcaatatgcgaccgactcaacctcactgacctatcctttctttttcttttctttttttttttgaatacaggacaggagggaggaggagtataaggacataaatcataatgctaatatacacatgcgtaaggccatattaccaataatggtagcaattggatatgttttttccaaattattaaaatgagattatttatcccacgttttggaaaatacgttttctaaccacacatttttctatcgcattattttaaggtactagtaacatactcgtatgttctaacgattatataattagaaatgtcttataaggacaacttttttaaaaggaaaaggaacttacatcgctttagctaataagtcctcgcacacaagatgcgagataaaattataacttccatccaaacacacggcaggagaatgacaacttcaggtaaaaaatattagagatctgttaagtttattttttaaaatatttattacctccgcctcaaaatactcgtcgctttgactttttatttgcaccgtttgaccattcgtcttatttaaaaaattagtctaaataaaaaagataaatcttacttaaattacttttgataataaatcaaatcacaaacaaaataaataataattccatattttttttaataagacgaacaatcaaacgttaaaaaaatataagtattttgacggaggtagtactcccttcgattccattttaattgacattttggacattgaccttatttttctattataatatgtacaataaataaatgcatgttttacttttattatagtgctttaaaagacaaatctatatatgttgttttagtttctttaaactaaatatttttaaagttattgatggtcaaagttataaaaatttgatctcaaccttgtccaaaacatcaattaagagtagtatttaattattcttataaggaaactgatctgttttcagggctggacgccggtgcgccctgaggagaggagagcacacctagaagaagtgacgacgctggcgaagtcagctcagctagctgctcccagtgccattatcatcatcatcatcagtggcttgctgcatgtcatatatagtaccaccataacacaaggggcgatcataaattagccatcactcaggaagcacaagccatgagcacttgttgcctcacttgtactagagtgtctactacagtagtatatagtatacaaaagaggaacttggaatttaaatagtagaaatacaggaggagcatcatctatctggcagtagaaatccccagaacaaat

SEQ ID NO: 1964 - DNA, 846 bp, Oryza sativa
agttgtatggtagggaggaggaggtacctgctgtgaaccgccgcggtcgccggggatgcggttgaggagggaccagtcgacgcgcgcgacgtggtcgatgagcgccgacagctgcaggcccagcaccatgggaggggcgtcgccgtcggtcctcccaacaggggtagggggagcgggagcgggagcgggggagggagacatgcggtgctctgcctccgcgcccatgattttccgttccggcgacggcgagaggcgggcgagggtgggggtgcggcggctaggggccggggagggagaaggagaacgcaccgctcctccaggtccaggctccagctctcaaggaaccaatgcccccattttatagcatcttccttcctcaccactgctccttccttccttgcatcaatcttgatgcaccacccatccctcccaactcccaacgagaaaattgacatttaaccattgtcaaaacggggtttcgctggaatgccactcccaaaagtggtttcgttaaaatgccaccctcaaacaggggcaacttgttgcaatgccattccatccatttcttctcagtttaatgttttttgtaatgtttttcttgttgagatgaccaaaatacccttatcctatctcatctctcctctctgtcttcctcctctccgttcggctcggcggcgcagctagagacggagacggcggcagcgcggccggagacggggaaggcggcggcgcgcttggggatggggaaggcggcggtgcggacggggacggtggcgacgcggatggggacgggaaggcggcgacatggctggggatggggacggcggcgactgggacggggacggc

SEQ ID NO: 1965 - DNA, 2289 bp, Oryza sativa
ttcctgcagcccatcaaaaatgagcgttgcaaattgcaaaacaaacactactagacttcaactttacatcttgcattaaaaaccaactgtttatcccaccaattcacaagacaaaccaaaacgcctcattctattatatgttcaactacaactgaatgatccaagtcaaaagctcaggggaattacctttgaatatgtccaggtgcactacattttgtggagacccatttgaaagcttttgctctgtagatttctttgggcctgtgatcacttttacattgaagagtgatttatccacctcagtagcaggagcattgttcccaaatggagatatactgaacccctcatcaagcgcatctggtatctccacgtaggtttgagttgtaacgatttcatctgcgctgaacccaaaagatgccctgtatgcttcaacctcctcaacatcttgtttgtcctttgagacactaatcctcccaccattattatatggaaatgactgctgagcctgatccaggtagaactgggcagatgcagctggccgaaagaagttattatctaacatgtagtttctagaggcggctgaatcaagcccaaaaatattggacggtgaattcctggaatatggtgtgtcacaggcagacctagaagtcttccaatgtgcggtgcagacctcttgctcagggatgggcgaagccctggaatatggtgtgtcgcaggcagacctagatgtcttccaatgtgcagtaggcacctcttgctcaggtataggtgatgaaagaccagtccttggagttgctgaagcaggtgatatgaggctgcttgaagggctttctgggtaaagcggataagatgcctggagccctgaacctccagaatatgctgtagataagtacggcatgttgtgatctttgccagcagttttcagatccatagatgacaaaagaaaccgcgcatatggaacatctggagaggagggagtagttgcatgagctagttcaggtggaggggtcagtggtgcagtggaaggctcggtcgtgtaagttgagaagacaggtggtgagacaagctgaggctcgttagcatatggcccaacagcaaacatattagatgttggcccacccggagagtttgcagatattgacaggaagcaattaggtgattgggcagtcgaaggaattgcagaattagagaaggacaccggagaagacggtggagcaagaagagataaattcagagccgcactttggttggaattggcaccagattggtgtgcatttccacgactagttgacgcattcccatcaggtacacgtgctgcaggaactatacgcttcccacccttctgtgatccgaaacatgacaagccagacaaacagccagcccatccactccgctgataaatgtagaaagttattagttgttgcaagaaatagggagggggggggggaaatcatccagcattccagcttgattttatgaagatacataaagttaactccaggaatgaataatgaactaatttacagttcaaaagcaacatactaatccgttcaaggctataataatttttatagggctatttagctcttccctgtcatttttatgatctgtgtagacaaacagcattattggctaattattaagcatggaaactacaattagagtgagctgaatataacaacaaataagcataaagagaagtgtgcggttaacaaaagtaagacaattaatgttgtcgtcatatcatgtaattgacaggaatgtcgatggtcttgaaatgacataaaacatccttgcatgctacaacgagtttaagatggcccaattgcaagttgcaaccagcacggagacagtacgaacagttggtactgagtgagtaggaaaaggttgtaaggtcgacaggaggtagcaattgcaggtaacaagtagtacgaaaaaaagcaacagaaaagaaaagatgaagcaattgcatgagcagcaagaagatatagtaataccctatcctgctgtggtgggtgggagtggaatctggcctccgtcgcagcagcagcagcaacattcgctggcctgctgctccctggtgtagccgccatttgtgataagagaaggcgcggcgcggcgcggtcacattctccggaaacacaccgacgaccaagcttgggtttgtcctacggatccgagctgagctcctagtagaggtagaggaggagaaattagaagcagcaatcatagaagcagtaatggacggaggaggagatctcgacaaactggttactagttgtattaagg

SEQ ID NO: 1966 - DNA, 12111 bp, Oryza sativa
acgcacgcgcacgcacgcacgcacgcaaaacccaaaaaaatctcgggggtcaggtcacagatcgggtgcggaggaaaaggtgaaatcctgccccttctccttacagggaggattgacaataggctgtccaaagggatagaggggagatcatggaagcgtaagtgacgagcgccaagtgcaccttcttgagcggcgtgtaggctggcgccttcgccgcggcggcggaggccctaggcttggccatggcccgcgtcgatctgagcgacagtgggtgaaggagatcgagtgaggcgccgagacgagaggagaggaagcggcttgacttggctctggctcctcgtctcccctgccttcctagtatgcgtgggtggggcagagacagacggggcccaacagggtggaatgcccgtgccggcgagtgtttttgtgtgtggattgtgggtgtggatcggtggttctcgcgcggatcggagggcggcgcgtgcgtcgggatttccgccccaacgcaacgcgcccaaggggaggggatggatggatggatgggaatctttgcgacgtgcatggcctgcaagtacgcgacgaagcgacggcactgttttctgtttatttgtgtccactgctatgcctggccgtatgacacggggggatatttcgtgttttccttggtactgtagggggggtgatacggtgatgggtgatgagcgctttgtcagagtatttcaatatttgccaattgtatcgggagtttttttaagctaggaaaaccgtggtctgggtctgttggaagtatatttatttcatatactgccaattgacagtcacacacatggtctcatgtaactgtcaattgtgactgtcaattgtgagcaggtcggaggataagtgattagggatttcttatttaaaggacaaatacccatcgttgtattctataattagaagaaaatttaaatgacaaattcctctttgaattcaatttgatctggaaaaaacttccatctaccaatcggcttcttttcttaaccgaatcaactaattttggtgttaatacgatccgattcatttttatccccactgagaccaatgggacccactctaatttctcccacacacattataaccattgtactctttccgtcccaaaatgtagcaacctaggatgggatgagacccattataggaatttgaatctggacatggggccataactgctattttgctatattttgggacggaggtagtaggaagatccatatttgctactactacttacggtggaccacacccttattgtcaactgttacacatcattggccttgcccttaatgtgtgagagataagagcagttagccaggtacaatagcagactattaagctaactataaacatattttaaagagataaaagaggagagagaagagcagtgagctacagatttataatcagctgcaggacgaactccaagacgcagtgtgtgtatggcaggtgggaccatgtatcaatagtgtaatatatgtttataggtaaatattgtatgaattggctattaaatcgactatagatgatttggagttagtagttggctatacttttaaacttgctctaagacaacgaaacctagcctcgttgcaaccaggaggccctgtttaggtggtgtttggatccagggactaaacttgtccctgtcacatcgaatgtttggacattaatttggagtattaaatatagactacttacaaaactaattacataaatgagatgtaattaatccataattaacacatgtttactatagcatcacataggttaatcatgggttagttaggctcaatagattcgtctagcgaaatagtccagggttatggaatagtttttatttaatagtctacgtttaatacttataattagtgtataaagatgggatgtggcagggactaaaaatttttagtgctatgtaaacagcccgttagttaccaaaataaaattttcacgccgtcatagaacatgcataaagtataaatgtaaggaaaaaacaattacacagattgcgtgtaaattgcgagatgaatcttttaagcctaattgcgccatgatctgacaatgtggtgctacagtaaacatttgctaatgacggattaattaggcttaataaatttgtcttgcagttccctagtgaaatttgttttgttattagactacatttaatacttcaaatgtgtatctgtatatccgatgtgataaccaaacccaaaaattttccccaactaaacaaggcctatgaacaatagaacagaaggctgctgccttgtctcctcttcctcctgattcttcccttcctcaaacactctatttctctagccccaaactcccaatcccctgctactttccagtccaattgcaggtgttctccgcggcaacaatttggagatcctgctcacctcccaatccggtgcacgccaaatggaagtacgacgaggtctaacagcacaacaaactcaacgcagtacagaagagagaagctccataccctggtacaaacctccagtaataacccaggaaagaagagggagaataacatgcacaatggactggacgtctccaggcctgcctcttgcttataatggttaatggtgtggttttataaaactttatataatactataatacccgaagttatgtgtcacgtgctaaaatctccgaggttttgtgcaacttaaaccataatagatgaagctttctaaaaattactctattaatttcgaatttcaaaattaagttaatacatactaaattgagatgtgtacatattcatatttatcaattcttgatataaattatttaatcttcttggataatgaagagaaacttagacaagggcaaaagtatcaatgcaaatgatagtcctacttagaaatcatattataattgccaaagttcaaaaaaaaaacctatttagagtgggattagaacaacaattataatattttaagtgatatttgttataatgtcatctcccagagtgggtatccaatgttctggaataaagataaagtatgtccccttttatcccaaaatataacgatttgtagtatttaaaatttattccacaatatggcaacctctccatatactcacttatctcaactatcacaaccatctcatatttaatttctccatctacttccatatcttaaccaagcacaactatctcctatttaatttcacctaatagaatatacatgaatgcaaacagatgtgcaagaaattacagttatataaagggatatcacctgacaaaatgggacaatacacggatataactgctatctctgaccgtgatgggctcccgtgctcatagatccaataccattcacaggtgaataacataggcatacttacatccaggcactgatcaatggacatgaaaacaaaacacgtatttaaatacgaggtcaaagtgacacttggaaatattgatatgaaaaatccattttcaatcatggctagcatgtgaatcgatttgctgtccatcatgaagatgcccaccatgctccatccatgtagctactgcttagatttttgaggtttgaaaatgttgtcctcgtagtatttcagttcagcgatgctttctttgatatcattcattgccctatgttttttccctttttgaggagttcgcttcctttctgcgaagaacgtggcaaaggatgtcaagtttcatcgatatatttgcacgatttatttcacatcacaggagatcttgaatttagaatttaatgatgcgtggaagatgctggcacagccagcaacatgacctttgatagaacaatgtcactacattgaacctcagtagaactaaagctctaatttgagttggcgcaaaatctaaacatctcctccctctgttgattaacataggcgcacgttgacttcacacaaggatatagatgataaaaacttgaaatgcaccacaaatgtaattattttgggattatgaagatgtgggtggtaatacataaatgcatatgagagagagagagagagagagagagagagagagagagagtaaaaaagatgcacagtaatgaaacctcattaaaaagcttcatacaagacaatttttaacaagaccattcaatttcaaactttaggacttacatttgtcaatggagggagcataaaacaacaactatcatgatgttaaaatttaacagggatatgtaccaggctaacaaatgctgtcatttggctagtttttctactgaaactggagatttttctttttgtttggaaacaaactggagtatttattcatggcaattgtttagttacaccctggctctgtttcataatagttgtgtactttcacgacttcagttaagaaatctaaagtttagcaattgcaatgatcctactcttagcttgatttttagtgttgagagagtgatttactagttgtaacgtgtcatcaaataagggtatgtaaggatcaagatcatagtaggcttggaagaatattggcattgaattgttttatttgtcttctcaaacatcataaataaataaaaaaagtcttctccatagtatcataatacgagttgcaattcttcatggcattgcaacacttgaagcaaaaatactgttaagaaataggaaaactgtatccctattggcagacaaataagtgcagttaccaaataaattaatggaatatcccagacttgataggaattaggaaaacagtcaaacactaatactcatcaggcagaacttaaaaaatttagttcacctttggggtaccatctgatgcacaaagccattatactgctcacatcaacaataacgtgagagaagatggctgcaagctgcggcatataattctgtaaagaaaagtataaaatagaaatatcatcctccaagggattataagtcatatttaaaatggaaaaaccttgcaaaaatgatcaatatgttatgcctagtatcgcaagaaatattgagcatatatttgtgcaataacatgcgttcagagtgaagaattcataatgggcagatgtgttggtccatgaccagaaaatgtccccagaaaaaaatgctcatctcactgtgtatcatttctcactgtgttgcacaaagtaaaagaaataaagcatcaatatcccagctagtatatgacacctctaaagggcaattcttactaaccttcaaaaatagtaaatccacataaacagaattcccagctattaatggaggagatgaaccaacatgcttcttaacaaaatctaacacctgcaaatggaccaacagaagcttctattacaaaaacattagtgtaactatgtaatctttcaagatacacattaatttatatcttgtcatgggcaagccacagccatggaggatgcaaggggctcagacaggggacgctaccagcagcacctaattaggatttaagatttgtgcagttatctctagctcgttacatagtcatcattccatcagggagtcaagtagactaacccctgtagttctgggcgtaaactagacctataggaatacaatatattactagagccacttattctgacaaatatcatattattcagaatgaggataagtaaatgaaactatactgcaaatttaaatcatgatgactatttgatataaatacatttaccaaaatgttatacgaaatgtgagtttcaagtagcaaataggcaactaaagaagtcctaaactacaccaaaggtttaaacattgagacatattggttgagtgatgtaacttcataagcatgtctaccaatatgttgaaaaatacgagggtaaacatatgcatacttgtgtctctgcgtcatgctctgaaatcgtactctgtagtactctctgtgtcaatcctacataagtttcacatgtcataagattaatatttagaaaattaacacacaacaagaaaatggtactttgaatataacaaacaacctctctcttaatgaaatgatacgcagatctcctgtgtattcaggaaaaaaaatacaaacaatttaccactagctgcatgatgagttttgcaccattcatccatgttatctaacagatctttcttctgatttataaccaaatcagggccctgcataaccaaaaacagtcatgtcataatattcaattggcacctgaacaaagaactaaggaacagactagattaacaaatagctgtgggtttcataacatatgatatttgtagcattcaacggtcactcatctagtattaatcaaaatagcggatgtgatgaaaagaacaccattgtgttgtacgaattacagtatccagaatatatgtagaacaaactacgaaggtatttaaattcaactgccacctctatttgttttgtaagtttaccgtccgttatgatgcaagctatctccaatatccgatcctttgcaacatccaaacctacattatccaataagtgagttcccattagtcctacctaattattttaggtatgatgtaaaaaagacaaaacatgatctgaaatatatttcttttaactatacataaaacaattaattgagagaaagagatgcaaagagtgattaaattcccaactgcagcaaccatcatcagatcagaaatcaacaacatttagctatcactaccaaagttccagtattatccttgttattggatgttgaagaccaccaactaaccaattatataggatataggagatctggagataaccatatttggttcgaaatttgttctgttgttcattagaatccaagattatagcccgactaatgaaacccacacatcagaaatttgatgtatgtctcccttttcacaatgaacaagtgaacaatggcttgacaccatgttaatagaccactgatattctgtgaaaaatgctatatcatccagaccgaacaagtgaacaatggcttgataccatgttaatagaccactgatattctgttaaaaaattactgctatataatccagaccactgagcaatcttgaatgatttgtcatttacatatcaactgtgtgcatatatacttattaaaggtccattaataacgaaatgataccatatctctccttagagaaacattataataaaaataataaaacattctattctgaagtatgataaaaacacaaactgttaggacgaaaaaagtaatgaaaatgcaacataaaaatgaattcttcccataatgttgcaagataaacaagtgataactcaaaaaacacaccagtcatttccaagtctatccacaccaaaggcatctggtaatcaccagatgatgatacaagagatccttcatcgtaatttagtaccaacgtgtcactcagcgcattttcacctgcatggtggatgcaacatctaaccccattaatgaatatatattgattgagaataagaaattcaatggaaagaatcgtataagacatgaacataagtgtcagttgtagttacaggtaagaaaaagggtcttccttacatgtatcataatgctttcatttgcttaatgaaaattcctttatctaataagatacataccatgacgctggtagacatgcttatggaacaagtccattgtaaataaattttcaacataacagaaaaggaatttattcaagatcaaacatcaaatattctaaaacatatagggcatgtggttataatgtcaaaagagcaaaacattttgcaaggctaactgaattcagtacaaaagtaggcaccgtggtttgctggatttttttttaattcaagttaaattgtagtccagtgaacccccaggcatactatacaaaatgtaactgcttaaactaagaatactggagtaaacatgagttacagtagcaattctctatgcaggaataaagcagcggaaatctatatcagcgtaatgccataatccattacttagtttactttagaagaacaggggtaacaatcaggttttaccggcatcagcctctttgatgctggaagatgtttggatcagtgcttcttctgtatcatctgctccaccaccttcaccatctagatgaagaaccaagaacttgttcgcaagctcactcatctcccaaatttctctttcagctaatttaatccacgcaccaaacttctgaaaagaaaacgagcacagattgaataccatcaaacacatgtaggtcctcggaggttcaaacaaattagctgcctagtagtggatacatgcaagaaaagtaaagctagcatatcactacctctttcaacatcatgtttaggaagttgtcaccatatagtaatatattagttaatctttgtacacttcgcccccaaaagcaagaacgctttacctttcccacccctactctgaggtttacaagctgcacgaggagattaaggccccgcccttgttgaaattgctcgataacagactcctcctccctcggcgaaggtgcgcaccggcggtcggcggtcggcggccggcagcggcagacgcggaatcgcacgcacgggcacggagcaaccgaggctgaggttggtttagggaggaagcgctgccgggggacgccggagagctggtggccctttccccaccgtgaccaacctcggtggacttaagttgggccaacatcggtggcttcggcccaacagagcggagccgaactgcaatgaaaaaaaaggggaaaacatccaattttggatggtggtttcgttccacacgacaggttgacatggtcttcatctgttgtggcccctatgtggtgcttatatgtcattacagttataaacaaaatataaataattcatgagtcccatctaccagtgacatagctaatgccagtccaatcctcctaagcaatcgttggtggtggcgtctttgtttgctgaagctcctttgctactgtcgccgatgtgccaccggccttctctcacaacctgccatcatgcttcaagctccttgcgcatgcaacaagggtgatgagggagacaagggacagcttagagactgtgtggcgagtgtctcctagagctacattctaacaactggtgcaaattgttgtcatggtcattgtagcacgcagtcgtgaaaccgtgaccgccgatgacgcactcatgtacctagtggtcgcgggcctatggatctgccacgtaggcttagctgcctcgaacatcgcaatccatgtctgcgataaggtcccccgagtacatgccgtggtgtttgaggtctctgacgttgccattctcgttgtagcttcaatcatcccgttactttgttgctacacctcgtcctactcaccatctccgacatcaatgatgacatcgagccagagaagatactacaaaacaaaaataaatgcctttgggtccaatttcgtgtgtgtccctgcggattaccgtatccatatcaatcaattctaaattgcacaagtttgtactcagtaggatcgaatataaggaccaacctaccagagagggtgaatgatacgaacagtaaaaaccaaatccttttgtagaattaaaaaaccctcaaatctggtggagtggagatgcgaccggtcaaactgttggatcaatgtttgttagactattgatgtgccgcactaccttgccgctagtcaaaccgccttggagcctccggccagactactcgtctgttgtctactcgctaccgccaattcgaccacttgcttgctgctggttagattgcccgctggtctggctgtcgagatttagaaaaactaggtgatacctcgcgctttgctgtggaattgatggatggatatatgtgaaatattgtacaaatgatgaatgttgaaatgttgtgaaaatgatgtgggggacaagatgatgcgtcatgcttatataaaatttaacatgtaaattgctaatgggtgatgaggtgacatacttgcatattgagctttagcttttaataattgctagtgggtacaaaatatatagaaagtatagatatgcctcgatgaaactcttgaaagtggatcagctttattatatcaagatgtgtttataaagtgcatccaaatcactcccgtctcaactcacgaactagaattgaaagctcaaagcagactctaagttttttctcccaaaaaatcgatgtatttttagcctcaacccctcttctatttatactcaaaacatggttgttgcggctagccacaaatcctaatagaactagaaatcctaattacataggaaaccactcaaactagggaaacaacatccttttacaattccaaacttcaacatttctaaacttggactccaatccaaatttagctctgcttttcatacagacgcttgtatgtgatatggaaacctatgttactactgtttttttgttcgagtccaatcaaatatatattattatgattatctctgtctcaagatacatgccttagacatgaaacaggcaaatgttttttatttaattgtgatgagatgtcgatcacttgtactttaattatttagatgaaattgtggtctgggtagtgctaattagattaaagggggttttgcatcgcttatgatacatgacctagtggatgcatggatttgtgtggccaaattgggtatgatgttggtttcatagttggaaaataatatagtactataaaagatacccgtgcattgcaacgggataaactaattttatgataaacattgcatgattaaggttcagttttcatgatatgactattttccaaattatcaggtcaatgtaaagaaccaaaccctaaaacaaataaataatttaatagtccgaattacctattagatcttaaccaattccccccggagtgatctaggatttgggtggaaatcagatcagtgtaagctagtacaaaacacatgctactccgtattggtaaactgtaagggcatgttcaatggtagagacgagtatggtctcttaaacaatataagattatctagagaccgtgtctttataatagttaacacgacaaagactctaatcattaactcaaaaaatattccttttgttaatattcttttcattttttttaccctcatgcaaccatatttctatatatattatagtgattaaaagtcgttgttatacataacaacaatgttttgtctctcctctttctctttcttccactattgacaaccattatacataccctaacaatcatattcagagattaaattttctctctggaacaatcataataacaaaagaaatagtagaatgcataaaatccgtttccttaaaatacaaaatctgaaccgagaatatgcgggatcccctccgaaagagctaaaaggcgatcagccgcgtgcccccccccccccggcgcggcgaggcacatggcgtgcgcggagggggccgcgcggcagcgtgtggccgcgtgcgtaggttggggcccgctggttttttccgttggtttcttttcccttttttgcggttttccttttggttttttttctgtttttttccttttcggttttttaaagcatatacgtatacgtatatatacaaactttgtatacgatatatataaagtttgtatacacgtacgtacgtatataaagtttgtatacttatatacgaatatacgcgatgttttttttattttttaatacgtacgtatacaaagtttgtatacttgtatataaagtttgtacacgtcgtatacaaagtttgcatctgtgtatatttttttatacatcaaaaaaatatatatagtagtaatactagtagtaaaattggggagaaccatcattgccagaatgccggttgtgagaacgacctaaaattggggagaaattggataggttaattcaacgaggaaatactgaagtacagtagcgtggatgaggagggaaggttagagagtagtctcttctgcttctacttgcgtttatatttgagtttgacgaacctgactcatcacgtttataaaatcgtgcggttatcacgtgcgataactttcttattttttaaaaccacagtatatctcaccgtaactgtggggttactgtgataaccgctaaaccgtgaggtgatggtaacaccacaaaaacggtttggtgaacctgactgactcctcgcccaa

SEQ ID NO: 1967 - DNA, 4380 bp, Oryza sativa
taatatttggaacatgtgcttctatcagtgtgaaacattagctaaaatgttgaatcattcaacttatatattacaggtggtaaagtttacttactttgatgagcatcggtcatcatcccttttagctcggtcgaacagcaatatggtcagaaagatcacatagaagtacggcaggaactacacgaaagcagggaccacagttattaccatcctggctaaagtcgagataaattgtaatcagggtgtgcttacatgatcaaaaagagctggaactgtccagaaaaaagcagatagaatctctggaacatagtgaaaatgacgagacaagccccacctgtccaaatggaaaatgagggtgcatgctcaaaagccattcattgcctctattgaaacaaacatggtacaaatcacttttgatgaactatgtaaagaagaaatgacgaatatattaaccatccagaagtcaagagaagactgctttttgtttctccatttgtagtctgataggaagcaacaatctaaagttccaccaaaataaagacgtcagcaatgttataaacatgctatttgttaatttggaagcagctaaatatttaatgcttcaaccttagatggagctttgccccatattgagcatttcccatttgtccgacggaattcttggcgctgacgaacacagtcatagtttatatatatgcaccatattccaaccaggaaaaatgaaaatggtaacttgcacaaaattaacaaaaattcaatttaaccggtaaaacaccaataccaaataataattgggtaaacctaacacagttatccaattccatttaacacatgaaagaaaaacattctgaaagatgaacctggggacccaaattcacagggtggttgacaaggtacattccaggagaggtgtatattgatggaacccataccaagcatccccagcaaatgtagaaaccagctggtaggaaatatatgtcagcaaaatagtgcatgcttgcaaattaaaagttgagtgctgtatcaattaatcacacgacaataccaatccaatcctggcttctcatttcaaacttacatcttcatggattattagaataaaataccttggcatcatcaaatttgtcatggtggttcaaatagttcactttatttacatcttccagggattattagaataaaatacaccttggcttcatcaaatttgtcatggtggttctaataggtcactgtaaactaagaaactaagtatctagtaatcgaacttgtacaattgattcaagtgaggtcactaagtgcgtttttttttataattgggggtggtatcaggcctaggacagctagggcctcaggccctagggcttgagatttttgtcatggcatccatatgttagctactaggtgcagtgagatacccatccaatctgatctgtagaacataaatccaaggtacatcttttgcccctccaaaaaaaaaatccatgccgataccttgatgctaatgtgtccttacgcaatgccctctcttacccaccccttgctttgatgggtccttatctagcaaatagagttggtgctgccgccggcggcttctctttttgcaaaacatgtaacttacaccgttgtgttcgatccacacaactaattaaatgcatctacgaggatcagtaactgatgaacttgttaagatacactgatgaaagcatttctgcaatgattgactgaggtttacagggtcatgtatcttcaagtttacatgcaaaacctctttgaaatagtaataactggtaatggcccagaagttttatgatgatgatgtggtaacctagaaaaatcaatattaacagtcttcacattttgtcgtatataaatttattaagttcacttgtgtattactttatttaactttattattatttggggggttggggggagggggttgtggttatcttcgcaggtcaacttagcttgtctcactatgagacagttgagttaattacaccatttaagcacttgcatacatcacggtgacatcctttgaatgtaaggagctactattcttaactttaaagaacatgaataaatttgtagaattaacctacatacagcatttcattttggagaaaatttcttttcaaacatcatattttgaaacgttaagatgcatgtaattaaaaacataggagctaccaacctctatcatgagcaatgtccatagtgcaccagtatccagattcccaccagaagaacttggtgacatagatcaacatcaatgcagtattcacaagcattgaatctgcaactcggccattcatttcatactgcattgcaaagttcaaagaaatcaactaagtttagtggataacttaatcatataatgttaacaaaagctttctatcttttacattcccattgtactattttagagcacataagtgagttctatgtacaaaagtactagatattggatagcaaccaaagcatagatgtgcctctaagttgcaagctagcatatcaccagagtattatagtattctgacctgctttatgcagtaggttacagcaagaacagcccaggacatcatcccaaaacggcagtttgtgaacactttgatatcaaagtgcttaccaatgcgaggatatagttccattccctggaatgttacatgttatatacacaagtaaagaaaaattcatgtaaaatcaaaataatgaaaatacctccccacaaaaaaagagaaaataaataataaacactatcactgtgtatcaattatcaaatataaacacaggtgaagaatgtcatcgctaatacaatactaatgatagaacaagtccatataattgatcgatctaattaacccatcacatgcaagaaatgtaactcacccagtagaaatcaattatcacattccctgaggatccagaatcagatgaagatggagcaagatgaccctaaatggagaaaaaagaagggtagcccatcaataaacgaagcatggtacatatctacataaagaataacaagcctaataaataagctcacctttatgtacagaaaaatacagaacacaaagcttccaaatacaagagcagagtatatttcccccaagtgatcgtatactattgcagggttaaaaattccaaacctgacagatgataaaatggtttaggcgaatagtggctatacaaatgataattgtacaataaaaggctttgaatcaccatggtgtagcttacaaaaagggttgtcacaaacacaatataaaaataaaataaatataatttgaaaatatgcagaacaagttattaatggtttcctgattcctccattgtgtaatgtaccaaaatcatgggtgaaatattaatatgttatagtgctcatcatatgctaaggtgcatcgaagctccttcatcaatttgagcctcgtgcaaggcgtgcattaatccaggataacaactactctactcaaatttgaaagggagaaaataatgcaacaaacaagcccatgtttaagtgctctaagttgcctgtgtgtgcttttgctagagttcactcccaagtcccaacttccatggtggtgcttttaatgagaacggatagtacccaaaagcatccgcagtggatagcatgggcaagatggtaagaaggtggggaccacacggcttaacctagcaacttcaggtaaaaaaattggtgccaagctccaagagttgatttgtgtttgggtggcattagtaactattttaacttcaaaataaactaaggtatgttggaatgtttgtgggacagtatggcaccttgagtcctcgagaattaaacaaccacaacaggcaaccaaagaagtgtgtatgaaattgtcctgtcagccatcatgataatggggaagctatagttgctacagttgagaaaatgctgtttattaagcatggtattttaaattagatcgaagtcaggagaacataatggctatacattcaaagctacttttcacaatcactagctaacaaattccggctgaccactatcatataaatagtatagataggcatagttatcgagggaacaagcaagcatggacagacagacaatttgctagatggctgaacagagaaggcaggtgaatgttgagtgtcgtaatcccaagttttgaactgtatcctcaatcagcaggtccacataaggaaagaagactatcttaccaccacaggctcaggtatgttatcaaggtcactgcatatgcttgtaagccatttgcctgaaagaaagagagcaaaaaaaaaacagagaaaacgataattattaactaaaaggacatgagcaaaaaatactatcacaatagtctttttcttttttcgggggggggggggggggggggg

SEQ ID NO: 1968 - DNA, 5102 bp, Oryza sativa
cataacatcattagatggcgtactgtacatacatgcacggagcaataggagtagataacatcatttgtttggagccgacgatgatccgcaacacgcaaagacgacgacggcggaggacgacgtcgacatggctgcagcagctgccggcggacacggcaaccactcccactcccacctactaccgccactgctacgtttcccccacgtcttctcatggcgaccgttcttgctgtcactgtcactgtaactgccatggccgccaccaacctcagcgtccacgagctcgtacctcaccgcccccttgctcggctccgacgcgttgtacacgtacccgctcgccgcgccggccgcggccgcggcaatgctgcggcgccgccgagcctctccgacatctccggcggcatcgatgtgttgttcgcctcggcgtccagcagcagcgtgtcgccgtccacgccccagagcgagactttgccgccgccgcctccggccagcacgaggaggcgctcgctggcgcctccgccgccgctcgttgtcacgccgcaggccgcccatgactcgacggaggcggtgttgttgccctcgggcagctggagctggcgcgccggcccccactgcctcgccgccgggtcgaaccagctcgcccaccccgttcgcctctccaccacgtacacccgccgctccgaggcggcggatgacacccccctcgacgccaacggcgccggcatcggcgggcacgtcgcccaccctgcaccctcgtcaagaacctccaccacgcccgcggccgccgtcgccccgcacccgccgccgagcacgaccacgtggggacccaccgccgccacgaccgggtcgacacgccacacccgcggaggcggcagctcgcgccacgcggcgccgaccgcgtcctcggagacggccatggacgcgagggagagcgcgtagacgcggtcgccgccggcgcaggcgcaccgccggacggggagcgccccggcgacgcgccacccatcggaggcccacgccccggcgcgcgggtcgtacacgtgcgtggagcggccgacgccagcggcggcgccgtggacgtgcgccacgaggcaggggaggtgccgccggcgccggcggtggcgctggtgcgcctcgcgcgcggcgcggcgccactcccgcgacacgagcgcgggcgacgcggtgagctcgccgtgcggcacgcgcagcagcacgcactccagcaggtcgccgtgcagcacggagtcggcagcgtccgccgcctccatgggaatgggatcctagctgcactgctgctgcttgaggatcagtggatgaattaatcgatcaccttcttttgaaatgcaaatgcattatttaactactcctatattaacgttaatctgttggtcgaatcgttgatggcgccaagtacctaccaacccgactacgacctaacgaatgatgagtagtcttcccggggttggtgaaatatgtaagacgtgttgctgacgagtgtgtgatgccattccacaccagagttacttggacgaaattgaaacaggacatgcacgggagaaattgaagcatgactaacctttcctgacggcttcagcaattcatcacctaaaatatatcagatgacaacacaacaacacacaatatttgttaacgagattcagtcgaaacctaatccccaaagctctgattatgaacgctccgttcaaccaacataacacctagccgctatgaatccatagccacaccatcatcatcttcttgcgtatctacgctacattatagtcgttatagttacattgtggtgcccaccttacctataacagagtctgactctaactctatcatatacatattccaacttctagtgggactagtatatttgacacctattctaacaaacttcacattgacaaatatacgtcacctagaagtaatagaatcaccatattgattcacatgtcctccagacataggttggttctttttgtagtttcactgtgagccgattgacgagactgcactagactcgccgtcgttaagagactacgctatccttgtaacttcttacttttaactttatctgcaacagtgcttcaccttctctcttactatcataatcgttttgccaaacgaaattggactgctccttagctgccacatcatagattcctcgaagattatattcacctccatctttcgtcttaaatttgattttatctattctattctacggccagataacccatgtcatgactaaagaggcaaatcaaagtcaccaaactattgaagagaatccttttcttccatgttgttttatgaactgagctaaacaaatccaacatctatccttttcgcatccttatattggacccatgacactttgagaaaaatcaccgttgtttctcttcagttatggtctaactccatatatctcaacacgacgtcgagtctcagatatattatgttttcgctagataattccatatacaacctgactagtctatcgccgtcagtctactcgtcatatgtctcaatacgatcgactttgccccttagtctaaacagctgtacttgatcccatcgttcgatccatccttgtctgatcgaaaaccacgtacaactcacatgtcgcagcctgctatgtgaagctttctggaggtgtcaaatctccatgcactagttgctattctcaacttaggtctggtttagtttcccaaaattttttaccaaaaatatcacatcgatctttgacacatgcatggaacattaaatatagattaaaaaaactaattgcatagctaggggaaaatcgcgagacgaatcttttgagcctaattagtccatgattagtcgtcataagtgctacagtaaccaacatatgctaatgacagattaattaggctcaaaagattcatcgcgcggtttccaggcgagttatgaaattagttttttcattcgtgtctgaaaaccccttccaacattcggtgaaacatccgatgtgacactcaaaaattttcttttcgcaaactaaacaaacccttactctattagtttgcaaattggagactttggatttttggaatgtggactaagttatgtactatatgtacttctattttgatgtggtcatgactcgtcagattatgcgtatgtgtgtcatgtttggacatgtacgtgctgaatggagaatggacattgtggtcttgtcatcttgtgaaatgtcagaaattcaaatacgatggccgtgtttagtttcaaattattttcttcaaactatatacttttccgtcatatcgaactttcctacacacacaaacttttaacttttccatcacatcgttctaatttctttaaacctccaattttgacgtggaaataaacacagccgttacttgttggcttgctattgcattgcattatttaatgcctatatgatatgtaagagtatgattataatccattcttgttgtttacttattgaaaattgattgctctattgttgaagtgtttatttgctgctagctattgttaagaattattgctctatttctttatttgttgttttagctcattttgttaatcaagccgagcatattcttcgccaagctttcacgagccaatccctaaacatagccaacaaaaaaaaaatatttgttgcggcagggcgagagagggtgaggggaagtgtgagattgaatttttcattttcatgggtttcctaaattgattttaacactgaaggcatcgaaccaaagtttccattgtccaaacttaccgaactaacactagaacttgcccttatggttttgtggtccacaatgcatctttcatagcaaaaacgataaaaacaaatctattgaagtgatatatattggctaaatgggaagcacatacatacactttgagaacttgcgaagtgatgttgtctatataccgtcgctaaaataaaataaataaaaaaaaaagcaaatgcaccagccgggaatcgaacccgggtctgtaccgtggcagggtactattctaccactagaccactggtgcttattgcatgcgtagtctgtttgattttagatgacactgcaatcgacaaaattcttacattgttcatgctaccaccaccaggaatcagatcctctaaagtcgaccaaaatgacttgtgtctgcagtcacgtgcatctggccactcagtccctatcgaacggtggagccagaaatatctgctgtcccactcggcttgctgggccggcccaactcagcaggacgcacgtaagagctttggctgctgtaattttcctggcgcgaagcttcactactttggcgccggtttgacaacaagagcaagtttaaaaaaaagggaggaaacaaaaaagaaaaaagttcaaaggtgtatgacaagaaaaatggaaattgttcaaaggtatatgactgttggaattaatacacgggctaaggcccattcgaagattaattctttggaaaatcacaaaagcccacctcataagatggcatgcatgtggagtttagtaccaccttgcttattctaggaaagggggacctccttaaaagggaggatgccctcctagccatttgaagcatgtgtggtggagagaagaggggaaacacacgcgctcgctcacctcgccgcagtctccttttgcagttttgttttgctgcaggaaattcggatttgttttgttttggaaacattccgaaaatccggtgcgtgaaaacggcgtgtagtccggataagttatgcgcgacttatccggttcggttacgtggagtggagatcgtgcggacgccctgatcaagcgacctatctctatataaaccgagctgccgccttcacgcaacatacgcgaaatcaatctagggtttgcctcctactctgtgctgcgccgtcgctcgtagactactccatctcgctcaccgacgtgcaccggcgatcgggagagcaggtctccggaacctctgccttcgacgtcctgcaccgggagaaggcggcaataaggtttttgggaagcgcttcgcgcgactgctgcctgttcgtccgcgacggctcaccttcctctccgctcgcgtgctgcgcgccttcgtcgacgcct

SEQ ID NO: 1969 - DNA, 4264 bp, Oryza sativa
tgaatcatacatcattgcctgaagaagggatctctgaatcctacagggtcagcaatagcttatctgaactattgatggtaatatttcaaagtaatacactttttctctgaatcatacatggccattatgttgaattttgtttttctaattatcagggagcaatgacagatgctgttattgttattggtgaattctagtagtacagattataccccatatgcactcaggagtatggctcaacaacctccttgtccatcatgttcagacagttttagttcctagttctgtgtaatgagccataatgccatatgaaagttgcaagttacggacttgcaattattttgtgcagccatatgagcttgcagtaatcagcaaacatcttttggatttcattcacaatatcccacggggcgcagatcgctggggcgctggctcgccggggcggacctccggggtgaggtagggagcgccgagcgtcgcggtggcggccggtcgtggaggggaacgctgacctggccatcgcggcggcggagtagaacgagtcgaccagagtccgggacgctagtcattgggcagatatgggccggttacaggcctggtttgttttagtgttttgctggtctcacggttagatccaaatcggatggtccagatgagtgactggagagggaagtcgatttgtccgactttagaggatctgattcccactacaacaggcttcttcacctaccacgaaaacgcattcgcgatggttcggttctcccgttctcctaaattgtcaatcgtgggaaatgccaactgatatgctattatacagaacttcgctttacatctatctgttcaacaaaattcatgtgcacagatgatgtgtagacaacggggaaatcatggataggtgaaaatttcattttctcgagctctcctacaactctccaaatatcaacaatcgaggagaaccaagttgcaacagctcaagagtgaaaagctcatggaatccctttattatttagtgtgtcaaaggaaacagcagcacaccagtctcggctctagtattagcaaaatgaaagttacagcattgccgcagcggttgcgaaagaaaatcagcacattctggttccccagtgtgccagggagctcgaagcagactgttaaactcgttcaatccagcgtcaagagtgagtaggtcagaggagatctcatctcttccaccgccgagcttgctatcttgagtccacaacagtgccctcaggaagcgcagacaggtgtacgagagcgtgagatttttgtgggctatcggagccagtgatcttctccttcggccggctcaacaccttcctgacctcgttagctagctcgatgattgaatcatcttcatggcctgaacaaagcaacgtagcatcatttgtaattatactatgaaaatctctgtgagtgcggtcctgttgtccaaatatataagcagcaggccatcaactagcacatacatgtactgaaaactgatgcagtcattttttttatataaaaaaatgaataggaatattaaaatgagtatgtcatgagctttgatcaaataaagatatcgtaaaaagatctttttcttacatatgttggacaatgccttctccattgagaacaggtaatccctgttattcccattggggccattggctgtagcaatttgcctggtattaaaaaaaatgatcaagtagtcagaaaatgatgctaatcaagcagtaagccagtaaaagtgcaccatgagatgaatagcccaccttgccatgtcctccaaaggagcaggcccaagatagtatttgttgcctactggatcaggagtggatacaaagctgcacaagcaccaaagtaagtgagttaaacagaaaattaacaagttatatcatggaaatttcaatcgtgcagtttgaacccttacactagtacacctgtcacagctggcttcaaagaatctccttcctaaacaataaaattcaacaataggatattagagtaatgcaaataattgacttttattttctaaaataatgcctgatgcaaaacgagtaccttgtagaaatccacagagatcttctggtcatactcacactctcttctttccaagtactgaattgcaaaataaatttgtcaagataattctagcctcataaatctactcattcttttaatctacaaggaaaagaagcaccaaccttcattgcttcttgctcctttttaagcccccctttgacacagtatgcaatcccccactgcaaatattcatatcggactgtaaatacagctgatataatattcagaaatgaatctttggaaattagtaaaactaacatctctgtggtaatgataaagcctgagcaaagtcacatatgtcaggataatgattttcagtgcacagaacttgctaaaacagtaaatctggtttgagttcatgtcctgcctgtatgttatgaattaaggcaaatgacgtgtctttggaccaaaacaagagacaaatagcacaagagtgtaaagcatggtttgtgaggagaatccaccggcagattcctgctcagtcatctgccatctgattccagatttccagtagtcatctgctttacatgagcttttgagtccctaataggattgtgctttggtgccactgctcagcatgatatgtcaaactgtaaatatcaggtgcatgagttggtcagtcatgctttgcattaagctaatctgcagactgccgatccaccataccaatgtgagtaagttactagaggttattgcagagtcgtttttttagtcaaaaaaactataggttattggaaattcgaacagtgaaggtcagtatgcccctatgatgagggaggctacagggttattgtgttctttttctaatgatgttatagagttagttactgttgtattcctctcccaaataacaaatcaagcaaggcacagaagcaacttttctctccagtcctgcacaagagactatttaaaactgaagtattcaattaaaaaaaatccctcatgtagcagttatttctccaaaatcattgacacctttaagaaggttattttaattgtcatcaaaacttaccattttgtatggctatttcctaaaacaaaagcatctacaaggttcaacagagtatcggtaatgtcaccgatgcaaatcctacggaagaatcgtcaagatagttgtatttatatatagcacaataagtgaagtatgcttcaattcagtgcaaaaatttcaatgcggtgcatcggtgaaatgggaaaacgaagatgacagctcgcttacgcatatggcttcctcgtcggactcaagtgtgcaggtcctcgcaggatgctccggcgtgccccgatggtcaatgcaagctgcagggaggaagaaaaatatgaagatgcacacataaaagttgaggccaatatagaacagcggcaagtttaagctactgattctgcatttccaagcccattttccaagacaaccaggagtaaatctatcgtaccaagattgaaggtgcgtttgtagcccttgacgaagcccaggatcttctcatcgaagtcgaatccggggttccagatcagggagccatagccgaagacccagagcaccatctttctatgcctgcacattttgagcgcaaaaacagcagataaatcagaaagaaaatcttgtatactatcgagaagattgtaaagcttctcctaatccccaaatcgagatcccccgaagcagacaagaatcactctattcggggcacaccgacgaggattgcgacctcaaatccaaccccagcgggccattcgacgcaacaatggcatcaccacccacccaactaaccccacaaaccatgtaatctcggggaaaaatggctgcaagaaatcacctggcgagcgggaacggacgggacggggccaagtgcgcgcagcgcaggcgagcgagcgagcgagcagggcaggaggaggatcggatttttgcctccctcgggcgacggcgtcgcctcctcctggccttctctcccccctcacacgcgcgcgcccgcaccaaacccccgcttccgcaagctctctggttgggttactgttgttggtgagagggagagggatgggcgtggcgtgctgtatttatgccgcgcgagcgggtggggggggtggcgagcggcgggcacgtcgtctcgtcgacgagagaaatggttggtcgccgcgtgatcgcgccgcggtcgcttgggattaggatcaggatgaggacggcgatggg

SEQ ID NO: 1970 - DNA, 10270 bp, Oryza sativa
tctttccgccacctcggtacgtgttcgacatgctgcatatatttgatctgttcatgctttactgcttagtttatatgtgtagatctaatgatgcgttcatgctagtttacatctgcaatgtcatgattcatttatggaataaattaaatcattatgtgcttataatttcaacaatccaaaaaccttattataggcgctgtgacctttactatggctggttttaccgatgcactgaggctggataaatttaccggtgtgcactttaagagatggcagatcagggtcactctgtggctaacagctatgaaatgcttctgggtgagtactggcaagcctataggcgttcttaatgctgatcagcagaaagaaatcgatgaggccactactctctttgtgggatgcattcttagtgtgcttagcgatcgtctggtcgaggtgtatatgtgtagacccccgattttggaaatcggaaatcttttgtgtttatccataccaatccctggatcagtagttggtacacacatacatagttggatcacaacatatcaagaatgaattcaggctaaaagagttaaatacttacattagggccaggtaggccaacaactatcagagaacaacagcggaagacaaaataatataagggcccggttaacatgtcacaggcagttgactggggaacgagacctagaacaagaccgcactccgatcatcttgtcaggtacacaagcgtactaacaagggcttctcttcaacaccctcctaaaagatatataaatagcaagagtgagtaccaaccgtactcagcaagccaccatagcaacaatgcatatgatagagggtatttcaaggaagggctccaggttcttttgcgtaaagcaaactttgcaaatcttttcacaagcctaagacctagcatagactaatcaagttttactaccaatgtttacattatacaacgacggttctgtccaccatccattgtgatcccaaggatagcttcccgccattgagtcgtcatgattttctgaggacgtccgccttcctttatctcaggaagtggctccatcagcataaagctcatcatgcaataacccatcccacacaagttaagaatttagagtctagccaagtgtaatacacgtctcggtgctcaataaccacgagcacggctattcgaatagatttggtttactcacactgcagtggatgtacactttatccgcactccgcgactgcccaacacataagcctcgtcccaacacatgagacgcgtcacggcaaagctttttgataacctcgcattggcagtacccgctccatgaactttacatcctcatacactctaggcgtacacggtttctagcagtgagaggagttctggcgcacccgggaagggaagactcatacatgcattaagttataattatgtttagattctcacatggcagtcctacgatggcgacaccactgtagatacccgccccgcggtcctaccaatggctgccccaccgtagagcccctgcctcacacatcaagaaaccactatgcatggatactgcctccgctcagctatctactccgctaggtctatatccatacgagaagtgcggttgtacgggggtcgtttcatgcttaacttcatggctcggtccttaattgaccggggacggcactagccttttccggacaccacccaaatcctccgtccgccccagtcgaaaacagttgtttaattttatttctcctttcacaaatcatgtcatcaacatcatggcaatgtggcgctcatgtctccacatgccgcatctcaattaccttcccaaagataattgcctaagcatatagcatttgataaatatgagtatgcatgattctagaatagcatttctaagcaattgtcataattgactagggactcatacgtaaacatggttacgaaggcataaggggtaaacaataatcaaggcatggcataatcacaagtaggatgttcatcattgcatgcaattttatttgtaaacaaaataatttcgcaattgggatcaacatgttcaaagaatagtgatgacttgcctgctcagaatagtccttattcttgatataatcttgatcaaccttcacctcctagaagttgcagacgttgcctcacgactaatcggtacacagattctataatacgtgagaaaaaccaatattcagacaacaaccaaatatgcacaaatagaatgtaattgttggggtcgaacctagggttgctcatattactcgcgcttgctaatggattccaatcatgctagaggctaaggcttcttaatctttctatcgtcatcatggtctatttaggagttaaccaatagtgtataaatgagatatacatctagctaatgtgtggtttagtctagctaatgactatggaaggattatggctacacatgcatttatctaaataaagtggtcatatctagaggttctcttatcggatggatttagtatcaatcaaattattacagtgaatcatttgtatcattattttattgatggaggttttactttaattatgaacataattttcttgtcacaacaaattatgaaaggataataattatccatgctttgaatgttagagttgtttaggttaatcatattatggttatagattatcccttaatgaacaatcctaatttacagttgaactataattataattatatgaggtcaagatttataactagtatttatctaatatacatgtttgtcatatactccctctaatttaatatatgcaacacgcaaattataatactataccgtacaactataatgggatgtatagtatatgtgtaagcaacaatattttattattggatcatatatttgagtagttgctttttactgtaagctatacaatacatgttgattttaagatggctctgtttggttaactaatggatgtcaaccgaactatatatatatatatatatatatatatatatatatatatatatatatatatatatatatatatatatatatatatatatatatatatatatatatatacttttaagtggtccaaatacaactagctctgttattattctcctaaccaagttaaagattcatctatgtgtgtttatattttagttacaaaatatgaggctaaactttatgtaaataatttataagtcatggatataattatatatgggcatctattagttaatggcactaatatttcctatgctcgtattgatttgaaacattaattataattaatttatgtggttgctacagtgacaaaacatattaaagaccaatattattacatctactctattgtacaatatcaatcctattcattagctcatttttaagttgactattatgcatcatcttgatactaattattaaaaattataaatatattttattaaatagtgaattatataatattggaaagcttatgaatttatatgaatttaggttcaagtttcacttaaatccgagttaaaatgaataaattacgctagtgtaaaaattcaaatttgaattaatccgagaaaatgcgaaaagctgctgttcataaacgatttatttttaacccaagacatatccacagccttgtaccaactgacaagtgggaccccgggtttattcctttttcctaccgaattatttttcaatgcaaaattccacaggtggaccccgctgctctctctttctcgttctttcttttcccgtcgtcttcttcctcgcgccggccatcgagcggagcagaggcgcggcgcgtgcgccccagcccgggcgagggcatcccagcggcgaccagaggaggctcggaggaactccagtgaccacccgaaggcggccacggcgcatggcgccgtgtggactggcggctaaactcggccacgccatggctgagctcgggcaacatggggctagggcgatagcgataatttctgaccgaattgatgggtgtgggagcatctacggggtgtgagggttccattttgctagctagatggagagaaggggctccgggatggcttgtccacagcgagctcaccggcggcaaaacggtggccggaccggcatggctacggttgctaattggcaaaattaaagggggctctagtttcacggaactaggagaggacataggagcgaggacttaccgagggatggaggaacgacgaagctcggcggcgttggtggacaggcatgcacacaaggtgtttgagaaaatgcatacaagagagaagaagaggcagagaggggtggacgagctcgtgggggctcttggggccttgtgatgggagccaacatggtgtgtggggaggaagggagatgggagggggtatttatagggtgcaggaagggtggccgacttaatggtcgacgcaacgggcggcgcacggggctcgagggtgagggcgacgtgcagcgacggcggcgtgtggcagcgacgggacgcggcgacatgcagcagcgcggggctcgaggcgcggtagcggcacatggcttggcggcgcgtggtgcgaggcgcgacaagacggcgcgcggcgcggcagtgaagccgacgcgacggcgatggcgacggcgcgcggcgcggcgatgatgacgacgcgacgcgacggcacgcgcggcagcggcacggggcgcgacacgatgcgacgcgcgcggcgtgcgcagggctaggcacggcgcggcagggggagggcggcgatgggacgctcacgcggcgcatgcgcgagatcggcgcggcacatgggagcgatgcgacgcgggtcgctgggtgttcggcttgggctctggtcgagcacctggcggcccatgaacagtagccagctgggaaaatcacagaaaagaacaaaagggaaaaagggaaagatggaggggccaaactgaaaaatagctgggattggaattttatttgagatgcaatctatacattttgttttgagaactcaaatattttatttgaatgtttatttgtttgtttgtttctccccaaatgaatttgctttttaattagattatcctaaaatttatcctaatgagcccattataaatatagtgatgtatttgctcaatttatttgtgtgaccaattattttgtattagttgattttatgacacaagggacttaatgaaatgtcctaaatattagcttatatattcccatgaaatactcatttgtaaataggatcatgatagtggtgatcatcatttcatgtgtgtttatatttcatggcacgcatcacatggttcaagtatttaataattgttccataaattaaattagtaattaaccttccctttgtctggctttgttttcttgtgcgtaaatatttgtagggttatccataaataatatattctcataaatttatctattacttaaatttagatctttactttactttctttgtgatcatttacggttctgcaagcaatagcaatcataacaaccagcatgatgcaaaagttttaaaaagtttgaaattttagtgatttttattgtcggaaattttcagggtgttacaatatgcatatgaccgacgctaaggagttgtgggatgcactgaatactaaattcggtgctactgatgctagcaatgatctgtatatcatggagcagtttcatgactacaagatggctgacaaccgttctgtagtcgaataggctcatgagatacaaaccatggctaaggaactcgaactccttaagtgtgtcttatctaacaaatttgtggccgggtgcattatcgcgatactacctccatcttggagaggtttcggtactgcactcaaacacaagagacaggaatactccgttgaggggttgatagcgtctcttgatgttgaggagaaagctcgggaaaaagataccgcgtctaagggcgatggtgggcagtctactaccaatgttgtgcacaaggcccagaacaaaagcaagggaaaacacaaaactcagcagaccaccaacttcaagaagaagaagaacaacaacaatcctaatcaggatgagaagacttgctttgtgtgtggtcaacctagccatctagccaggaagtgtccacaacgcaaggggatgaaggcacctgcagggcagacctctaagtctgctaatgtgaccattggcaacactagagatggaagcgggtagtaatttacctactgttttttcagttaatcagtctactaattggtgggttgatacaggggccaatgtacatgtttgtgctgacatctcattgttttcttcttatcaggccgcacggggttccaccgtcctaatggggaatgggtcacatgcttctgttcatggtgttggcacggtagatctgaagtttactttgggaaagatcgtgcagctgaagaacgtgcagcatgtcccttctatcgataggaatctcgttagtggctcccgtctgactagagacggatttaagttggtcttttgagtctaataaagtagttgtgtctaaacatggatattttattggtaaaggttatgagtgcggaggcctgttccgcttttccctttctgatttctgcaataagtctgtgaactatatttgtggcagtgtggatgatgaggctaatgtttggcactcacgtttatgtcatattaattttggtttgatgtctcggctttccagcatgtgtttaattcctaagttttccattgtcaaaggttctaaatgccatagttgtatgcaaacgaagcaatctcgcaagcctcacaaggctgccgaggagagaaacttggcaccactagaacttctacattcagatctttgtgaaatgaatggggtgttgacgaagggtggaaaacgatatttcatgacgttgattgatgatgctactagattttgctatgtgtacttgttgaaaacgaaagacgaggctctagactattttaaaatttataaggcagaagttgaaaatcaacttgacagaaagataaaaaggcttaggtctgatcgtggtggagagtttttctcaaacgagtttgacttattttgtgaggaacatggcatcatacatgagaggatgcctccttattctcctgagtctaatgggattgctgaaaggaagaaccgcactctgactgacttggtgaacgcattgttgaactcgaatcatgtgttaaacagagttcctaacagaaataaggacaaaacaccatatgagatatggattgggagaaaaccatcactttcttatttgcgcacatgggggtgtttggcgaaagtcaatgtaccaataacgaaaaagcgcaaacttggacctaagactgtggactgtatctttctgggatatgctcatcacagcattgcctatagatttttaatatttaaatctgaggtacctgacatgcatgttggtacaattatggagtctcgtgatgctaccttctttgagagctttttcccaatgaaggatacacatagtagttcgagccaaccctctgaaataattcccagttcaatcacaccaccagaacaaactgaacatacacatgaacatgtcattgaggaggatgtcagtgaagctcctcgaaggagtaagagacaaaggacggctaagtcctttggtgatgatttcactgtgtacctcgtggatgacactcttaagtcaatttcagaagcatatgcatctcctgatgcagactactggaaggaggctttccgtagtgaaatggattctattatcgctaacgggacttgggaggtgatagagtgaccctatgggtgtaaacctgtggggtgcaagtgggtgttcaagaagaagcttaggcctgacggtactattgaaaagtacaaggcttggcttgttgctaagggctacactcagaaagaaggcgaatatttctttgacacttactcacctgttgctagactgaccacaatttgtgtgctactttccctagcagcctcacatggtcttttcgttcaccaaatgaacgttaagacagcttttcttaatggagagctggatgaggagatctatatggatcagcctgataggtttgtagttgaaggtcaagaaggcaaagtgtgcaaattgttaaagtctttgtatggcctgaaacaagctcctaagcaatggcatgagaaatttgacaaaacattgacatctccaggctttgctgtcaatgaggcagataaatgtgtgtattatcgccatggtgggggtgagggagttattctgtgcttgtttgttgatgacatactgatatttgggacaaaccttgaggtgataaatgaggttaaatcattcttgtctcaaaattttgatataaaggatttgggagtagctgatgttatcttaaacattaagctaattagaggtgagaatgggattacactcttgcagtcccattatgtggagaagatcttgaatcgctctggctacattgatagtaagccttctccaacacctggctagaacaagagaattgctaggaatcaactggaatactccgaaatcattggctcactgatgtacctggctagtgcaactaggcctgatatctcctttgctgtgagcaagttgagccgatttacctctaatccaggagatgatcactggcgtgtacttgagcgagtaatgcgctatctgaaaggtactatggaattggggcttcactattctgggtatcctgcggtactggagggatatagtgattataactggatctctgatgtggatgagatcaaagccactagtggatatgttttcacactaggtggtggtgctgtttcgtggagatcttgcaaacagaccattttgatgaggtcaaccatggaagcagagttgacggcactggatactgctactgttgaggcagaatggctgcgtgatctattaatggatctgcctattgttgaaaaaccggtgccggctatccttatgaactgtgacaatcaaacggtaatcgtcaaagtgaatagttctaagaataatatgaaatcatctagacatgtgaaaagacgattgaagtctgtcaggaaattgagaaactccggagttataacgttggattacatccaaacagctagaaacctagcagatcccttcacgaagggactatcacgaaatgtgatagacaatgcatcgaaggagatgggcttgagacccatgtgagttatattatggtggtaacccagtctatgtgatcggagatcccgtgaattagaacctgggaagaacaaaccattagtaaactagaggagagtaccaatcaataccctctttaagtgaagatgcatgtactctcgtgagctgcaaggcaggttggctatgccttaatgagttctgttggctttaattagcgaagatgctttcccgtaaagcattcttgaaagaactcacctttgtgagcttgactattggtcgcagtctatagagattttgggtgaatcttctaggaagcttactaaagacctaggagtatgacttatacgttccacccgaggggtagtctacagacggtctagtaccagataagactctgagtgaaacttgcttgtacaagagttgcaattcaaggcgtagtctattgttcaagttgtgagtaagtgtagcttggagttctaggtggatgttcaaccttaatcggtctccatcgaaccgctggtatataaatagtacattgaaaaaggcaaatctcaatgggattttgagatttggtgggggattgttggaattaatagatgggctaaggcccattcaaagattagttctttggaaaatcacaaaagcgcacctcatgggatggcatgcatgtggagtttagtaccaccttgcttattctaggagagggggacctccttaaaagggaggatgccctcctagctacttgaacatgtgtggtggagagaagagaggaaacacacgtgtgcgctcgctggcctggcctggcctggcagggcaggcggcgcgcgtgcatgacgtacgcgtcgaatggtccgcaaaattggctcctcacccttacgcagatgcagcctccttttgcaattttgttttgctgcaagaaattcagatttgttttgttttggaaacattccgaaaaatccggtgcgtgaaaacggcatggagtccggataagttacgcacgacttatccggttcggttacgcggaatggagatcgtgcgggcgccctgatcaagctacctatctctatataaaccgagccgccgccttcacgcaacatacgcggaatcaatctagggtttgcctcctactctgtgc

SEQ ID NO: 1971 - DNA, 4444 bp, Oryza sativa
ccatttgctcccgagtcccaactaggaaggcaggcatgggaatgggaggcgttgggaacgatcttggcacagccatcgactcgtcgtgaacggcttttctatgtgacggaggccagcggcccgtcacagttgttagcgtgctgttaaatcgctgaagaaaaaccctcgttgatgatcggttgtttagcgtgtagttaaatcactgaggggtaacatacagagtgacccacatttttattggacttaatctacagattttattcttaggtaaaggctgacaagttcatttttcaagcagcaacttacgaagaaaattgtgctcagataatttgcaaaaggtcgacaataccatttaaaatgacttttctaggcactttaatataagtaggacgagagccccgcacatatacgtggacatcttatttaaagttttgtggtaattttatttttctaaacatgtgcttgttgtttattcagaagattttttcaaaagatttgctggcaggaaacaacagtggcattgactattcaggaaacaaagctgttcacacaaaaggaaagggaagaacttattcccaacgaaaaaagtgctctctgaatcaaacatgaaagttgttttccattatatggctgttcacttaacactgctctcagcttggattatacttatatccatttggtctgctcccgtccattatacacatagtctacttggtgatgtatatccgtggtcattttcttgatctgcattgaaccaagtagatgtatatcctcgataactttcttgagcttcaaaaagagccaaactagcagaggttttttatggctgtccatgccattttttattgtgctttcatgatgatgaggtcttgtctctgcagatctctaaccacttcagttgtttgtgaagatatctattttttagtggacgtgaattatctgcttggctatgaattcactatcaagttgctatgaacaactctaactctaaacaaagttgaccaataaagtagaattctgaactctgaactgtgcactgtcttggtttttagtttcctgtacaggacttttggtcagtgcatgtgacctgtagagtttttactgaactaagatgattagagataataatcgtacataacagaaatctgggatatataatctttcctgttctgtttctccttcaatctgtagcatgaccttatccttttcaggatgagagggacaccgtgtttgcaatcagcatgactatgcattatactgacaagtggacaaagtgggtttttatttgctgttgctttctaatcatgtcattgcatactggtttcagttggttttcttactgattatgcctttgcatactgatttcagttggtgtttcttactgatcatgtggttgcgtgctaatttcagttggtgttgtttactgatcgccattgcatactgattttagttggtgtttcttactgattatgtcgattgctatggtcagtgtgtgtgtgatattttgatttttctgaacagatcatgtcaacaggaatgccacctcgtggagatattcctacttgtgaagaagcaaactaaggctgagttcggcaaggagggttggaattgggaaccttcccctccgacacgtaaaacggatacgcggattagcgcatgattatgtaaaatcaaaggtgtttttgattattattctgtgatgaacaattggcattagagattattggttttgttatttggaatttatttacgaagtggttttggagatgattggatttacaggtgaatcacaggtgttattattttatgtgaccggtcagaccaggcaagggttgccggtcagactggcggtatgcgcgcggtcagaccggccagcccgcggtctggccggccgactctgtgttggtttcggtttcgggttgtttgtttggatatctgtgattatttcatgactatggtttctagatggatactatgcgtatgtaatactgttgtttgctaacgatgagtcaagttggagatagctttggtctcggaatatggtttctttgtttatttcatgtgtaggtgactcgatgcctcgggagagtatttgcggtgatggaccgggagtcggcttggggataagacgacgtccgtggtgggcagagatcatgcgggatacttaggctagagttgatgcatgtggttggtgaagattccatatggcatacgatggaggtattgtgtgcgtatgggatgcggagtcgaatttggaaggagtccaaatttgatatgattggttatgtaaagtttgtttcttgtacttgagggtttcctaaggtgtttaggacttctagtatgagtttggttcgtggctttaggctgcctacctcgggtataaatagagggggagcgtgaggcttcctggtatcgcttttgagagcaattgagttgagttttgagttagagttttgagttttgtcgaaatttttgtaaggagtgttgttggtgcactttgtaaatacggagagaaccaataaagttgtcatctactttaagagttcttcgatttgtgtttcaccaggtttcggtggtctaaccggtggcgcaccggcggtcagaccggaggcatcgcggcggtcagaccggcggggacacggcggtcagaccggcttcggcgacaggtgacaggagctgatctcggcggtcagaccggagattcaacctcggtcagaccgatggcaaccaggcggtcagaccaacatgacaatttcggtcagactgcgatccgttgaatttgagggtaacttttatttccgctaaaagttttcggtttttgggtataccaaccattcacccccctctggttagcttagttattgtgattcgatcatacagattaattaagtattagctaaacattcttagaaaatgtattaatatgatttttttcaagcaacttatatatatatatatatatatatatatatatatatatatatatatatataaaagcacactgtttagaagtttgggaaccatgcgtgtgaaaaagaacacagcataaagctgagttgggcactcacctttcccaacttatactccatcgtttgccatgtgtactcttttcaaactgttaaatgatatctgtttttttttgcaaaaaaaataaatttgcttgaaaatcataataatctatttttaagttttaagctaatatttagttagtcatatgctaatgagcaacatcgttttccatgcggatggaataagttatgaacctttattatcaaactcgacgtaaagcaagttacgaccaaatcagagaatgggagggaaggagatcgcaatgtatggtggaaatcgtagttgaaattcagatttgtggagatctcataggaatttatctaggtctactaagtatgtgcaatgcaaattagatatatacagaattgagtggatttgttgtctgaattatggggtagtatttgcgtacttgcctcatcctacagttagtaatgcttttcaatttcatcgttgacatttgagctgttatcgccctgctgctattgacctatggtgatcttaacttttggatggatggatggatagcctatgtgttgagcaggtggctgaagccataaagattgtgttcaaatcaagtcaacctaacatggttgttaaactcgatatgcaacgtatagaagccctgcacataggcatctctgccgactctgcagctgtctgtattgaataatccaaaaattaaagttaaaatctgaggttcttgcgtaatataccatttgtgaacttcgtgattttgtatcgattggtcatatggagttaataaattgcttctagtttactcagatatgttagttgatttagttatccaaacttagttaatcttgaaaatgtttcactttactttattaggaaagggtaatccaaattaagacatgggcatctctgccgactctgcagctgtaagtattgaatcatccaaaaataaagttaaaatatgaggttcttgctttacataccatttgttgaactttgtgattttgtatcatgtcgtgaccaagtttggggataggcggaaaaaggaactctcctgcctattcttagagagctcaaacagtacacacaaccttttggtgattactttgtgttataaaatgtctcttgtcccgctacaggattttgaccggcttaaatagcccatggtcgtacatgcaagattacatctttgcccccgcgggtcaaccctaggtgcattttggtacatctgtaggtcattatagtcttttggcgccagctggcaagagtggttgagaatggtcctcacagaatcttcttttagcatcttcccttactcaagtagtgttcttcctcgagcccttgtgttgagtgccttttctatcttgaaagttcaaacacttcttaccacttgctttgctct

SEQ ID NO: 1972 - DNA, 7001 bp, Oryza sativa
ttattgttatctttcccttattattcacaaatgattatattctacgtgcagacttttcgaatttttgaaatgatttcggatgcatgagattggtgaaggagcttttacatcatttggagtgtgcacagagctgattcactattgcttgagttgccgaggtacctggtgttcactggatattttagggcgtccaaaacaattacagcataaaggcttaaacacaagttcaaataaatatgtttgggtacatttaggcaatgatgttaaaaccttgctttttatcttgctacgtaccattgcttctattatcagttgtctgatgggggtttggtattctcttttcctcaagtttctaggaaatttatttcctttttgcaggtgttcatcctcctttacagctagcaaaatgtgtgtggttagataacatgggaggttgatatatattgtgtatactttgctatgtccagatttactgtagaggggtcacatccccttctaggttagctttttttttttttgacggagggagtactacgttttgatattatgttaaatggagaacgcttatcaatgatagctaatttgtgtttaataaaatttttgcttaagtgatgtttgtgtgcatggctgcgcgcggcgtgatgccgtgcattcccttagtgttgtcactttactttatattgacctttaaaataattccaagtttccaaacgtaccggcctcacagcgcaccttcaaccaaagtgctactcttgctccaaacttatcatcttttccacattagtgttgtcatgtaccagatttgtacacaagccaatatagtacaccagattccttcagcattaagaggcaaaccaagactatttcaaacctattatttacgtaatacatatttctaaaagagggcagctagcgcacgggatgccgttcaagactaaagtcacgagataattaaacaacttgataaattaatagatatttccaaccgcgtcacctggtgtccacgcgattcctcgttgctttccccagccggattgtcacgcccagaaatttagcccaaatttccagactattttgtgtattaaatccctgtccaggactagccagggtacacaaaacgacaagtaataaacagttccaaacgtaaataaagcataaaatacttacagaagaggcacttatttctcacaccgaaacaaaagcagcatcagcgaaaaaggcgatcctagcagggcttcagctccactccacaggcaaaactcaactggggtctgagccttggtcttctaactttgcctctagctcagaagcactacacttctgaaaaaggggaataatagcaaggctgagtacaaccaccgtactcagcaagccacaccaatgatgcagacatgtaaggggaacacaaggacggtttgtggctatttgtataaaggcggttgtaaaatattttattgagtaaaatagtaaaactgttgagtaattaaaataacattaaatttccactgatcaacgctgcaccacgttgaacaggcccaaccaacccacctgaactacagtgcattgagtcgatttattaaggtgagactaatcacggtgaatctggtcgactgcccataactgcgggcacgcgggcacggctattcgaatagttttactctggccagaggtgtacaactgtacccacaagacaaatccccacgatatgtttccgtgcgccgacatgccaccacgacataccggaaagaggccgtgacaggacccttctcataaccccctctaaccgatcgcaccacacctcagggttcgcccccgttcccagcaggcaacgggcagccccctctcgtgccgcggtgaatccggaagccgatcaaccggacaccccggccgacccaactctatcacgcccaccctcgcctgggtacgtcggctagaggaaagctacactacaagcccagccgttgcccacgttggcttgtggtaagcacgataaattcttccaaggtttcccgcgaaccggtccttaattgccatgggtgcgactagcaaaaccatgcacctacagcccaccatttagtcgcattttagttggataattacgaccatgaagcatggccagatgtctcgagcacgcagctcattctgttactgaaatggtctaatactgtaattatcccatcaactgagctagtggtaattaagcatggctaagcatatagttccagctaggtcacataagtaacatgagctagttgatttattacccaaggttgacaaaggacagatatcaagtaaacatagcacaagcaagcagataggtaatacccagatcccatgtaattagcaaaatatgcatgtttatttgcaaatagtaaaacaattgtaaagtaggctcaatatgctcaaggggaatgtgtgacttgccttgcttcttcacttcaaccttctgaactctgatccttgcgaccgcgaacttccgaacaacggattctacacgctagcatgcacaacgaggaaaaactctaataaaaaccagggaaacagtacataaaaagtaaacaaacatgtagatctcaattttagatgaatttagcaagttgaatggcccaatttggagttcgaatgaattagatatgaattttagaagttttgagccatttaaatgaatttctagaattattaacgaattattgtgcaattattaattattttctcaaaggaaaagggacgcgctgacgtcatcaagggggaggggcggcgcaagcaagcgggccccaccggtcagcgacacaagggcgccggtccaccgtggtctgggaccaccgaggcggtccaccgccggtccacgggaaccgacggcccggatcgacccaagccgatcgggcggccacggggtggcgcgctggggcacgggcgcggctcaggccagccggccgagcgacggcgagcggcggcgcggccaccggcgcgggaagctgtggcacacgcgggctgcggcggcgagcggtgcctaggcatggcggcgacgtgcaagcggcggccagtgcggcaaagagaggaaaagaaaggaaggggaggaggagggagatgctcaccgagatgacgatgaccggcgcggggaaggacgacgacgaccacggtgatggcggcgccggcccggcaagcgagggggcggtcggggagcgtcttggcccgaggaaggagagagagagggattaggccgcgcgcggcgaccggagacagcgaggagaggccgccggaggcggtagaggtggtggtggctcgggttggcggctgaaccggggctccggtgatcgtttggggatttggagtggcggccggtgtgcggggcagcgcggcgaagccgagggtggcggcggatttgcgtggcgatggctgaggcggtgaggagtggtggcttgaggcgacacaggcggtggtggagctcgggtcgatggtggaagcagtcctcgggcgatggaatggacgggtggagtggcggccggggcgtggcacgatgcggcgaacccgaaggcggcatcggcgcggtgcggcagcggctagagtggcggtggcgggcagctggaggcggtggaaggggcggcggctcggtttcatggtggagatggaattccgacaatggaatggggaaacagagtggatgccgaggtagggcttggctcggtgatgccgaaggtggcggcggccctagcgacaggaaacggcggccggagctcgcctgaggtgggtggcgatggggagcagcgtggggagagcggggaaaagcgcagggagctcggggtggaggggggaaacggaagaggggagcacgagggtgctttatatagggctcggggaggcgggatcgggcccgagaggggtggaaaccagccggcgacgtgggggagagagagagagatgtgggaggcggcgacgtggccggattttgcggggagagtgggggaaaacggcgcggacgtgggcgacgaccgcgtccacgcacgcgcgggagaggcggcgacgtgggatgccgacgtgggcgaagtggagctcaatttggcgccaaaaattggggaaaagtgggggaaaatgtggaggagttggaggggaaccggtttcacttggtttgggtgcgagggcgcgagcgggagggcgccggatttggcgggacgtgggcggcaaccgccgaccatggcggcttcggcctgggaagccgaaggtaggaggagggcctgacaggtggggtcgccgggcccacctgtcggggagggagagagggaggagaacccagggggttatttagactttgcgcgaggggaaggaagataggtcgatggcccaaggaggaaggaaggaagaggggaggggacgggccgcagggagggaaggagggctttgggccggaagtggcccaaattgaaggaggggagatttgattgtttttctttttattaaactagcaaaaatgcccgtgtgttgcaatgggtgaaaaaattttaatgataatatacgtttttcatgcataatcatgtgaagacaatgtttgtattttaatgagcagcttgctttttttataaacggtgttttttttttcttccacgattttctcaaaccatttttcagaaatagcgcatttctttctaatagttttttcctagcatgtttttttttccattttttagtgatgacaaaaaccatatttttctcctcttttttgttttgcttttctcgcgtgtttttttgtcaattttttctgacaattactttctcgcgtggttttttttgcctgtttttttaaatgttattttttgcttttttccaatacatgagaatatatgacgaaataaaagccgtgtagtagatggtaaaaaattgatggatcctacccgactcaagcgtccatcaatttagcttttttctgacagatttttcagagcggtttttttaatagatagtgttttttcttgcgtggtttttttaaaccatttttttttagaaatgacgcattttttctgacagtcttttcctcgtatgtttttttaaaaagtttttgctggcaatggaaataatttttcacacgtgtttttttattttgtaagaagatggaaaaaaaaccttttcagcgtgttttttgcgcttttttctgacttttttctcacacgtctttttgatcgtttttattttctcatgcattttttatttttaaatagttagattagattagagatagagaagagatttatactgattagaaattggactttgtttcgccctttccatattttcttgcgtgcattttttattttatacgaaccagctttttttttttacgaaccatttttttgccactttattagagaatcggacaaacttttttagatgttttttcggatttttttcgcctttacaggaatcagacttttttccatttttaaaggaatcggatctagcgttttttttcaccagttttttttttttgccttttataggaattggattttttttcccgtttgcatctacagttttttttcgccacttaggggaaatagacttctgttgttgttttttttgtttattttcttttttgtgtggcttttctttttctttttatgcacctttctacctttgttatatcccttttatttattgttttttttaaaaaagaccaaaagcaccttattgcaagattatagggactcaaatgcaaatataaaaattacagggactcaaatacaaatgtacaaacccaaaaattaaaatcatataaaaatggaatgctctcgatatgtaggttccgtttttgcaaacagatcttcaatccagcacatcaattttttttcaccaagatgtatggaataatggtatagattgaaaccgagagaagtggtgcctagtatctcggacttaatctgagagaagtgggattcggatctagagtcggactttttgaatcgcaacaagaggagtcaaacttttttttatttttatcgctatttttttagggaccgactcggactttttttgtcgctattttgttttttcttttctttttttcgcacgtttttgttcgccggttttttttatcggacaaattttggtttttttttcgcccatttttttttgccttttttctggatcggacatatttggtttttttttcgcacttttttttccctggttttttttggatcggacaaacttggtttttttcgcccggtttttttgacggacgatggaagcacctcttattttttaagtagtagagattggttaaatgaactttgtgctattcaaattatttctcgagctccgaaaattcgtgaaatttcagagagtattttagggcacaaagaatattacaaaatattctcggccaatgatttttaaaggaaattttaattctcccattatttcactttattaaattgctttaacttttatttaatttctagaaaatgcattatttaatgatttttaatcctgaacgaaaatcggggcgttacacggatcctcctcggtctcacgcgcctccacacgcgataccttgtcggtggagcacactcgcagctagccgaagcagcagacagtgccctcttcctccaagctcctccttggtattgctccctccacgtcttgaaccaacgcttggcgatgcaaggagtgacatcggttgcagcagtagtaggaaacaaggatggagccgaggggaagggataaaaggagagaaggcatgtggtgcttgattcctcgtagctagccatacctcgcagccagccatgatacttgatacctcacaggtaccaggtatcaggtttaatacctgtgggtatcagccatgataccatagatattaagcatggtacctacaggtactgggtctgatacctgggtatcagcggtaataccacatgtatcaaacttggtacctatggggtaccgactgtggatgatacatcgcacaacatacttgcacacactccggcaatgagcatggtggctcg

SEQ ID NO: 1973 - DNA, 1889 bp, Oryza sativa
taagttttagtagcctcgtctaccacagattttggagcgagaccgtggtgggtagactgctggagcccttgtttgtgttgcattggcagtaatcttcatagaggaagaagttatgtaaatgtattgcaatgacagtaatctttatagaggaagaagttatgtaaatgtacaagaaccgtaaaatttctggtaaacaatggccgctggtcacaactgatcgttggccaccttctcgcaaccgcaactattgctcactgcgtcacatatgattaagtgtgcagaagatatttgatctggcacacaggatcagcacacgtcttcgcatcatcatataccttttgttcttctggacgaggaggccatgctagtcgttaaatattttctttttatttggataaattttctttttatttggataacttagtgtaacatagtggtagaaatataatatctctatttataaacaatccattatatagatcacacccatgacccatccaaacatgtgcgtaaaatacaatgtagaattctagttataaaacagtcaagtagttctaaagaaaatttctccgagtatccaagttttagcctaagcacaacaaatttccacaacaatacaaaataaatttacaagtacaaatcttcaacaaattccttgtgtaccaccgttattttgccgcatactttgtcactcattgtctttctaccagttgtgacatcatgaggtctttcagtactagtactacacatggaattgtctatagaacagattggtgaagatacgagctattcctctcgttaaaatatatgatatttgatttttgaccataaattttttattaggatacgcttatagataagttaagtttatgactttatggaagtgcttgacaaagcaaaactgaggttgtgctcacatatcatggactcatgggtcatcttaggctgaggcatcaagaatggagtaaagctcaaagcaagcagacactgtaatacgaaagcttatgcatccatgaaaatgctcatcataattttgacccttaaatgttccattatagtaattaagcgataatagacatggaatataagaaatagaataatctaaggtgtgcttctgcagtgaaagatgaagttataacaaggacaataacaagtgagaatgtataaaagaataatccttacatgcaactgattgcgaagaagctctgactttgtttcctgttatataaaaggaaaaaaacataaatatttatgaatgtaataatatgcttatatcattatatgccacaccatggtagaatattttttaagaaacatataaaaggtgctcaaagcctgttcattgagggcttctcttagtttattgattaggtttattccagccatgttgacactttcaagttgctcagcctcaatgcactgctttaggactgcttcctgccattgaaggtcagaaaacaactatgatctttgctgaatacctatgaaatagaaaaggagtaaggtgttataagtgcatagattattttgatcaagaatttaagtaaaaggctgaaagtattatagcatcaaagtatcatatctcttcatatccagtctccaactttgtaaataaagaaaaaaaagtaaattcaggtttcagattatcagagctaaggagcattgttaataggaaactttgcagtgcaatattgttctacactgtaactcatcaaaaaaacttagtcagatttgaaaatagcaacaatccataattatggcatacatgcatggtagcactatattcaagtagataatccacagcaataatccggtaaataatctgttccaaacaggaactcatgcaaggacaatgcattaatttggtattgagttgttttagctgagta

SEQ ID NO: 1974 - DNA, 15019 bp, Oryza sativa
acacctgtccacaaaatggtcgttcagacttcagcttcctttgtcagttattaatcatgtacagagtactatttttggcataatcatgaaacatcaaagtaaccatgtgtcatggcaccttccgaagattccccaacctcggaatgatcgcagattccatcatgaattgggtcaggctggtcattgcttggtgcttgctaaccttagtgaagattgattgcacacacagtcctgctgcaaatcactcatcccttcagtcatctcctgcacagtcatcagcccatgtctatcaaacctatgtggcttcagtaggtcatcactccttattggaacatctcaatacctggtttttcacctcccttcaggtgatgaaatcagtcaaaaactcaaaacaatccatgctggagcaagttgacttggtcacccttcagcaatcagcacatccaacagctcaatagatctcctaagctttctctcccggaacacagactcaatcagccttgcccagcatctagcctctggcatgaacccagtgtccaccagtccatacaatgtgactgttgcatctgataccctcccaacatcacacagaccaatcaacagcatgtttgatgctgcatagtgaggtacaaatcctcgtccgagcatcatgcccagcaagccagccgctttctccatctctccacatgagcacaggcaattcatcacaatccggtagcttgcgacattcagctgtactccttcggacggtaacttctcaagcaaggtcactgcttccgctatccgtctatctttgcacaacccctcaagcagcagattgtatgtgacaacatcagccttacaccctttctgccacatctcctgcacaagattgatcccctcatccacattcccatgccgacaaaggcatccaacaagtgaggtatagctgacagcatccggctgaaccccagatctaatcatctcctcaaatacccccctcgctgcctccacttcccctttcttacagtgcccattgatcaaagtggcatagttgaaggcatttggctcgcactcattcttcctcataaatccaaagatcgattgtgctttctccacctgtcctagcctgcagaatccaccgatgagcaaattgtatgttagctggtctggcacaatgcggtccttctcgatcatgtcctcaaatagttcaaacgcttccttcatctgagccccacgacagagcccacctatcaatgttgaataggtgactaagcttggtctaacatcagcgcagttcatcttacgcatttcatcaaacacctggaaggctgtccccaaatcgcctttcttgacgtaatgcttgatgaggatgttgtagatgcacgtgttgggctgcggaaggtacttgctccgggggtcgcgcaggtcggccaggagctcggtgagaacatcggggcagcggcgggaggagacgaggcggtcgaggcagacggcgagggccttgcgggagacgcggccccggcggaggagcgcggggaggaggcggaggagcgcgagggagtggtcgggcgggaggaggcggaggagcgggaggaactgcggctcgaggaagcggcagggcgcggaggcggcgcggcggaggacggcggcggcggcggaggggaggcgagagcgggcgaggcggacgaggagcgcggcgaaggtggccggggtgtgcgagaagccgcgctgcgcggcggcggcgttgaagaggtcgagcgcgcgctgcgcggagggggaggaggcgatgaggcgggctaggtcggggtggtggacgtaccgcagctgcgtgaggggcgcttcgggcagcggaagcggcggcggcggcggggagggcggcgcggcgcgtgtggggcttcggtagtggagcggggagatccacgggagcggggctttggtggaagcgggtgagggtttcatgctcccctgcggcggcggatgctggggaggaaacaggctagggcggcgggcggcaggacgccgtggaatcgcggcgccgccctcgtgtggtgtctcgcgagcgcagcgcaggcagggcgccggagcggagcggagcaggagcaaggcgagtgtcctctgccttggctgggccgtttgtcaaatcttggacgctctttttgtatgtttggatggccaggatttctctaggcttcacgggagtggctgtgttcttgctgtgttcttcccccgttttccgcgcgtacgcttttcaaactactaaacggtgtgatttatataaaaactttctatataaaagttgtttaaaaaaatcatgttaatctatttttttaaaaaaaatagttaatacttaattaatcatgcaataaaatgaacttcgttttacgtgccggggaagaggggtttcttgttgtaaatttagtcataattcggcatattttaatccaaaatattaagacaataaacatgacatttgcaatatgagtagatctagtgacagtgcaagatgtatacaacttgagtatgcttgatatgaaataagtatcaacatttacatagtaacgcaatactgccattgcgaagagtattaacaaagaaacatctaatagaatcgggagaatgaaagtataccccgagaacgtcccaccgctggattttgaggcagtactacctccgttgatgtcgttcattatcttgtctccaatctccgtcgacatcttggtgaaggcgtcgatgcagcagcagtagccgtgaagaacaagagcagttcgtccgcctacccgtgcaggttctcaagcggatggagtttcggaggcacctgctcgtcccgtacacctgtgcacgcaggtgaacagaatcggggaaggattttgcagctcaggaacagaggaggaggaactcgaagtgcaagagaggccgggaagaacttctcccgtccttctagtcactgcggagtatataatatgcgagtgcgagagtaacgttcggagtcatcaaccacggtgtttaatttcgtaaccgatgcgctcgttaatacggaatcaattcacggcatttaattccataaccgacggaatcaattcacggtgtttaattctgtaaccgacggaatcaattcacgacgtttacttccgtaaccgacgcgttcattgatacgaaatcaattctccgtatttattaccgtccgttacaaaacgagagagtgtagcaaatgtctgcctcgcctcgcctcgcctcgcctcgcccgcctggctgtccgcgcaccatctcaaccggtcaacagagactaactccgtatttaagttgagacctcttcacccgatttccaaggtggtattattacccatagcacttaatgtgggccaatggaatttattaggatttaattgggcttagcccattaatctaacaatccccaccaaatttcatggctcacaggaaatgctctcgattctgatcttgtttgttataccagtgtttcggtggagactgttaagttgaacttcctcctaggaaaaaagctacaccagattacaactgaaaaatggactataccttgaattgtcagtcttgtgcgattcaggtttcactcaaacccttaactggtactaggctgccgtttgcatcccctctgtttggagcgtataagtcatactcccggccttttcatgagtatctagagatcaaccagatctcatagactgtgactagcagtcggactcatataggtgtgttccttctaagatgttctgtaggccaacatatctgctttatgaaaagctactcggattacattaaggtgtataccatcctaccatacagattagaagagaagtgcatcatgaagataagcccattttagggtctcttctctcagttacacaatagtttgtttcgccatccaaattcacgggatctctgatcacaatagacaggtttccattattgtgcaactctaagtgggtctcaagcccatctccctcgatgcacagtctatcacattacgtggtagccccttggtaaactgatctgccagatttttagccgtctggacatagtccaatgctatcactccggagtttttctgctttctgacagacttcagtcttcttttaacatgcctggatgacttcatgttgtccttcgaactgttcactttaataatcattgtttgattatcacagttcatcaggattgctggtactggtttttcaaccatcggcaagtccatcaggagctcacgaagccattcggcctcaactgtggcagtatctaaaactgtgagttatgcttccattgtagaccttgttaagatggtctgcttgcaagacttacaggaaacagcgtcccctccaagtgtgaacacatacccacttgtggcctttatctcatcagcatcagatatccagtttgaatcactatagccctctagtacttttgggtacccagagtagtaaatttcatagctcattgtcccttttagatagcgcattactctttcaagagcatgccaatgatcatctcccggatttgaaacaaaccggctcaacttgctcacagcaaatgagatgtcaggccttgttgcactagctaagtacatcaatgaaccaataatctaggagtatctccattgatcccttgctattcttcggtttttccttaatagcacactaggatcataaggagtaggagctgccttgcagtcactataaccaaagcgactcaggaccttgtccacatagtgagattgcacaagtataatcccaccctcatctcctctcggtagtttaatgttaagaattacatcagctactcccaaatccttcatttcaaagcttttggacagaaagtccttgacctcctcaatcacattgagtctggtcccaaagatcaatatgtcatcgacatataaacacaagatcactccctctcccccaccatagcgatagtacacacatttgtcagcttcattcacaacaaagccagcagatgtaagtgtattgtcaaacttctcatgccattgcttaggcgcttgtttgagaccatacaaggacttcaacagcttgcacaccattccctcttgaccttctagtacatacccatctggttgatccatatagatctcctcctccaaccctccattgaggaaagctgtcttaacatccatctgatggacgagtagaccatgagaggctgccagagtgagtagtactcgaatcgtagtcaagcgaacaaccggtgaataagtgtcaaaaaagtcctcgccttctttttgggtataacccttggccacaagccttgctttatacttttcgattgtaccatcagccctaagctttttcttgaaagcccatttgcatcttacaggcttgcacccatatggacgctcaatgacttcccaagtaccattagacataattgagtccatctcattgcataccgcttccttccaatagtcagcgtcaggagatgaatatacctcttcaatggttcttggagtatcatccacaagatatacaatgtagtcatctccaaaaaactttgcagtcctttgtctcttactctttcgagttgctacaatgttatcctcctcaggatttcctcaagcatttgatcaatgtgttctatcggtgcaaactgctcaggggataaaataggttcttgactagaagtgcttggtgcatttttcataggaaattcattctcaaaaaatgtagcatctctggactcagtaattgtaccaacacgcatgtcaggtactccagaatttactattaagaacctatatcccacaccgtggatagcataaccaaagaacacacaatctacggtctttggtccaagtttacgctttttggctataggtacatttaccttggccaaacagccccatgtgcgctggtgtgagagatttaatttcttcctttcccttcctcgaatggtgttacttccttaagcttagtaggaattctattcaggacatgacacacaatcaatattgcctcacccaccattccttggacagtcctgcagtgtctaacatggcattcaccatctcagttagagtacggttctttctttcggctaccccgtttgactggggtgaataggggggcatcctctcatgaataattccatactctttgcagaaagaaataaactcattggaaaaatactctccacccctatcagacctcaaccttttgattttcctttccagttggttttctacctcagcgttatagatcttaaagtaatgtaatgcttcatcctttgttttcaataggtacacatagcagaatctagtgcaatcatctatcagtgtcatgaaatatttctttccccctttacttaacacgttattaatttcgcatagatcggaatgaacaagttctagtggtgccaaattcctcgcctcgatgccttatgaggcttgcgaggttgtttcaattgaacacaagtatggcacttagagcgtttgactaaactgaattttggaattaaactcatgttggctaagcgtgtcatacaaccaaaattcacaaaattcacatgacaaagtcgcgaatgccacacattggactcatcatcatcatcgcctacatggttcacaactttattacatatatcatccaaggaaagcggaacaagcctccgctgtcataaccttttccaataaacattccatatttagatacgacacatttattggattcaaacacaagtctaaaaccatctctacacagtacagagccgctaactagattcttctttattgaagggacatgctgcatgttcttcagctgcacgatctttcccgaagtaaacttcagatcgaccataccaacaccatgaatagccgcaagcgatccatttcccatcaacaaggaggaacctctcccgacctgataagaagaaacagagaaatgccagcacacacatgaatattagcaccagtatcaacccaccaatcaggtgagtgacagacagagagaactataggtaaaaatttaccatacctcgatgttcctccgccctcactaataaccatgtttgtagacttcttgttcttgcgcttaggacaatccttggaccaatgcccaggcttgccacacacaaagcaatctccttttacctttcccttgcctttcttcttaaaattggttgtagccttgggtttgacgtcaggtttgactttcttgttgttgttgtgggatgcgtgagggttcttcttctgcaccaaattggcactagaacctccctcgatctttttgccccggttgccctttgcccttgacttctcctcaacacccaaagagccaataagatcagtaacactgaactcttgcctcttgtgttttagagaagtagcaaagtccgtccaagaaggtggcaatttggcaataatgccacctgccacaaacttgtccggcaactcacagttgttgttctcaagttcctttgccaacatctgaatctcatgagtctgttccactatagaacggtcatcgaccatcttgtagtcatagaactgctccatgacatacagctcgctgccggcgtcagaaaccctgaacttggcctcaagagcatcccacatgtccttccctgaaggcatgtgcatatacacgtccacaatactatcggcgagcacactgatcaatgctccacggaacaagcaatccgtagcctcaaacttagcctcctcctcaggggagatagacggttcactcggtttgccccgtgaaacaaagaaacattgcatcgccgtcaaccacaaaagtgcatgtgctttccatcttttataatttgaaccatcgaaagcatgtggttttagtgatgcagcaaagccaactaccgaaaaagacctattaagtttttggattgttggaaatttggtcataattcagcatattttaatccaaaatagtaagacaataaacatgacatttgcaatatgagtagatctagtgacagtgctagatgtatacaacttgagtatgcttaatataaaataagcatcaacatttacatattaacacaatgatgccattgcgaagagtattaacaaagaaacatctaatagaatcgggagaatgaaagtataccccgagaacgtcccaccgctggattttgaggcagcactgcctccgttgatgtcgttcatcatcttgtctccaatctccgtcgacatcttggtgaaggtgacgatgcagctgcagtagccgtgaagagcaagagcagtcgcgcttgaagcgctacccaaaatcttgatcgtccgtctacccgtgcaggttctcaagcggacggagtttcagaggcacctgctcatcccgtacacctgtgcgcgcaggtgaacagaaccggggaaggattttgcagctcaggaacagaggaggaggaactcgaagtgcaagagagatcgggaagaacttctccagtccttctggtcgctgcggagtatataatatgcgagcgcgagagtaacgctcggagtcatcaaccgcggtgtttaatttcgaaaccgacgcgctcgttaatacggaatcaattcatggcatttaattccgtaaccgacggaatcaattcatggtgtttaattccgtaacgacgcgttcattgatacgaaatcaattctctgtgtttattactgtccattacaaaacgagagagcgcagcagcagcagctgtctgtctcgcctcgtctcgccccgcctggctgtccgcgcaccatctcaactggtcaacagagactctccactaactccgtatttaagttgagacctcttcacccgatttccaaggtggtattattacccatagcacttaatgtgggctaatggaatttattaggatttaattgggcctagcccattaatctaacatttccaaccccctcctctgaacaaaaggctacttttccaacttcacctattttatttttgacgtgcacgtttttaacttaataaacggtgtgactttttacaataactattatatagcattcaagcgtcctagcgatcgtgtcgaccacatgacctgaaatgggacaggctggcttattagttcttttttaatggctttatcctgcgggcttaaggactttcgcgaatcctgtgagcatgggctaacgatgagggttgtcgttgttgcgaaatctgattaaatgacgtggatcgccgttgttgcaggatccgatgatttgccaattgttgcgagaatcaccgcagcagagataattggcagatgtgattgatgaaaagcttgtgaccttaaccttgccggcatacaccatgaagtatgcttcaagcactgacgggcgtgggcattaaaagatttatggcgtttatgggtacagcaacacacctctgcagagtgtatgaattgtgatatgtcactccctgtttcgggtagaaactgtaaacgtggcaggaaagaaatatatcggaagttctaatacctgtggtaccttatatgcagtagatttttataattactttatatgagcttttacaatactgttttataaacatgcacaggcccggccctggaggggggcaagcggtgcggccgctctggcccccgactcgtaggtgtccctctccacccgcttcacccccctctggcccaacagaaactgatgcatgcgggaggtaagagcatgcccagcagctcttctatccggtcatccatcctttgtttagcatatggaggggaaaaatcatgctccagcaaacactccatcacacacgccatttttagacatcctccaaaccgagccctctccatgccaaatttggcgtttctctctcctcacgtcatccccccaactgcctagctccgatgactcgcgccaccatccggactgtaccatggggaaacagagaggatggacataccaggtctgccatttggagatcgccggagtggaagccccgccatccgcgccgccccaccgctcgcaccgctgctccttcatcgtgttgcccccgtcgggactcctctgcgcgcagcctccgcggccaccgcgtgcctcctccctgtccagatgcaccctcgtcggtcgtcctccaccgcccctcgctcgcccgactgccgccgcccctgggctcgccagcttgatgtagagaagtagtactagtaggaacaaagaagaacgatgcagagaactagtactagtaggaaaaagaagaaatagttgagcagtagtactagcatatagtagtatatgttacttgcattgcttttatactcattttaaatatatgagttaaaaattatccattaaaaatatatctgttaaaatttactcatttcgaaatattatagcgataaataacaccgttaaattaagttattcaaaatatatcccttcaaatacaaatgtaaagttagttggaagatattataaaatatagaagaatgtgatatggaggatgcaatttggatgatctgctggagtgagaagagatatggaagatgaatctttttggatgaccatccatataggaatatgcaggatcgaatttggatgagttgctggagacgctccgagttcctgagaatcccgacggcatcgacgcgcgcgatcacgccgaaccgccgctcacgtcctgacgcgaagtcgcgaacgcaagatcgcggccgctggcagtagcaccgtcgcaacacctcagccatctcgtccaaggccgccgtccgctggccgtttccgcgcacttccgcttccgccgcgcgacgcccatgcgaggcgccagagacgcagccgccgagccgcgcaggtttcttgccgttgccgtgttctacacttcttctcatgcctcattgatgtcttgctgttgctaatttgctgaggttgtgtttagtttgtgtgccaaaattttttttaagtatacggatacatatttgaagtatcaaacgtaaactaataacaaaacaaattacagattccacctgaaaattgtgagacgaatctattaagcctaattaatctatcattagcaaatgtctactgtagcaccacattgttaaatcatagcgtaattaggctcaaaagattcgtctcgcaatttacatacaaactgtgcaattgatttttttcgtccatatttagtgtttcatgtatgtgtccaaatatttaatgtgatgaaaaagttaaaagtttaaagaaaaaagtttaaatctaagcacggcctaaatcactgcgacgatcactgattcactttactggtctagtgagcagcaacaacaccattgccatatgaaaaattgtaactatgattccatgtgtaaattgtaatctgttatttgttgcctgttgctaattcaattggacgagtgttggatgaaccaacaatggcagtgtgtgtcccgacgcacttgcggactggtcgtgcgctgcgcactcggatacttgcaatcaactacttggtaagatatactaaatctagatttgtaattttctagcatactttatacgagttaaaacactgtagttatgttaattttttcaatcattaggccatattgtcgataaagtatgcatcggatagcgagaaaaggggaaaaacgaaaaagagtggatggtttaataaaagcctagaaaggagcattggacaaatttttaagaggtaacacgtgaacgtcaagcaaatataattttaaggtaatatgtacaatgttttctataaaaattctatttctgaatgcaatttaaacgtttatggcaataactcatatatatacgttaacaacctctacatttagtttcgcatcgggaccttaaaaactcaggaccggccctgcttgctagctccaatttcttgcatgctcattgggaagaaatcacttgtgctctccaactatactgacaacgcctaattaaaagattgatcctactaacactatgggtttgttcggcggttcagtacagttgcagacacaatacactatttgtgttggccgcacaacagtgaaattaagtacaattgagccgggcctatatctctcattgttttctggttagcttatcaaccacatgaaaaattaaattttagaacttgaatttaattttaagttaaatttgtggttttaaattaaagttaatttataggttctctcatcgtattgtatctttcggcgtttacttttaaagctctaaacatagatataaaaacttgcccataaattatctttggttgattcattcgccagctcagaaatcttgtagaaacatagggattgttcattttatagtcaaaatcaactttaccaaattttgatgatgccaaattttgacacgttttgacgttaccggatttttatactatcggttgtgtttatttgaaaccttatcaaattttggttgagtttttgtgagagaacttccggaattgccaatctttgttagggtgacaatgataacattatatttagtttgtttccctaccaaaacctagtcatatcaaaacttgataaagttgaaagtagcaataaagtgtatatatccatgaatcaaaggtataaaacttaatatattttaattgatatatacggatggtttatattttagaaacacacatggaagccatatttacttgatttcaacatctactgacgaattgagatccggtgctgtagtagtaacaactgcaaccttggcagtcggagcacattataaccgttggatcgatggacccaacagctcggattcgctctaccatcccgttgcaccatcgatgctacagtaaccgctacagtgtaagtttgccacagtattttatgaacaatactttcttaccatctgagccgtcagttttttatccatcggctgcactgcaactgctaaacatgcagtcgtagatctcgatcctcaccaaggcacatgctagcacagcacaaagaaacgtaggagtactctgctgccataaaggcaaaaccatgtggcttcaccttctctgctgcaagagttccaattcctatgcatgccaatgtttctccattgtaaattacctgggtgatgaggagagcagcaacctctagttataagccaagaataatgtggagccgtggaggtgctggagagtcaaaagaactcaagttttagtagagtgaaggagaacagcattgtgacattctctaatgtgaggtacatgcctttctcggtttgatagataatgatgtagggctatcaagtatttacccaatgcttacatttgtttgttggtgtgtatttccacataagataggtgtggcactggatgcccgtaggtcgtatgtgcaatgcataggagtgggattgtgaggcagctttgggaatgatcggcatctaccacgtttacatgacagtctctctttcagatcacgaggatactttaaaaaaaaggagatttggaggcagcggcgaagccaggatttaggtattaggggggccaaccataaggtcaatgtatccaaaagaaagcttattggctgcttggtgaacaacgtgttgtatgcatgatcagttttcacccccctacagaatggtgtccttgcaatcaatcttgtgtggacgtctaggcggtttatctccatccatccacttctttagtaaggctgagttgttttggacaacttctcggtttttcatgaggtactacctaaacggttaaataaattgtttgtaggaaagttttttatataagtttcttaatatattttataagtttctaataattaatacctaattaatcatatgctgccgttagaaatatacttccaatcgctgaatcgaatgcaacctaagaattacataattgaatcatgcaagagagagttaaacacaatttatgtactccctccgtttcacaatgtaagtcattctagcattcccacattcatattgatgttaatgaatctagacatatatatctatctagattcattaccataaatatgaatatgggaaatgatagaatgacttacattgtgaaacggagaaagtagttctatactagcagtctagcactgagatttgatgcactacaaaacatctcaattacttctttaatttgaagactccatcctgttaatttgtcgcatcacatcaaaagcttcacccagctgcttgcgggagttttagtgagttgctgatcgatgctcccagctagagctatgcatacgcattcagctacacatatccatactcgcagttagtgagttgctagctaccgatatatactcttgcatctattaattatttatctagggaagggaggggggaggaggggggaggatcagaggatgaggggtgccaggccctccccggcaccccctgtggtgaacccatgtggcctcgccactgtttggagggagatacgtgtcttcaaacattcttttaagaaaaaattaaaaaaattgtgagcgtgttaggattaaacacgggacctcagggttaaaactacacatagcttgttactgcactacattagaacacgaggatactacaacaagcaagaggtggcagacttgagagataattaatgctagaccacataatcatggatagctaccaatggacacacagtggaaccgaggatgagtttgaagatccaccgaagctcacatgagtgtaattgatcaatcacagaagttgttgattgtgtgtgtcccgtagttcgtagatagttgccccttcattgcagatcatccttactcaaattgataaacaatgctaccaaagtcgacacatacaagtacagaagtgcagcgagcaggcggttttgctttcctaatcagatcgaaaagtggtttcaaaattaatactatatttgattcaaacctcttgcatgactaattcattttttcctcatagatccggcagataaaatacattaatatactaccttatgcttgacattgaaaaaaaatatatttttttataatttcagttttcaattttcaattattccaatgggcaccagtacccgccactctgcctgcagcacgagagcggcacctggtttgttcatgtttccgacggccgtccaaaaccgccaaa

SEQ ID NO: 1975 - DNA, 1546 bp, Oryza sativa
aaatattgaagattggaccaccacttgttgtaataatataacacggcatcatatttggtgacgcatgccgagatgtcgaagctcctgtagacgtcgtggttggtgaagtaggaaagcggtagtgaagacatataattgtgaagataaaagcaccagccggcggcggcataaccagtcggcgacggaagacgatgatgtccatcagtagtggtagctgtataaaccagacgtagaggcgagggcactagtcaacagcagacgagacgaccggcgatgaagacgataaggccaatcaacactagcagaatcatgcagccatggaagtgaataaaccagtcggcagcagacgtaggcagcttgtgttgaagatgctgacgcctattagcggtgacggcgatgtagccagccgtgaagaagatagcatcagttggcgtcataacaggccagccgtgcaggcggtgacaccagtcggcggcggatgaggcggccggtcagtgaagcggccggtcggtgaagacgtagacgcccaacaacggtggcataatagccagccgtgcaggcggaaacaccagtcggcggcggacgaggcggccggtcggtgaagacgtagacgcccaacaacggcggcataataggccaaccgtgcaggcggaaacaccagttggtggcggacgaggcggccggtcggtgaagacgtagacgcccaacaacggtgttgtgaccaaccaaccgtatagacgaagacaccagtcggcggcggcgacggcaagccagtggtgatgttctgactgatccattcctggggcgtaagagataagcttaaagccatgaatcccttttatgcatatctggatctggatcctgcagaacgaacatataggatgagtagtatctgatgtaaatataatacttcgagaaaaattcaagtattttaaaatatttataaatatgtatttcttctcttgtcaattttgattcccccgagcagatgactcattacgtttaaacactctgcccgactagtcatagccatcaagcaccgggagtcggcctaagcacttcccaaacatgcatatgagtgacatgagttcgtcattaatggaacaaagtttcatgggtcggagtttactactcgggtacttttgcaattattaagagcagaaaataaattatcttatctctatgcttttgatttattccgaataatacttagcaccttgcgttattcggtccatccaacaagcccctaggtgctaggaatcggcccaaaggcaactatccattggcaaaccaaacggaaagcataggaagatggaactccataactcgataggcacttttgtattcagaatatgtcgcaagcaatcaagataaatattatgaaaattgtttaaaaaatatgatataacatctgtagcccccgactcactagtcaacggcgaaccagttgatgtagtgaggcaaaggaaaaggcaaaatatcatataaagaataaaataaatgatgacttagctttgtcatattccccttgattatggcagaggtg

SEQ ID NO: 1976 - DNA, 1088 bp, Oryza sativa
agacgaccaatatagagagaatattgcccaccagaggtggcaaaaatattggtggtagtgaagatagtgataccaatcaaaagtgatgaagttgcacaaccgtgaaggcaaagaaaccagtcggcagcagtcaggtcagccagcaatgaagatgaaggcgcccagcgataaagttgtgtagccatgacaacgaaataatcagtcggtgacagacgatgcagttggtgaagaagatgaagatgcccattagtggcgacataataagccatccataaaggcgaggataccggtcggtgatgacgaaagcaagccgacggtgaagatgtagacacgcatcaaaggcgatgacgaaatccaccaatcatgaagatgaagaaaatagtcggcggcgacaaacgcaaccgatagtaatgatgataagcagcaatcatagatgatcaaatataatgacgaagttgcccatcaatagcagtagagtgggctatgttgaagaggctatgttgaatagggatattgatgaagatgacgatgtcgatgatccagtcaatagcagtgtagcaaccgatgataatgacgaagacgctcatcagcgtttgcatagtaggtcaaccgtgaaggcgaaataacaagtcggcaatgacggaagcaactggagacgaagacatagtcatccattagcaacggcagagatgtcagggccgatgaattagaggtgctggtgatgaagtcaatgacaataatctatcaaactgttgagaagatatcgaagctcgagtagtttttttggcgcgagagtgtgtataacgaagattgatgcaaagctccttgatttataaagatggcagtagaatttggtgttatagctgttgcagattcttcacttggaggaaagtagatgctgttgcccaactcatcaaaactgaacttattggttgataactccaaactcccgaacatgtagattaaatttcaaaattgatactggaaatatttggagtagattgtgacggcgtgaagaagccaaaattgccggtgtaataattggagtcgctgaaattaaatgacggttctgaagcgtagacgaagat

SEQ ID NO: 1977 - DNA, 1110 bp, Oryza sativa
ttgtttattaatacttgctctatccggtcaacagccatatatatgagttgtaattctgttagttgcattggccaaccactgctacctggggagatactccatcatgtaatatttagttataattaccactgtatatactccatcaattatatggtaataagtagttttttttttcttttttcttctcaaatgttatgcacatattgcatgttgaaagttatttattatgtccgcagcaacgcgcggggtattatctagttaagttaatggatgaaccatctacatctgtttaatcctaaatggatgcttcagtattgaaaatctggttgtttcggttctgcctatgaatttttgctgctgttgtttctgaatggatgccattgctgctgtttatgaactgactagtgtctactagttgcccatgtggaagctgatgaaatctgatgtttgttacactgatgaaagctggtgtttgtttcactgatgaaagctggtgtttctgcttctgccgcataacatatttggcactgatacacttactagcatggatatttgggatttaaacacaagtacaaatccaggaacacaacatgtgagctttgcattcactgattaatagatgcaatttaactgaaacagccagatttaaacacaagtacaaatccaggcacacaacatgtgagctttgcattcaataccgatgcagtttaacaacaagctgggcaaaatcaacccctaatccataagaaagtttgcaaatacaaaatgcagtacttctggtgcaatacaggtttggaacaggtctgcaaataacaagaagctggacaaaatcaacccctaatccataagaaggatggctagcggcgctgctctgtccgggatggctggcggtgacggaaagaaaggtgctcgggcggcgggcaacggcggtggcacctgtgctcggccggctatggtcgggcggtggcggctgtggtcgggcgccggcggaactgctacggcggacgacgactcgtgctggacttgaagggattgtttcgcctgctttggcggtgccgaccgagtggcccaacgagcgaatgcctccttttttccgatcgagcccctcct

SEQ ID NO: 1978 - DNA, 1836 bp, Oryza sativa
gtcctcttctttttttttccttcacataacatgtctaattccgatcatgtttattgcagcgtcgttacgctcacgtccaggtgagacgtggttacccggacttcgtgttcgagtttgaccgtctccagccgagcgacgtcatctgggagccgtacacagaagaggccgtcgctgcgagagcaccgctaggactttcgtccttgtgcacacgcgaccaggcttactggctcaccatcctgccgatggtgttcgacattttcgttgagcctcactgcccgcagcgtgtgatgagacagttcggacttaggcaggtgtttccgggcaacgtgcagccgaccgtcccccctgccgaccactcgtgagttcggattgttcatttctaaatttttatgataattacatcatcgagccatacaatttacctctcttcacaggttgactcgacggggacagctagcaggcgcactttgggctccacgtgtacagcagtacgttgacgactgggtgttagctacagaggaggtgatcaacgagctcttcccacacacggaggagaactaccgtgactaccttcgctggtaccttcctcgcactcgtgcgcgtgtgaccttcactccagacgccccagagccgcacgttgccgctgtcacggacgcgtatcccacgcaccgtgaccgagactacttcgtggcggtacgtccaatttgtattacttccaacaattatgtcatttatcttgcataatataggacaactactgaattttttatttccatcttgcataggctgatgcggcacgggatatcagtgccgatatcaccgcagtccaggtgaggttgagtagaggtttgcacttgactgacgttgagcagaggtcgaccttcgaccggatgcaggagaagatgcgtgcggtcatgcgcgtcttctcctgtcgcagcgccgtggacgtcgtacctccagctggtccggtacacccacggcctcgcggtcctaccgtcggagcaggacctcgtttgtcttcgagcgcccctagcttcggagcagtgcgacctacagcaccggtttcgcacggtacagttcagcctagatattagttcttttttgtttcagcttttgcacgaatgtgtcaccattttttaactgcacgtttcctcatcgcaggacctcgtatgccttcgagcgcgttcgcaggcacgaccggcgcttccgcgagctccgcaggggcgttcgccacctcttcgggcgcgttcgccagctcttcctctcacggagcgtcgatccctcgcccacacggtacttaagattttattaatactgttaaatacctgtacgaaactgatggtccttgtccagcaggatttgcagccgggatcttcggtactggggcctcttcgtctcacgccggtaggactggtcctactagccagttctacgacgacgacttgcacggtgcagaccaccaggacgtactaggctcctctcagcttggaggagctccagaggcgcacactcaggagcagccagaggtcacacctgtacaggcaggacgggttggccgtgccgtacccccggaccgactcacgtactcccaggggcacattagggcgcagggtaggagggacaggggtaagaggcctcgtcagtagtgttctacctcttcagtccttatgtgaccgtttcttttggcttacaaacttgtaaagcagtactacttttgctattactactgcagtactacttgtgtttgtctcgtctacgtagttcttttcattcgtatggtgcttgaacaacttatgctcacaacaacacactttcggcgcttcacggtagtgccat

SEQ ID NO: 1979 - DNA, 739 bp, Oryza sativa
atatgtttctgatcaacctatttgatgcaggtatggcgtacgacacaccggcgctgttgaaccgtgggattgacaggaaccaccgctcgttcctgtcagcagtcgagggtgcacagctcggcaccttccgtccacgcacgtcgcgcgagtggttgcgtgtcgacccccgtcacgttccttggtacgcgtatgttcacatttgaactcaactttgctttgttttgcacttatgtttgaagtttgctctatacaggttgcgtgcggcaggccttctaccactttgtaggcttgttgaggcggcggcggacgaccgtgacccagcgaagcggtgggatgcagaccggtcactccttgccgctcttgtagaccgctggagacctgagacgcacacgttccaccttccctgtggggagatggctccgacactgcaggacgtgtcgtacctgctcgggctaccgctggcgggagcaccagttggtcccgtcgacggtgtttttgggtggaaggaggatatcactgcgcgcttcgagcaggtgatgcgccttccacacctaggaccgaccaccacccttcctccgtactctacagtcgggcctagcaaggcttggttgctccagttcactgtaagtaaataagttgttattatcatacatgcttatttgcgaccggatgagtgttttgtactaacatttcattcttaactgtaggcggaccttctgcaccctgacgctgatgatta

SEQ ID NO: 1980 - DNA, 811 bp, Oryza sativa
aggaggtacctcaatgaagatgtgtccttctgtcgggacatcgccatcagccaacacaaggattccatcaagtatctggagatggagatcgtttcgccaagaacggtgaccaccaccatacccacctccacctctgcagatcctacttcataccttgaatgggttcgccgcagcagagaacctcagccgacacggcgacgctccgtgttccaccctggttcgtggagaatcactacatggagcatgcctatcccggtcacttcatgggacgactggcgccgtgactgcactgctgaatcgcgtgaagtccatcttgacaccaacccaagtcaccattacgagttgcttcatagcctcatgctcagcaacagcagtgatgaacacagggaggaggctcaaggtcaaggggcaacctcttccttgtccctaggtcgcctgcgtttgtgttacccggccttgagttgcatcgatgatgatgttgtttacctcttgggcaacgctgctggcaggggtgctaagacgggaggaatgatggtcgctgttgacgtcaggaacaaggagctgcgaggagtggccaagcttgaccccgaaaagaacaccctctactccatgcgatgctaccttgcaactgggatctccaaacgcctcaacactaccacaggtacttaattaccgctcgtattccagaacaaatgcagcaccatgtgcatatgggtaataaaatgccatttaaggatctagggctgatcattatagttctttgtttatgatggtccgaatgaccaaactaggactagaatgtagtaacttt

SEQ ID NO: 1981 - DNA, 1529 bp, Oryza sativa
aacctgttcatgatttgatcgagctgcgacaattaactgaattactactgaatttgttgctgcagctcctactacaacatcagcatcacgtcgatgagcgtcggggacaagaacttgccgttggggttctacgccattgctgactccggcacgtccttcacctacctcaacgacccggcctacacggcctacaccaccaatgtatagtactaacttgtcctacatgttcactgacagttttcttatagccacttaatggatcatgtctctgaaactctgatgtgagctagatattgattatacttaagacttaagaaagcccaagttggtgactggctttctttagtttttgtagaccaagtcagattaatcgggtggagtactatatagaatggtcctgaagagttgatcaaaaatgcaattacaaaaagaatgcaatgaacagagtgtacaaagttaaatgaggtcaacttgctcatcatttctgtttattcattctgtatcgcagttcaacgcgcagatcagcgagaggagggccaacttcagcggcagtactcgttctggtccatttcctttcgagtactgctactcgttgaggtaacaattctgcatctaagcctctacaaatttaagttgcaagattgtttcatctcgcaagtcgcagcacaaatcgttctgatggtgtttgggaaaatgcagtcctgatcaaacaacggtggaactgcctgttgtgagcctgacgaccaatggaggagccgtgttcccggtgaccagccctgtttaccccatcgcggctcagatgacaaacggagaggtaaattacagaaaagatcaccatgtagtcagtagtcatggaacaagaagcaccaattgcatcgtcatctctgaatctctctgacatttagtactagttgaagttgattattcaactaatcgaatgtgattcttcttaccgtgacaagcagattcgtatcattggttactgcctggctgtcatcaagagcgatctccccatcgacatcattggccgtacgttgttaactgtgtttttctgcttgctgcacgcactgtttcagtcttcagttaataatgctgaatgtgttgcgtgcagagaacttcatgaccgggctcaaggtcgtcttcaaccgtgagaaatccgtcctgggctggcaaaagttcgactgtaagttacctcattcatctcgatcccctgcagctagcaagaattaacgatgacattttttctttctgcatctgatcgatcactggctcactgctgcgaatgactgaaattgaatttgttcaggttacaaggacgagaagatgacagacgacgggtcgagcgtcgggagcccgagcccatcgccggggccgaccactcacgtcttcccgcagccgcaggagagcgactcgccggcgggcagaacgcccatccccggcgcggcgccggtgccgcggtcgagcagcgcggcagctggcggccgtgcaggttccggctcctgtcgtccatggcgctcttgctgctggct

SEQ ID NO: 1982 - DNA, 746 bp, Oryza sativa
actcatcaggatcctcctcagcaagttttctaatcatgtcaagagctttgcggattagtttcttcttgatggtcttcaggctgctatgttgttggagcatttctcgtgatacattgagaggcaatgtgtccgagtcgacgagaccctacagataatagcttataggtttaggctgcataagtcaatgaatggaataccgtgtcgttcatgaaatagtaatctagtaccttcaaaaagctgagatacttcggaagaagctcatcaaattcatcagagatgaaaacccttctaacatacaacttaaggtttgacttgttagagttgtagtaactctcatagagatcatgtggagccttgggaggaacaaagagcaaagctttgaactcaacatctccctcagcagtgaagtggctccaagacaagggcttgtcatcaccaaagtcctacaaaataatttgatattaaatgaggttacttgctttcttctgcaaggcttacataaaatgttatgctcctgtaaattcatcactgcagtctgtgtaccttagcaagtgagtggtaaactttgtgtattcttcttcagtaacctccttagggctacgaagccatatagccttcacatcattcagaagctcccactcagtagtggtttcctttactgtctttgtcttgggcttcttctcttcactctcttctgtctcttcttcctctgtagactcaggggctgccaagaaaagggctgcagg

SEQ ID NO: 1983 - DNA, 1692 bp, Oryza sativa
ttcagcacatatattacaagcaacagtagcagtagtgcagcacaccgatgactcgtgaaaaaaagaaaacaagagaagacatctgcaaaaactagctgggatggattggggcagagcttctattagtcaggaacgttccaacactgggttgatcgttgaggacgaactatttcttttgctttgcacgatagtcagcagctgctgctttgatggtagacttggcgagtgaggttggctttaggacgctcttcgggttcaaggcctgccgaatcttgaacactgcccatgctgtcccgattgcgtggcctgctgcatccatcccttcattggtcgcagccgcggctttctccccatatctgcagagcagacccaatgtaagagcttaagaagaatctctattgatcatttgatcaattccactacataaggaagaattagagaaaaaggatgtgcatatgatgtgcttcagatatggatgtaggacacgtaagaagtagtagaaatctacatataaagagaggagaaatgagtggaaaggagaataactcgtacttgtgggatacaagaccggtagtcacagttgatgatgtggacagaacattcgttccagccacttcgactgcgtcgcaaatcttccctgttggcatgaattaacgatatgtaagaaagacaatgttaccataatccaaagtgattagctccaacgagccaaattaccataagaaattactgcttcaaagaatgtgttcgggtaaatctgtatattttgttaactgttatactgaagtagatatatcgcataagagatataaagtactatttcatcggaaagcatggcggcaaacagaatatgtccctaaatgtatctaacatgttgagctaaggtcaaccagcatcagaaatgaaaaatagcataatcagtggttggaagtacaaagtggcagcagctgatttaatatgagctgatccagaaggagcatgccaaattaaacagaggaaatggagagccaagaaaaagaattgtatttcattccaaatttaagtcaccagagtacatgcttcttatgctaacttcagatttggcaaaaatttgtatccatcaagttatgcaaattcacaggatatatgcgaccaaaaaacccaagcaaagccttacctacgtcagataattatgacttatataatgcaacccacagggatattcaaattagaaacagaaaaaaaatctgctcatgagtcatgacacaggtgttgtctaggtgagtttaagaataacataaatttattaaattatgaaaccaggtttcatgtctgaataaagcaaacatatcaacactcattataccattaaaaaaaacaataatgcaaagcagacccattatgtaacactaaccagatacaatagaaaagttaaagaatcataccgaatccatcaagcgaagcaagaacaatctctccaggtaacaaattaaagaacttcttgccagcttttgagttagctattgagtttgtaaaatagccagtaacctttacaactccggatagtattccagttgccactttctcagacatttttgtcaccatcttgaccctggcaacaatcacaagcatgaattccttgaagcggaaaattgttaatgcttgatttaacacaatatctccctgcaacgtctattctcatagacactaaaa

SEQ ID NO: 1984 - DNA, 1625 bp, Oryza sativa
atcatattttacaaagcagtcggtatatcactcggatcatgttattcagggattcatactgcatatgctatatattaatattaagtcacttgtttgactacgattatcaaaaccactcagttggtgcatctattaggtacatctactcgatgcacctgactttatttttcagccctccacagtcttcatatttggtaaaagtactcgggagatcatggcgaggatgattgaagcactcggctttggagtaatctagttcgagagaagattatctttccgactgtgaaggtctcaggggctactgtggagattatgggtaccccatacccacacggcatggttatccgactagtcataggggatagcttatatctatggaatatttaaccgatcatgacttgggtattacgtttccttttatattatgaagcagcctaaagtcctgatttgataatattgtaaaatagatttaggaaaccgataccgtattggttaaggtttctatcttgtaatcctgccccccatcctatataaggtggacaggaggccctctagggggcatgacacaaactgatcgtcagatcaatatacacccggcgaattcaaatccccaaacaggagtagggtattacctctcatcgagagggcctgaacctgtctaaatcctttgtctccgcatccatccacttttaggtctcgtatgctacccccttttcatattgccgaaaatttgtttcgacaatgagcttatccagcaacccatgatgggctgtgttgtcgacgacatggaaatcatgcaagttagctgtgcagtcagggcgccagtcctcccatgaagtgaccgggataggcatggtccatgtagtgagcctccactggccaggccgccggacggaggagcgctgccgtgtcgtcggctgaggctgaggttctctgctccggcgaacccattcgaggaacgaatcaggaggatcatctgcaggcatggtgcgatcaccggaggatattatggttttggtcacaactcttggcatggtgatttccatctcggcgtacttgatgaagtccttgtgttggctgacggtgatgtcccgatagaaggactcgctgtcactgaggtatcttgtccagttgcccttggccggccatggcagcggcatgtcgcggagctttgggggagacatttcgtcgagcaggtcgcagaggaggatgccacgccagagatcgacccagccgacggtgcccttcgcgcctccgagcgcgatggtcttggtggtgatgtggtacacgggcctctcagctgagtcagggatcgggcacaccctgtccctcaccgcctcctccacaaacacctcctcgcacgtccaatttccggcgatctcatcaccatcgccaccaccagaagaagatttgtaccggtgcagcgcgaattgactgggcaggttgatcatctcgagggcggcaacgacgtactgctgcttgtcgccgcagatgctaacgatggcgaaatcgtcgtcgcgtaagcaatattgctggcacggcctggggagcagatctagcctggcgggttgatggtgatggtagacgaagtagtcgtcctgacggaagagactcttgccgccggg

SEQ ID NO: 1985 - DNA, 559 bp, Oryza sativa
cttatgtttttgaactgtggggaattagaaagcccaaatgcaatagctagcttctcacaatggactccaacaacttcttccttttcttcttcaacatctagagttccaatgccaatgtcaagcatagaatgtcccatcttaaacatcatcgactttaattctgctactgtatcctccaagccaacattatcaccatttgagaacacatacaccttattcctgatttctattgaacagctctcgacctcatctaaatttcttcctttgttgggtgtcatctcctctggcacatcaacagtttttccagttagatcttgcagactagaacctaacctttggactctgggatctccaggatcaatcgcagacagttctctagctgccaggtgagccagtcttacatttccatgcattacagctgcagtaagaaatgtgtcccagactgttgaattgggtatcaaaggcatctcgtcaataagctcatatgcttcttttagtctccctgaccgaccaagaagatccaccattgctgcataatggtctaattctggagttatat

SEQ ID NO: 1986 - DNA, 502 bp, Oryza sativa
tcctcctcctccacaaaccctaccacttcccctccaagctccgccatggccgcctgcaagaaccccgcgtcatggcgtccccgcaggcgcctcccctcccgctttcgtcgctccaagaatcgagaagcgctcgtatccgtatcccccgcgacgagccgaggccgacgccgcccgcgcgcagcagcagcagggaggagccccggttcgtcgcggagaccaaactcatcaccgtgcattcctgcgcggggcggctcggggacgcacgggaggtgttcgacggaatgggccgcagggacctgctcgcctggtcggccatgatcggcgcgtacgccatcaggggaatgtacagtgacgtcctcgcgctcgcggtgaccatggtcgaggaaggggtgctcccggacaggttcctgatcacgcggattttacaggcgtgcgcatatgccgaggaccttgagcttggtagggcgctccattccatggctatcaggagagggttcatggg

SEQ ID NO: 1987 - DNA, 508 bp, Oryza sativa
ctgaactaaacacagcccgtcttctggctgcaaacagtaacattttaccgtattagttatgacctctgtaaaatagaacagcacagactgcctattcagaacagccagtgaattatctctaaattaccttcttggcttcaggatccttcttcttctttggaggaagattatcacaatcaccatagatgcttccagttcgcttctcagtgttatcaatcagaatgctgtatttggcgtcaggacggatgatcaaggtgtagacgtgtgtcagttgatcggtctcgcatggcacgtccttcttgatcagatggttattgccgttcttaggctgcgttcgtttggagaacaaagggagtgagtttgtttctgttttccgcgcgcacgcttcccaaactactaaatggtgtgttttttgcaaaaaaaaaaaaattctataggaaagttgctttaaaaaatcatattaatccatttttaaagtttaaaatagttaatactcaattaatcatgc

SEQ ID NO: 1988 - DNA, 3654 bp, Oryza sativa
  unsure (1)..(3654): unsure at all n locations
cttcaccggcgcaatcccggacagctatggcgacctcgccgcgctcgagtaccttggactcaacggcaacacgctctccggccatgtccccgtctccctctcccgcctcacccgcctccgcgagatgtacatcggatactacaaccagtacgacggcggcgtcccgccggagttcggcgacctcggcgcgctcctccgcctcgacatgagcagctgcaacctcaccggccccgtcccgccggagctcggccgactccagcgcctcgacacgctcttcctgcagtggaaccgcctctccggcgagataccgccgcagctcggcgatctcagcagcctcgcgtcgctcgacctctccgtcaacgacctcgccggcgagatccctcccagcctcgccaacctctccaacctcaagctcctcaacctcttccggaaccacctccgcggcagcataccggacttcgtcgccggcttcgcgcagctcgaggtgctgcagctgtgggacaacaacctcaccggcaacatccccgccgggctcgggaagaacggccgcctcaagacgctcgacctggccaccaaccacctcaccggccccatcccggcggacctctgcgccggccggcggctggagatgctcgtgctcatggagaacggcctgttcggccccatcccggactcgctcggcgactgcaagacgctcacgcgcgtccgcctcgccaagaacttcttgaccggcccggttcccgccgggctcttcaacctcccgcaggccaacatggtggagctcaccgacaacctgctcaccggcgagctcccggacgtgatcggcggcgacaagatcggcatgctgctgctggggaacaatgggatcggtggccgcatccctccggccatcggcaacctcccggcgctgcagacgctgtcgctggagtccaacaacttctccggagcgctgccaccggagatcggcaatctcaagaacctgtccaggctcaacgtcagcggcaacgcgctcaccggcgccattccagacgagctcatccgntgcgcctccctcgccgccgtcgacctcagccgtaacggcttctccggcgagataccggagagcatcacgtcgctcaagatactgtgcacgctgaacgtgtccaggaacaggctcaccggcgagctcccgccggagatgtccaacatgacgagcctcacgacgctcgacgtgtcgtacaacagcctctcgggccccgtgccgatgcaggggcagttcttggtgttcaacgagagctcgttcgtcggcaacccggggctgtgcggcggccccgtggccgacgcgtgccctccgtccatggccggcggcggcggcggcgcggggtcccagctgcggctgcggtgggactcgaagaagatgctggtggcgctggtggcggcgttccggcggtggcggtggcgttcctgggcgcgaggaaggggtgctcggcgtggcggtcggcggcgcggcggcggtcgggggcgtggaagatgacggcgttccagaagctggagttctcggcggaggacgtggtggagtgcgtgaaggaggacaacatcatcgggaagggcggcgcggggatcgtgtaccacggcgtgacgcgcggggcggagctggcgatcaagcggttggtggggcgcggcggcggcgagcacgaccgggggttctcggcggaggtgacacgctggggaggatcaggcaccggaactcgtgaggctgctggggttcgtgtcgaacagggagacgaacctgctgctgtacgagtacatgccgaatgggtcgctgggggagatgctccatggcgggaagggggggcacctcgggtgggaggcgagggcgcgggtggggcggaggcggcgtgcggcctctgctacctccaccatgactgcgccccgaggatcatccaccgcgacgtcaagtccaacaacatcctcctcgactccgccttcgaggcgcacgtcgccgacttcggcctcgccaagttcctcggcggcgccacctccgagtgcatgtccgccattgctggctcctacggctacatcgcgccaggtaaccacccaaaataatttctccatattatttttagcctatttcttattactattctttttcaatgcgaaccactacagtactgtagtactaaatttaccgaaatgaatctgtttgaaaaatattgaattccaagacccaacaagtttatcctgatccatgtgttgaaagaacaaactttttttttctgatccatgtgttgaatgaacaaaccttttctgtttaaccatgacaaggaacaaactttatatctggaccatgacaaagaacaaacttttaatgtgcttaaaataaataatggttctaactataactaatataattgaaatgatctgatacgattatacgaagtgtcattgaaaaattgtaaactttacgtagaggcaataatagagggggcccctgcatggagatgcagccacgttccatccactggaactgcactagtactgtactgcagcttgtgctttcctctgagcacaatccttgttgccttgtgcacggtcaactggggagaggacaaatgttacctttgggccaaagtgtgaacttttttttttctgcagacagcaaacaaaagttacagctacagttcttgccgttgcatggctgtagcagtgattgtgattaatggtcagttcagttttctgctctgtttctttggattctacagaagcagatcttgcagccatatgtatggtcaatggcaggcaaggcaatttggctacctttggattaatggatagtctcctgcctttggagtactagcattcatattgtgtcgtcttgttgcctcgtgtgtggcacactggcactctcttggataattggaggagatactgttctactgtagctgtatcacgttcgtatcttggctgtatctccatggtagatctgctccttattgacttgtcagtccactcttaaatggtgttgttggtgaagtacgtagcttcaggataacctgtctttcaaacgattcgagtgtgatgcactaccctgaaaaatgaaaattctgtctagtggctgtggttacattcagttatgcaaatgtgcagctctaatggctgtagttacattcagttatgcgcgttgggaaaggatcggtacactaatatctttttgattgataatctaaaaatggtatgttaggtatcatctaactgattcatcaatcctatgtactatttgtgtttgcagagtacgcatacacgctgcgagtggacgagaagagcgacgtgtatagcttcggtgtggtgctattggagctcatcaccggacgccgccccgtgggcgggttcggtgacggcgtggacatcgtgcactgggtccgcaaggtgaccgccgagctgccggacaactccgacacggcggccgtcctcgccgtggccgaccgccgcctgacgccggagccggtggcgctgatggtgaacctgtacaaggtggccatggcgtgcgtggaggaggcgagcacggcccggcccaccatgcgcgaggtcgtccacatgctctccaacccaaactcggcccagcccaatagtggtgacctcctcgtcaccttctgaaccccaaacttaacggtattg

SEQ ID NO: 1989 - DNA, 728 bp, Oryza sativa
ggaaattgacttcatggcatctgctgtgggcacgtgtagattaagctggataaggagaagaagattctctccattcgggataggggtattggtatgaccaaggaagatctcattaagaaccttgggaccattgccaaatctggaacttcaggtattactcctttgtactgatttctcttaaagttatgtgtattctcttgctaaaactttagtattatctatttgtttgtaaagagaattttaccaagtgccatttaacttaaacttgagtgataccaattccttgaaatttttgcagcttttgtggaaaagatgcagactgggggtgacctcaatctcattgggcaattcggtgttggtttctattcagtatacttggttgctgactatgttgaagtgatcagcaagcacaatgacgacaaacagtaagacaccactgaaatacagcggctacatattgtgtttttggttcatcttcttttccttcactggcatgacaacctacttcatgttctgctgttgcactttttctctgataggcatgtctgggagtccaaagctgatggatcattcgctatctctgaggatacatggaatgaacccctgggccgtggaactgaaataagactgcacctccgagatgaagccaaggagtacgtggaagaagacaagctaaaggtattaccatcattactgtcaattggcttcatgctgtgacatcaaatatg

SEQ ID NO: 1990 - DNA, 2266 bp, Oryza sativa
caatccaaacttgtccgaatatgtccatttcaatatgtgtggagttgtaattcaatactactccagggagttggattacagttctagaagaaaaagaaaaggaaagcggtttcagaattgttttggacagcagaaaatcgccattgacagtgcagtgcagtgagatgagatccggatcacacgagttgcagggagttgtacgtagtaccgtgtcagttaagctggaccgctgacggattggtgctggtacgttgctggccgttggatgatccacaagctagacaagccacaacttttgtggcagggcgacagaaaggcttgccagtaccaagaagcacattcaattttaaaaactatttttccttttaaaaactgtagtatgcatctttataaaaagataactacagtagcatataaatttataaaaagctgtaatttttatttctcagataagttcatgcctaagttaccaacccaacccaacaaatacccaagtcgttgtaaaacaagcccacatgtcatctacacgtaagggataaaattttttgctattaatgcagttttgtgaaacacctagttaaatttgtactccatagcaaaagttagggttccattgaaacacgtgattataaaacacatagaaacagaaaaaagaacacgtaaatacgattgaattgctcgtgtaaagttcgtaggatggcattgcgaactcgcttgctaggggagagccaattcgcgcgcttttgaagacaacaatccattctttttaaacctgtatattttaagtaaaattagtgaaaaataagtcctcccacatttcattttaattcaaaaatgaactaaccaacaccatatattagtgaaggaggaagtatacttttaattcttttgatctggttattatggttgctcgatgaattggttgtctcgttccaactcgaaggaaaaaagaaaacagtttagagtgagttggtatttttttttctatgggttggatatgaaaatttggggtgtgtttaattcacgtcaaaattagaagtttggttgaaattagaacggtgtgacagaaaagttaaaagtttatatgtgtaagaaagttttgatgtgatataaaagttagaaattttttttaaaaagttggaaactaaaccaggtttcctacgatcgactcctgtagtcggtaatccccaggatcttcaatccttttgtttttcctcaaattaaaaaaaagaccctgatagttttgaccaaacaatttcggtttagctaaaaatttgctcaaaatcaaacgaaagtttaataaagtttgattaaaattgaaagcttatgtgtgtaggaaagttttgatgtgatgaaaaatttgaaagtctgaagaaaaagttggaaactagaccctatttagatgggactaaaacttttaagtccctataacatcggatgttggacactaattataaatattaaacgtagactattaataaaaaccatccataatcttagactaattcacgagacgaatctattgagcctaattaatccatagttagcctatgtgatgctacagtaaacattctctaattatagattaattaagcttaaaaaatttgtctcgcaaattatctttcattttatgtaattagttttgtaaatagtctatatttaacactatgaattagtgtctaaatacatagactgaagttaaatccctagatccaaacaccacctaaccaagggcgaacatgatctccgtgctagactaatactaagccaagtttagatccaaagtttttcttcaaactttcaacttttccatcacataaaaacttacctatatacataaactttcaaatttttcatcacattgttttaatttcaactaaacttttaattttggtatgaactatacacccctactagttcaaacgtactcctggtaaacagcagaaaggctagtagccgcccctggtggcagcagcccagcagcccgcgatcaatcaatggaggaagggaagaagggaaggctctgtgtgtgtgtgtgtctgccacacacgtctccggccatctcgtcccgtcccatcgtctccgcgcccggtctgtcagtctccgcctcgtcgtcgtcgtcctctggtatctgtacatgccgcattgaccacgccaacctaacgccgtcagtgactcccacagcttctgcttctgcttctgcttctgctccattccttgcagcctgcaggccgcgcgcccgccttccttttattcccgccaccac

SEQ ID NO: 1991 - DNA, 3740 bp, Oryza sativa
gtcggcccatttggttggagggagtttttagtagggattgggagtttagagggatggggctattaagtgtcttgtttggttgggagacataagaattttggtgagatggagatgaggaattgaggaaggaactcctccttttcaatagctgggtaggggcaggtaattgggaggaaattcctcctttactttgtctaagcaaatctcgaccatccgtttttattaatgatctaatctccaactaaactccttatcaatttccatcacctctaccaaacaagatattgggattaaaaatcaaattcccatcttaatctcatcatcaattccctcgtgtaaacaagccgagtgtgttagaggttagtgaaacagaaaataaagagtcagcgggttagtgagttagtgcaacagaacaacaaagggttagatgttaggggttagacgtccaaaagttagtcgttctcaggtcattcaatggcgcggcggccttcctgtcctcttgctcaactgaggcccagccggagccggctgtggcggagcaagcggagaggtggcaggcagcttgtgcgcgagatggaggagtggcaatggcagagctcgagttgggagaagggagaagaaatggagaggagccgagctgctgctgtctttggtagggtttatatagctttgctggctgcctgagcatgggaggcaatgtgagggtgggcagggagcagtgccgaaacgtcgacatcgccacagtaccaggtacgcatggcccattgtacttggctttgccacttttcggtgtgaacttggtgttgctcttctcagtgaacttggttctgtggtggcatgtatttagtggagggttttgtggattgggttcatggtgaatgtgttgctgctgttgtggagggacccctgtcatttggtagctgcaaaagtaggttcaattcactgtggtggcttgtggtcaattgatcgaacacgttctgtgcatgcaggtgttcggctgagggaataggacagcaatacatgcatgtttttttcggtgaactcggtttatcatcttagtgtggatttgtgtctcctgtgttgttggtgctttggggagggtcctgtgaattgggatcatgggtgcatgggatgttgtttgggagggaccctggtatttattagctactgttgtgagccggcaaaggtgggtgcaaagtgctgtagtgtcttgtgggcttatgtagagcacctcctgtgcatgtctgttggttgttttgggcagggcaggcaaagcagactttgggtggttgactgagcaagcgcacaggggtgggctgtcagtcggctgggggaggaataatggacttgtgtggtgaaatgggctgtgctagcagagggggagatggcccaagtgtaataggagcttttgtattttgtagggattcgaaaggaatggcgtctgtatttgagctggcacacatcagtgtatttgtaatgggactgtaatttgaacatttattttggctctgtactcagactgtatatatggaactgtacaattggactggacttggatcggtattagaaatagaatatgcacaaggattggattattgaactgcaatacgagatttggtttgcttggatgatacaccgcatcttcgaacagggaattagggatacgcccgataaacaattccatcggcagtcttaggatttcgtcgtgagcgctttgcacgaacgggcgacggaaacaaaacagtgatttttgggacgacgcatggcatacaaatctaatcgtcgcggtaggaatagaattgaatatatttgaattgacacacaataaataaatacgccgatcaattgtagacattcgaaggatttattgagttgaattaatagaacggtttgaaataaccggagggtaagaattgagaaagatatatcgtgctgcgacataagggaagattttcaggttaaatattctgtgatttggtagcacttaataaatcagaccgtgaagataagggaaagaaaggacgttggactgagggcgtccctttaggagatatgatttaatcgagatctttagcacacaacctaaatacacacaaatgcataataaatcccagcatgcaaaaaggttttaaaaagatttttgattattctgagtttttaattccgtatttcagaatcgaaattttcgggatgttacaaccttcttcgccagccgcgttttgggaagaaaagagaagaaagaggaggatagctgtcatgtgggctcccacgtattttttttgttatctttatttgctgagtaggatgtcaaatcaacgaaactggacatatatgttagagtatatggtagttagagtcatattaggatatgattgatttgtgtagactccttccatatctgtaattcttccttatctcctctccatgtactcttatatataccagccccctgaggctcaatacagtcaatccacgattcgcaatatcctctctccctatactatccaacatggtatcagagcttcggcttccacttcgtcgttctaccccgcgcatcatcggcttgatcacccgttcaaacggccggctacgacgacaccttgctgctaatcatcttcgactacgcgtctacgccatcaagcttcgggctgccgctgcgtcgcccccctcgggccgcagttccgctgcctgtggtccacacctccactggttgttgcagtgctgacaggcgccctccttagcatggctacatcaccggtggacttctcgccgctgcatcgacatggaactgcagttgtgttgtcttctcgaaccacaactttgccgctttcgtcgttttcatcgtcgttagcgcttcgacaccctcgtcgtccgcattggtcatcgtcagccactcggatcttctttgtctacttcgagcatcgccgccgcgtctccaagttgccaccgtcgccgctctaggccggtagtccagctacctctacatggctactgacgttgccgtccaggccgttggttccgctacttcgccttctttttcgtccatcatgattcatcgccagtgtcgccgtatcttcctcgactacactttgctcttctccgacaactacgtgctgctccggcaattctccctctacgtcgttctcgcgttgcgaccgtccagaggtcttctctgctagtctccttcaacattcggcttatgattcatggtggtcccctgcctcgcccacgcggtattggaaacactggcgtgcgcgttcgtcctgagttgtcccggggtctggcaaaccctgtgtgacgtctcgtccttcacggttcgactacattggcttttcggcgtcatcttcctcaacgattgccgtgattgtgtcaccgtcttcgtctccagtgcatcctcacgcaccttggtccatgacgcccctcccatgtgtccatgaccactctacggcgccctatgcgcgtcctgcggctcggctacctcgacatcagcttcctgacttcggctacaacgaccacggctactctacacacggcttcatcgactacggctcccttgcacccttcgctttggctacattgactacggcacacagggctatcatccgtattgagtactcttgccggtttcttctccagtccaagtgtccacgctgctcacgcttggactgtgggggatgttagagtcatattaggatatgattgatttgtgtagactcctatatctgtaatccttccttatc

SEQ ID NO: 1992 - DNA, 899 bp, Oryza sativa
ccaccaggagtactaccagatggcggcggcggcggcggtggcgtggccaaggagccggacagcccgcaactgagcatcatgagcggctgcagctccctcttctccatctccaccctgaaggacgacgacgacggcggcggcgtccgcctcgccggcgccgcgctgcccgccacgccggtgtcgctcgccgggatcgccggcggcgccagtacccccggcggcgacgaggtggacatggaggtgcggcagcagagcggcggcagcggcgacgaccggaggaccatccggatgatgaggaaccgggagtccgcgcttcgctccagggcgcgcaagagggtacgtacgtatatacaataccaaatacgtataattatacgtatcatactacagtatttatgtacgtatgtgtttataacgtacggtatgaattactactgatcatcaacaaatgttctcatatgtactctctccgatcaatattacttgtgctttccgacaaagcaattccgttctattaaacgcaggccaatttaattgtctgaaacggccggcatgtacttaattatgtccggagggagtaattaacatggaaatttctcttttcaaaaactgaatataattagaatttaattaaaactggatctttcacaaaaataaaatgctgctaataagtcgatcacttataaggtcattgttggaatgcgataatttaattattaggttttcaatagaagtttgtagcaggcgaaattatataatttgcacattgaattatcagtaaattgcagtcacgtcgttattcatcgttaagtttttgagctgagctgaactggttagtttacacaactgaatatatatgagcaaatttcattacatttcataaaggagttagtctatat

SEQ ID NO: 1993 - DNA, 615 bp, Oryza sativa
caaacgtttttttagaagggattactatgcgcgaggagtgctctgttttttcctttttaagaacagagtactgcgatacaggctgcgtgcagttggcatttgtgtctatcacaacctcacaagctgtccaccctttctcactgacagtaggccccacggtccccacacgcccatcccggtcacactttctgtctgcatgcgaccacggtccagccgacgcgcactccgcccgtcactgccaggtgggccccacccccagctcacctcatccgtcacttcacttcactcctctccccgaaccccgtggagtaatcaaaaccccagcaacaacccaaccatctcatcttaaatgcacgccaaaaatctcgaaattttacgggggttttaattaccaatcaaccgctaaaccccggagtagagtagagtgatacgcgagcggattcgatttacttcacgctcacgcttgcgggtttctcatcctcgctggggccacgtcctttccttgcccggttgattcttgcaagccctctcattcagcttgtgctggtagctaccaggtcggctttggcggtggcggggggccgcctctgaatccaaggcgatttggtgtctgac

SEQ ID NO: 1994 - DNA, 580 bp, Oryza sativa
tccattagtaaggacagctgatacacgaacctgcagtttcaaattccacatatcaagtaaatgaattaaacaagatacttctcacttaagcaacaccactctagctgctactcacaagtgcattcatagcaccagcctttttatggtgttggaatccaggacgtttctcacgagacacatagactaaacgaggaagctcattgccttcggtatcaaggcctccactatgaccaaggaaaacctgagcatgaccagacgtcaagagtaagaaaattgctggatcaataaccacaccacaatggcaatatctaagtgatatttacctgaatcattccaggatggtctctggtattgttaccaggccaaggtgtgccatcttgcataatccatccttcctcaggaactttctgtgccttggcgacgagagcattaacacgaactttaaattcttcatattccctctggattttggttttgcaacagacattaatgcgagattacaccaaaaaaaaaacaacaaaaaaggtcacacatataaaccaaatttaccttcatggcacgacgatctttaacaaaagaa

SEQ ID NO: 1995 - DNA, 588 bp, Oryza sativa
caccacacatccgttgtcactgcactattaagtgcatctctttatagctagatcatcaaggatcaagatttatctttgtgatgatgtgtttgaaggttgtatcggtgaaggatctggcagaggattcgccgttgccatggtacctgcctcttgattccagccagttctcactcaatggcttccgtctcacccgagtcggccgcttgatcactcacatgctggttcttaacattttactgatataccatgtactccaatctagaattgtagtattatttgtgtcgaactcagttataagttactactacattttaagaccgagcgagtactgaagtaaatgaattgttggtagagtgcaattgacgttcttaatttacctctaaaaatctttaggttaagacgctcgagtgcctccatgttgccccacaaggcagcctgagggtcttcagctttcttgagaccgtggcccaagggcttgtgaaaggcgccaagtaagttgatcggcctcgagcaaatctgaagcaagaaaattttgaatttgtgcccaaattatatcaatctcccaaacagttatgctgctgaatgaat

SEQ ID NO: 1996 - DNA, 593 bp, Oryza sativa
tgcctttaaggtctgagctacaaacttgctagatcaggaaggatctaatatacaacgagttcggtcgaaaggcttagttctagaagacgatttgtttggaacaacgaatgaacaaaaaaaggaaggagatacaggggtggtgaaaaaaggatagtaggagagccggtgatcctccctctctaaaatagccggtcaaatctgtctagttaaagaaagaaccagcaatgtaccaaacagtctccagcaaaaggcaaaaaaaaaagatcccgctctgtatttctatactgaaacactctcattgcaaagagccttcaatcctctagccctctgcaaaaagtttttccttgaattagcaaccatcaaactaaaatttggacaaggagctaaaaggaaaataacaacaaagctagggttacctttatagcgcacattctttctctaacatcaaacctctcatgagacaaaatagacagccatgctcctggacttaccatctacaacaagcccaacaatgaaacagaatatggaaggggtaaaaaaaagcgagcatgagcacataaaagaacaaaatttggcagtaatctttgggaaag

SEQ ID NO: 1997 - DNA, 565 bp, Oryza sativa
ctaagtagagcaattagcaaaccatgatccgaaaggagagctctgaatcgtagggggatcatcacgccttcaatggctggaccttgacctgatccagcacggggccgcacagcgagacgccgtcgctcaccttggtgtggtagtacgagctgtagaaggtcaccctggtgcgcacgccggcggcgacgaaccggaagctcgccggcttgaacccgccgtttccgacggactcgaacggcaccttctgcgtcacgttcccggcgaacgccttcaccagcatcgacccgtggcagccgttcttggcgtcgccgacgacgaacgataggttgtaggcgcggttcggcaccgtgcggatcacctgcgcgatggcgctctccctgccggcgacgagcttcacggcgtactggccccgcgggacggagaaatgccccgcgttgatgaagcggacgggctttgagcgactcgatgattcagccccggagcgggggacgtcgcgttcttttgctttggcggaaggaggacccccaccgtcgagttcttgaacacctgcggcccgatcttgaat

SEQ ID NO: 1998 - DNA, 655 bp, Oryza sativa
tatatatagtacctttatggagtcctagctcctaggatcaaccgatcaagcatgtcacttgtgagttgcgaccctatattaaaaatctgcttcaggagtttatgacattaaacaattgttcatacggagactgaaaatgatgccctgtgctgagagatcccctcataatttccccaaaacgtaaccatgtgtgaatagattttgagtaagcagggttgcagccacgagtgagtcttcccttgttattgtgtagccagaatgccgcaaaacttccatgcctaagcgaactgttgagagtacgtttcgatttctgactgtgttagcctggaagtgcttgtcccaaccttgtttctgagcatgaacgcccgcaagccaacatgttagttgaagcatcagggcgattagcagcatgatatcaaaacgctctgagctgctcgttcggctatggcgtaggcctagtccgtaggcaggacttttcaagtctcggaaggtttcttcaatctgcattcgcttcgaatagatattaacaagttgtttgggtgttcgaatttcaacaggtaagttagttgctagaatccatggctcctttgccgacgctgagtagattttaggtgacgggtggtgacaatgagtccgtgtcgagcgctgatttttt

SEQ ID NO: 1999 - DNA, 39238 bp, Oryza sativa
agggggagatgggccgagagggattcggcccatcgaacccgggggaggcaaactagacttttgcggagggatttgatttggaaggatttggattcggaaatgaacttgacgatagatcggggattgagatcttgagatggcacgaacactagacaacaagcaaagaaacaaatttcgcaattagggtttttaggagataattttcccgctaggcgccacgacggaacgggcgctacagaccaacccccctaacaagaatctcgaccccgagattcagcacctaagggagcagctccgggaactcggcgcggagaagatcttctcgctcccaggttgcctcatcttcagaatgattgctctattggactttgtagaacttgatggtcttctttcgagtctgacgttctgcctcttcaagaaccttggtcggtctttccttgtaagtcagattcttttccagctcgatattacccagagggacttgctcttctggaactcgaagacatttcttcaactgagacacgtgaaacacgttgtgcacatctgcgagaccttcaggtaactcaagctgataagccacttcgccacgtctggcggttatgaggtaggggccgatgtagcggggtgctaacttgccggacatcccaaacctcctcataccacggaggggtgatacccgcaggtatacatgatctcctttttcgaactcaaggtcacgcctccgattgtcagcgtaattcttctgacggttttgcgctgtctttaaacgttctcggattagcttaacttgttcttctgctgccttgagtatgtcaagaccgaataccagcgcttcgcccacctcattccagcacaagggagtacggcactttcttccgaacattgcctcgttcggcgacatctgtatgctagcctgataactgttgttgtatgagaactccgcatacggcaaacaacgatcccaggtgccttcgaaatccaaggcacacgcacgtagcatgtcttctaggatttggtttaccctttctgtctgaccatcagtctgcggatggtagcccgtacttaaatttagatcggttccgagggcttcatgcaactgcttccagaaccttgaggtgaactgagtgcctcgatctgacacgatcttcttgggacagccaaatctacatacgacatgggtcatgtagagttctgctagtttctttccatcaaaggtggttttcactggcacgaaatgagctgatttcgtgagtcggtccacgattacccaaatggagtcgtacccgctaggggttcttggcaaaccggtgatgaaatccatcccgatctcttcccatttccactcgggaatcggtaggggctgtagcagaccagctggcctctggtgctctgccttgactctttggcaaatgtcacacagggctacgtattctgcgacatctcgcttcattctagcccaccagaaatatgccttgatatcttggtacatcttcgtacttcttggatgaatggagtaggcggactcatgagcttcctttaggatgagatctcttaactccttcttggctggtacacagatgtgtggaccgcaccaaactgtgccttggtcgtctatggagaaattggtgtctttcttttcctgtattctttttattaactcttttatcccttcgtcatctttctgagcctcccggatttgcgattctagggtaggctgtactgtcaagctggcagggacacctgactgtaccacggtcagccttaacttctccaattctctgcacaggcgatcttggtcaggccgtatttgagctacattgcaataggccttgcgacttagcgcatcagcgaccacgttagctttaccgggatgataatgaattcccagatcgtaatccttgattagttccaaccatcttctctgcctcatgtttaactcggtctgagtgaagatgtatttaagacttttgtgatcggtgtatacttcacatctctttccgattaaatagtgcctccagattttaagagcatgaatcacggctgccaactcgagatcatgggtggggtaattgacttcatgaggcctgagctgtctggacgcataggccaccacctttcgttcttgcattaggacacatcctaagccttgtcttgatgcatcacagaagatctcaaaatctttttggatatctggcaaggtgagaactggggcagtggtcaaccttttcttcatttcttgaaaactgtcttcacaggctgcagaccattgaaatttcctttccttctttaatagctcggtcataggtctggctagcttagagaatccttcaatgaatcttcgataatatccagctaagccaaggaagctgcgaatctctgacacattcttgggcgggttccaagcaagtacagcttcaaccttgctgggatctacttcgacaccgttggaggagatcacgtgtccaagaaatgctactcggtctaaccagaattcgcatttcgagaatttagcgaatagttgatgatctctgagcttttccattatcagcctcaggtgttcagcatgttcttcctcattcttggagtatatcaggatgtcatcgatgaacaccacgacaaactggtccagctattccataaagattttgttcattaagttcatgaagaacgctggagcattagtgagtccgaaggacattactgtgaactcgtatagaccataacgcgttgagaaagcggtcttcggaatatcttcaaatctgattttcaattggtggtaacctgatcttaagtcaattttttagaaaactcttgctcctttaagttgatcaaataaatcgtcaatccgtggcaacgggtacttgttctttatagttacttcattcagggctctatagtcgattaccattctctcagagccatcctttttcttaaccagaagcactggggctccccaaggggatgagctaggtcgcacataacctttaccctccaattcttcgatttgtcttttaacttctgctaactcattagctgccattcggtagggtctttttgcaattggtgcagtgcctggcgccagttctatggcgaacacaatctctcggtctggtggcatacttgttaattcttctgggaatacgtcgggatattcacagactatgggcaccgactccaaggaggtgacttgtaaacaggttaggatagaccgacttgcggtaggggtgttagaggtaaagcggacttgctttcctccaggtccttgcaaggtgatggacttttcagcacaatctatctgtcctttgtgcttagccaaccaatccatccctagaatgatgtccaagctttgcgagtctaggactatcggtttggctaggaagtcaacttcctcaattctaaggttaactcccgggcatacttgagttgcccttatattcctcccaggggaatgtactatcattggtacacgtaaattttgggttttccaaccatttcttttcacaaaagcttgtgatatgaaagaatgggaagctcctgaatcaaacagaactattgcgggtacggagttgacagggaacatacctatcacaacgtctggagcatcctaagcggtctcagcttgaatgtggttcacccggcctcgaccaaagttgttggacgcacgagaaccttgtccacttgcctgagagctaggacgagactgagctgccgctggagtaggagttctggcagtgctgccattagcatgccctaagctggtgttggtaggattctgagggcactgtctggcatagtgacccatctggttgcaccggaaacactgaactgctgacggtccctgtggtgacttgaaagaggtaacactgtttggcgcagtattgccactaggggcacgctgctgtggctgaggtgccggacggttcatttgaggacgaggggcgtagcctggctggtggttagcctgagtgaccgactggtggtattgcatgggttgaccgtagcgagggcgaggtacgcctcgggaagaatttccctgatggttagacttgcgtttcttgtattcttcggtagcctcttttctggcatcctcaagtagaagcgccttgttgatcatatgttgaaaagtggggaaatcatgagcaagcaactggagtctcattccaactgcgattcctttcaagaatttcctgatcttcttcttgtctgtgtccacttcctcaggggcgtaccgagccaacttgttgaacatacttaggtactcattgacactgctgttgccttgcttaagtctgttgaattcttctttcttcatgtcaatagtgctttcaggcacatgagctgcacggaaagccgtagcaaactcatcccaagcaatgttagtgggttcagggtgtgcattgcagtaattctcccaccaatctgcagcaggtcctcttagctggtgagaggcgtagagcgtcttctcgaccggagtacactgcactaagttgagttttctatcaacatctttcagccaatcgtcagcctcaacgggctcgatggtctgagagaactctggcggacgtgacctcagaaaatctgtcagcttggatctattgttgctcatgtgagggtggccatttccatgcgcattatgctgaaaaccggctacggctgcggctaatccttgcaagatttgtgtctgaactgccattaagtgttgcatgttgttttccacatgaggtgggaaagggaggcgttcttctccagaattgtgactggcagtgcggtgagagcggtgagactgttccatctctgcattacgggaaactgtgcgatgcgagcggctgctgcggcggggttgctcaacttctgcgttgcgggaagcagtacggtgcgaacggttgctgtggtgagactgctcattagctgactcatgattttcttctggctcaactctaccatcttcaaaaccaaagcgggctggtgcacgagctgcacggcgggggcggctagccatctaaactcccagaagagggcggggtaatagtcagatagcacttaggagggcaaggagcaaagtaaatagcaactcagatagcacacactaggcataaactggatttttcaaatcatagaaacacctaatacaacgggtgtggacaagtcacagagctacgccgagcttgactgcgcgcgcaccacctaggagaaccagactaccaaacaacacccacaacaaacacacgcacgcactacctcgccacgactccaaaagagttggcggcggaacaaaagggcctaacacacggacggctgctgaagactgcctcctctactcctcgtcggcctggctgcctcctgtggtcggctcctcagtcgaagaaacgtcgatcggctgacgcgaagggaccggcggaacctgtcgagggctggcagcagcacgggccgctggcggtgggggagctgggtagtggaaacggaacacagtggaagaaccaacaacacgcttccgcgcagtgcggataaagcgtgggccacggcgggtggaagcaactggggtgtgtccgggggtgtaggaagggctaactgggtgtgggtagggggagtacactggtgagtacggcgcacgcgagctgggggagcgcgggccactggaaggcgtggaagctgccgaaaggcggagcccccaagacggtggctgtagtcatgggccaggcgacgaagcgcagtccaggagaggtcctggtactcgatctggagagtgggcctggccacggtgaagtggtgtggacgagggccagctccgtgtatacctccacgggggtaaaggtacacagagagctcacagtgagggggaacacggtccacggagtaccccgtgtactcgggacacgagaagccaaggaaacgggcgaggtcacgaagctaagcgacgtggtgaccctcaccaaaaccgtgggagctgaagctggcgctcactgccatctacaattttgaaaaagggagaaaggatcagtaaccatttttagaaacaaactattgaaaataaagaaaacaaaagaaaccttagcttttcgcaagtagtttggaacttagtatccttagggtcgtcctaggcgtcgggtttcgtcctagggccaagcttgtgctctgataccatctcttgtcacgccccgaactagtaccgatcggaactagcccgtgacgctccaaattaacctgttaaccgataccagtcccaggaaatagtgctggtatcacaggaagacagaatatcacagcaacagaggtctctttattatagagtagaggtacagtcatgttgggctgcggacagatcccgagctcacaactgcattacaaaagggaaacggaagccagggcttagaccaaacatcacaggcgcgacttgggaactaggccgaaaccctaaaactcaacgtagccggcttgctcctggaagaactcctcatcagccggatccgcttcatcttcttcagcaactgggggggaattatttatatagagcaagggtgagtacgggagtactcagcaagccaagggaattaagtgtttaatgcaggcttcaagggaaggctgttgtttttgcaattgattttatttgaactcttttctgaaaacaactaagtgagtgcttctcaaacgactcggatgagacagagcgtctcgtccggtcggagtatgtatcagtctttagaattgaaacaaggttggcacccggccaacagcttttcaaacggccacccaagaaggcggcccaagtgcgcgcgcgcgggaggaaaggagagagagggccggtggaccgggctcaccgtgcgcggtcccgggtgggacccgcttgtcagcggctcggctcaccgtgcggagggagcacgcggtgcggcgctagggtggggaagggacgcggtgcatgcgcgcggttcgcggtggacgcggatgcggcgggcccacgcgcagcctcacggctcgcggtggaacgcgcgcacggggagggactgaccggggtcggctcgacccggtctaggctgagctggcgccgacgtggcgcctacgtggctgccacgcgggccggcgggaggtagacgacgacgccggccggaacggacggcggtcgacagcggcgagcgacggagcaaaccatggcgatacaggcaaaagcgagtacaccgggtggttgcacgtgacgaggggagacgagccaacggctcggatttgccgggggttgctcgacggcggcggattgcggcggcggtaaccggcggcgggagaaggggaaaacggcgacgaggtcacggggggctaattcctggcggcgagagcatctatgcggctacgggaatccgatgctagcgtcggattgggcggagctacgccgtgcgaggccgacgacgagcgggtgctacggagcacgggcggcgacggcggcgagcacacggcgagcgacggcaacggtcgggacggcgccggctaactacggggaggctactcgagctactaccgaaagctaagggggggagatggagcgaggaggaagaacggagggaggcactaccgtgcgggacggggcgcagtgacgagaggccgacggcgcgggagtaatctctccggcctcaggccggggaagaggaaggagagggcgcgcccggagtccccttccgcgtcctcgaacgcaccggctctccgacacgcgcaacgacgaacggcgacggcgaacagagctcgggggcggcggcaatggcgcggaggcgatgggaggagaagagagggagggcgcccggggcttttaagggcggcaacgtcggtttgggaaccgactttgggcggtcaaggcgcgagctggcgctcggcgctcgcgtccaaatcggcggcagggcggagggaggaggatgacgctggcggtgacggaaaaaggggaaaagagggagagaaaagggggcttgcctccttgccgcttttggaaaaggaggaggggagcgggggcgtcgcggcagagggaggagggaggctctgcctccgtcccttggagactagcgcgggagtggcggggccgaggcggtgacgacggcgatgacggcggggcggtgtggagcggagtggcgacacgggcgacaggcgcgggcaggcgtggcagagggtgacggcggcggcgaccaggcggtcggccaccacggcacgcgcgcgcgggttgcaacgggaggcgcggcggtttgagtggcgcggctcgggcacgcgcgctggctgcggggccgagcggctgcgcggctgcaggcgcggcagggcagcggggccgggcggcgcagacggcgcaggcgcgacacgggcgacgaccacgcgggcgcgcgcgcgaacaacgacgcgcggggccgattccgcgggcggggagctcgccagggatggaggcggggagaaggagatcgagggaaagggagggcactcggcgcgggcggctcacgcgcacgcgcgcgggcagagcggaggtagagagggagagagcgggggcgcgtcggggaagagcgagagagtgagggagccgggagggagggggagatgggccgagagggattcggcccatcgaacccgggggaggcaaactagacttttgcggagggatttgatttggaaggatttggattcggaaatgaacttgacgatagatcggggattgagatattgagatggcacggacactagacaacaagcaaagaaacaaatttcgcaattagggtttttaggagataattttcccgctaggcgccacgacggaacaggcgctacaatagcttgagctctagaggaagcacagctagggtttcccaggagctcaagatctcttgtaagaactccactataattcctcgcacaggagtaggttgttacgcttcccagcggcccgaacctgtataatccctcatcttccacacatattcgcaagcgatctagtagccagaccctaagcgaagatacgctcttgatcatcgcgccttatcccccggccgaactcacaaagggggggtctcacgacctcccgctagagaggatcactcctcgacacccttgtttcatattataagtcgtttaatttttttactagtcaaactttgttagatttgaccaaatttataaacaaaatttagtaacacttaaaatattaaattagtttcattaaatctaacattgaatatattttgataatatgtatgatttgtgttgaaaatactgctatatttttctataaatttggtcaaagttaaagaagtttgacttgaaaaagtcaaatgatttataatatgaaatcgaggtagtaatatgtttaactacacatgtgttgcatgcaatgatttccataatatgtacaaacttgaaaaggactatttggagtgggaaggattgggccagttgttagtcgggatcagggtttcccaaaccgccggggacggggttaccgcgccccggcggtaagcacggttaccgcgcagttaccgcggtaaccgtgaaaaaccgttcaaaatttatcaaaaattcaaattattttttaaatttatttaaatttaaggaggttaccgcggtatttatattactgtatcccgcggtaagcctggtaaccgtggtaaccacgcggttaccggctgtaaggtgaaccctggctgggatatccttatctcatgaggaggatatgatcctatggcccctggaaaaaaacagaagctattctacaaaatctttgtatgatatgctctcttttcattgtgttagggaccttagagggatgaaaaaaaaaacacaaatattaggaaaatacctaatattaaataaatagaaagggtgagacttcgaacactggccggctagcccaccatcttgtggagctagctaaaagatcccttggcgtttctctaaccttagagggatggacatatggaaatcgccaatttcactgaaagtgaatcactttgtgtgtcttgcttgcttagatagaattcaaactaaaaagaactaggaaggctctgagagatgtgttgtatgtaatgaggtggaaactgttgatcacataatctttgcttatcctattaatctcaatttcaaattattgtcctagtttaccgaccgtttatgataatcgaattttacaaacgaacatattattcacttgtcagcatggacatagtcctcgaataggtgttttcgactaagttggcgagccagcgggaggcagtgaagcacagataaagcaaacatatataagtgctctcttatacagccatgtcatcctaccctgaatcatttttctcaaaaattttgttatctcagctttgtatctcctttaatagacaaattctcaattggtcagtaggggaacgaaagaatgcacggctagcttctttgataattcagtattcaacaagaaattctagaatcatatatattctttttttttcaattcgtgtttatcgagatttatatcatagcgcaatgtcaccagggtaaaccatgagatttaatttcttgaacacatcgatcatttattagcaactatggttggaaatttacaaatagacttcaataattgtgatctccttacgttaggctgctttttttgtttttctagtgttctattcttttagatttacactacgttcatgaaaactactatataataattggctgtaactcttttgagtaaagaccgagatattatattccattatcttaaaaaaaaattagcaactacgagaagagacacacaccaatatatatcacttgtcagcgaggacatagtcctcgaaatagaaggtcttctcgatgaagccggcgagccagcgggaggcggcgaagcacagcaccgccgcagccacgacggcggctctctgaacacccgacgtgaccaccgtccccttgccggcggcgaggaacccgacgacggcgaccgaagccacctgcagggcgacctccagagctctcatccacttcagtgcagcgctgcagctcgtgcactgcatgacatgcgaccagtacctgttcatatctattttagattcaagaaattttacggtccttaaaaagtatctccaggtacaagtacaaccctttagattaacactgaattctcctatggaaattctatatgttttaggtcgatcagtgtgactgtgtgaagatcagcagactagcttgttaatttacctctcgtagacctcaactctggtagaagctggtggcagctgattaaccattggggttaaccagccaacctgattgttacagtacttcttgaaccagtttctgaaggcgatgatcaagttgtcagatgatgtgggcacgtagcatgctttatgccagttatcaaggccaaacgcggcgtaattacgctcctgcagaagcatatatattgttcaggtcaagtaagatctgagataatcgattgcatccatgcaaccacatacatagctcgaatcattcagtttgagctgaaaagagaattaaccggtcacctcaatatgaaggacagacgagtctgaatccaggacttggttcgtcttaatatgcaaccaccaacgtggtatcatcttgtcgaaccagccatcaagattatacccgttcgcccagatgaccctgcatcttcccggagacaccgggatgcagaagaacactgtcgtgacctcaggctgcttcttgttgttggtgttgttgttgtcctgatcaacctgcagctagcacaaagtgtaatcttttcaacatgattctttgagcttgtaacagtggctgcaatatggcgaagtgatcagaggcagataccactggcttagcacgaaatggcgagcctatgagagtaaccggcgcgatgaacttgaagtagccccagttctcctctgggttggaatggaaccctgcgatgttgagctcctctatattcatcttgatcgggaggccaccttcctggtcaaattcaactgtggagaggagatcaaatgtttcagaatcagtaacgcagcttagcattgagaaattgagattaacacggcattggctcaattaacagatcgtgtcaacgcagatgatgaggaacatatctgcctatatcttcctccctggggacatgagggaattggcccctgtgcgcgtagggaacgtgagcagggtccatgaaattctccaccaacaactcgtatctgcattggttcgattcggatttcagaatccatggcacatacatacatacatacatacatacatacatacatacatacatacatacatacatacatacatacatatacacacacacacacacacacacacacacatacacacacatacatcgaggcatcgagctgcttgtgaatagcttgtaaataatttctgtacccgtataagaggtctctgacgccggagttgatgacggacgacgggtcgtcgagctcccggatgtacggcggccgcttcctctgcaggatctccttgtactccggctccgatctcgggtagaaccacaggatgttgttctgcaccacgctcgggtacgacgccacgcacgccttgctattcttgtgcacctgccattagttgatccaagaactcggttaattaatcttgagaaaatgttgatgtttttttaaaaaaatttgttttacaggagggcctagggcgggggcctgggggatgaactggcaggagccgtggccatcgaagcaccagccatggtaggcgcactggaggcagcccttgccgtcgacgcgtccctcggagagcggcgcgaggcggtgcgggcacgcgtcgtccaccacgcgccactcgccgccgccgccgtcgaaccacacgacgacgctgatgcccatcaccatcttcccgtgcggcttgcgcttgtcgaggtcgcgcaccggagccaccgggtaccactggtccagccagtcgaaccgctcctcccctgccgccggcgtctccttctcatccacggctcgtgggagcggcgcctcggccgccactgccgacaccggcattgacagccgccgccgccgcgcgtcggtggggctgatccactgccggcgccatggtggtattcttggtgtgctcgggttggttacagtgtcgcggaagggaagcgaaaggcgggtgagcgagagcaggtggagggagacaggagccatggatgattcggagtgtggagtgtttagttaatacacgtgagtaggaaaacagatccctgactctgtgtctgtgcagtgtgcagtcgtgccactgacatgtaggccccatctaagatccatatatcagtgatacaactatacactgtataatttcaggggagtctcatccacggagtagtgactaagcaagacatagaccggaaacataaacgaatgcactgtatattttttcgggaaacggaaatggggacctacagcccatattgctctacacctgctacaatggttaacactggcgtagggtctatatattttttttataatactatttctgaagtagacaaacaacttttgaaagcgtgctaaacatcccaccgtagcaaattttttaaaagttgtgatagcaaaaagcttttcttactaaattcttactaacgctgataagtcatgttatgaatgcatctatattttttataatttctatatatctaaatcaaacggttgagataattgttagtacaaatttagtaagaaaaaattataacagtgctctttaagatactagcgtactactccttttcaaaatagttatctttttattcaaaatttattctaaaatatttgttactacttaatccatttatcacctctcattcaaatttccctctattttacccttaactgccactctaatcccaatcatgtatcatttaatgaaggatagtatgtcttttatttaaataaaaaaattaccaagaataacaagtatttcagatggagggctagttagttctcttaaaataattgtagattttaagccgtgtttgatgtctaactcggaatctggctgaggcaggagctgttgcctcaaccacaatgttattgtaccttacgtaacgtgcttttctttcgtttttagtaaaaaccggccagtgtttcttccgctaacccaagaaaaaaagttaatttaattataattttcatgtcattgagtgcattaaatttacgtatttttttactcatataatggctatgtgcatacgtgtccttaaatttcaagactattaccctataaggcagtagtaaggaaaacaaaaacaaaacactaccaccacacacactcacaacaactacacacgaccaagaaaagagctaacaccacatcggtcacagctagacccaacaaaggagctatagctaaatcgcccaaaatcaatccctaaaaaatgagtaccaagccagcaaggtgacaacggacgaaaaggtagtagagggagatagcgagagagaagaaatatccctttccctcgctcgaacccgtcgactcgttgccacttaccagattcgcacaaactgtctgagcacggttttggcaaaagagagtctcctagacgacatctccatggagaaaagcgatgaagagcaccaccgctatccatcgaggtctctaggagatccaaggcaaggttctcacccggcaaccccactaaggagggagagggatgtctcaacaatgccccaaagaggataaacgacgcccaaagcgtcgtagttgtcagcctcgtaaaactgggctaggcttacacctgttgcctatccctgttgacctgcaattgtagttccattgctccaccaccaaccacccaacattgttttcaattatgatctatctatcctgccaagttctacgcgagaacaacaatagcagcctatcctctatcttaaaatgttgcaatctagaatgagatttgacacatcctaaaacaacgaatctggacaaaattctatccagattcgttgtcctaggatggattaaataaaatctcattctaaattacaatatttgggatggaggtattaatatccaacatgtttgtacgattatattgacacgtactatatgcacacattttattggatttcaatgacacgatatataatccaaatttacatataattatgaattgacccatgtgacatttctctaggattattgagattgtgtcctcaccttacttgacgtgtaacattggatctatttcgttttatttccatatctcaaactcttttattgccaagtattctaactctacaaattcataattttgaagctgtgattgcatccatttataacataatgtttcaactaattgtttcgttctaatatttgaggaaatataaaattttaagaacattataatctaagttttaaatccaggaccttaggagctaaaagtgggggcattcaatgttatgacatccttaaccgtgaataacatacaatttaccattctaacccatattcaataatttaaatggtcccactcggtgacggagccaaaatggtttttaagctcagacaaactttaatataaattgtatttgctataaaagttttatcattaatttactcattaatattaaaatttaatggagttttggtcggtgagtcctggcagccgtccgagctaaccggacgatgtctccgccactagtcccactgtcccacaaaactaatcagatcgctgccacgcgtcggtgctgatctaccaccgactccatggcccatggcactagtctgattgaatgtgctcgatcggcgtggtgtcattgtgcaatttgtgccctattttttgtgcatggtggagtaacagtcaccgccagaaaccttcaaaagcgtgtacagaagcaccctgggtactgtacccaccccaccacatcgtgagcttttcaaaagttgtgatagccgacttatccttgcgaacttccaaaacagatacatagttggtaaattttaattgtattttttatgccatttagttcattgtttatataattttgcgttgatgacttattttgatgaccatccgaatatgagcaattttaccattcaacatttagtacttcgaggtaccaaattttacattagatagtactttgagaactaaaaaattgtggtacctcgaggtaccaaatgttgaatgataaaattgctcatcggaatatatataatttaatgaactgacacttggatatcataatatatcatttttatacgtcactagcaaaaatgtttatgtgttaaaacaggtgaagataattttcacgattgataaatttttttgtcaaacaatagcaaaacaaatttagaaatcatatataacattgaatccggttccgctcccttcatgcatcatcacacgaagaatagcttatatacacatttccaatagcctcacaaattgatcggatggttattccataagttgacacatgtggattttattatacctcatggtccaaagattaaaattttgagtattcaattagtaaaagttttttcccgtaaaatttttttactgtagatggaaggcatttgcaaagtaccaaacttaatgcatacaccttaacaatgataaattcaataggaaaataattgtgaggagagaaatttggaagagaaaaaagagaaaagaaggagatggagagaatcatgattattgagggaaaagaaaaggagaaaaagaaaatgaaaaaagagagaaaaaaaaaagaagccaatcgaggaagggtgtacgcagcgccgtctagtggaggcgtgcgggatggtgtgggccatttgggttgggctaggagggagagagaatgaactgggatatgggtgcataataattattctagactcacgtcaaattggatacgtgtgacatataactaactcatcaaacacagacgacgtatcaaagcgccgaagaaaatattttcaatttttgtaatattaaagatagacatagagataaatattgtactctttgaccgtgtcatatggagcctttttcatattaactagctgggtggcccgcgcaattgcgcggctagcaccgatataaaattatctattttttaatatagttttacttagaattttgttaaatagatatctcgttgtcttaagactttgaaaaaccaaaccttatcatccttgtgtttctaattttatattttttaaaagttatgtcagttgctactcctaaatattttgtcacccctcgtttatttgcttcctcgatctaccactacttctatttgttctcactaaaacctctaaaaattagaccttatagtttttagagtttattgtctcgtttgggttttgtttttataattttcagaagtctcgtcaaatgttgccaccatactactctacggtcaatccactgcctcttctctttatttttattgggattttaaaaatcaaacgtaattatcatttaggttctttttttactttctagaagttccaccaaactgtcagcgactttaccactgtactcatgtacagctcacccgctgccccctctttattgtctttgagattttaaaattcgaacatgattatcattagggttttttttttttactttttagaagtcccgccaaccgttgtgaccatgctgcttaatgacccgtccatcgtccctccttttaatcatcattgggattctatttgggggttttgtttatagtttttagatattccatcaaccgccaccactctaatcctttacattcatgttgcttctcctatatttgttgtcatttgtcatctttttataatttttagaagtcatgtcaaaccctatcaccatacttctcttcggcctgtccactacctcttctttttattgtcattaggattttaaaaatcgaacataattattattttggttcatattttactttctataagtcctgccaaccgccatgaccgggctgcttaacggcccatccgtcgtccctccttttaatcgtcattgggattctatttaaggttttgttaatagtttttagatgtcctatcaaccgtcaccattctacttctttataaacctgttgcttctccccctctttattattatttgtcatcatttgtgttctagatggagttttttttagaagtccatatttttcattctgatatttttatttataaattatatttctacttgaactcttataattatttttatatttacagaatttatttttttgttatttcaaattttagttaatctcgtcatatgttctaaatggtctcttatttcaatagtttttactttttatgacgaatttaagttatttataaattgtattcctagttgaactattatttttatttttctatttttggaatttattttaatttttatttagaattttagttaatatcgtattatgtcttatatgaattatttttttatgttttttaattttcaattttatagttgtttcatcctactcaaactatcttttttatttatctaatttcagattttattttatttttattttaaattttagttaatatcgtattgaattcttatatggactcttcttttaatatttcttatttttaattctgtattcctacatggactcttctttttaagattttattttatttttattctgaattttaattaatctcgtattggattcttatacggacttttctttcaatattgcttatttgtaattccgaatttcagctatttttaaattgtatttctacttggactcttcttttctttttctccgattaatgtgggaatttctagcccccgcagcaaacgtggtgccttcttttcgagctgttttaataatataatataatagatagatagatagatagatagatagatagatagatagatagatagatagatagatagatagatagatacttgtttttcttttgtaagctagcatatatagggatcgaactccactcccagattttcttagacactgtcacttgtaagcatggacgtagtcctggaagtagaagctcttctcaatgaagctcgcgagccagcgggaggcggcgaagcacagcacggcggtagacacggcggcggctcgccggacaaccgacggtgctagactccccttggcgacggcgaggaatccgacgatggcgaccgacgccacctgcagggcgacctccagcgccttcatcttcttcagtgcagcgctgcagctcgtgcactgcatgacatgcgacctgtacctgttgatggcaccagagaattaattgatcagcatcacagcagcccacaaattctgaatgaaaattttcgatgaagctgatcttgtaacgtgtttcgggtcagtgtgaagatcaacttatcacctctccaagacctgatctttggtaggagttggtggcagctgattagccattggggttgcccagccgatctgatgcttacagtactttctgaaccagtttctgaaggtgatgaccatgttgtcagatgatgtgggcacataacaagctttgtgccagttatcaaggccaaccgtggcgaagttgcgctcctagagaatgaaaatcttcaggtcaaaacatatatatgggcatagtaagtcagcaggcataatagctcacatcgccttctgtgtgtcttagaatagaaaccggatatgtaatccatttccgttatctaaaaatgtactcttttaaaaaaagagaaattttatagttcttaagaagatatcatgaggtaccactttttctattataaatttggtacctcatagtaactaggtaccaagagataccaaattttatactaaatttttttacatcatggtaccttcttatgaaccgtaaaattgctcttaaaaaaatcttgtgatgaattgtgaatctgccaccaccctcaccattaacttcctgatttttgaagttcaaaaaaaaaagagtgtgggaccaaatggtctacctattagctgaaagatacatgaatagaaaaatagataagatatgcagaatgagatggaaaaacggattgatgataatgttatttttttttaaaaaaaagtaaaaaatctgtcacaatgcatggacaatatgctagttttatcatgaatcattcagcttgagctaaacaaataggtcacctcaatatggaggaggtaggaatctgaatccaagacgatgttcgtcacaatgtggtacaaccaccgtggtattatattgtcgagccacgcatcaacattccgcgggaacgcccatatcaacctgcttcttcccggagccaccgggacgcacaagaacaccgtcatcgcctcaggttgcttcttcttctttttctccttgccctgatcaatctacacaaaatctaaccatttaatacgattatttgatcttcaagccttgaactagggacagatgtgccatgggggtggtgagggctcaagcccccactacccgtattgatactttaggagcctccactaaatccccttaattttacatcctgatactttttcaatgatgataaaattacgaacatctttcccatccttgaggaggtaccatgaggtaccaatataatctaaccgttgatttagaaggggtatgatggggctaaataaatttagggtggcgctaatccctcaccctcttgatggcgttttgcttgcttgctcgtggtggctcaaagggacccaaccatgtccgccgctggcggcggcaagagctgcatgggaggaggcgaggaggcgattgccgggctcctcgacagcggcagcggcgtctggcgagtacacgctcgtgacgacgagggcgacaagatactcgtcggcgacgtgccatgaatgaatgaatctctcgtcttctccaaatctttgccacatctccgtgccggcgtcgcatcgagtccgctgctgccgccgtcgcgtcgcatcgagtccgccgcggccgccgtcacgtcgcatcgagtccgccgcggccgccgtcacgtcgcatcgagtccgccactgccgccgccacgtcgcatcgagtccgccatcgagtccgccgtggccgccgtcgcgtcgcgtcgcatcgagtccgcagcggcagccatcgcgtcgagcttccgacgaatcgccgccgtaaccatcgtcgagctcccgatgaatggccgctgcaaccatcgccggccttaccctcttcccctctcttccctttgccgcatctccgtgccgacgtcgcatcaagttcgccgcggccaccgtcacatcgagcttccgacgaatcaccgccgcaaccatcgccgtggccgccgtcgccgatgaatcgtcgccgcaaccatcatcaagctcccgacgttgcagctatcctggtcctcccgccacccatcgccgatctgggccgccgccgggtttccgatctagggttcgggacctatatgcccctgctcccgccgccatctctcgccgccggttagttcaacgctgctcctgccctgtgagatgcagagacggaggaggaagagatgccgcgtgcgtgcgtgacgcggaataaagacgaaagtacaaaactgccctcccacccacggtaccgtttcaatgggtaggtgcggtacctcatggtaccgacgatttttgaccgtaggatgttgccagatcaacggtcacgatttggtactgcacaaccttaaagacagtaaaaaatctctaaaattacccaaaacttcatctagtttatttagcctcctctagtatttcttctttgctccgtaatggcaaagtaagagggtgctagggggcagatacctgtggttctttggtgcgaaagggcttgccatagagcgtgcagggcgcatcaaacttcatgtagcatacgtcatcctcctgtaccgacaggaagccgtcgatctttgcctgctccgtcctaatcttgaccgggtagcctccttcctgatcggactcaactgtggagaggagatgaacagttgaacactatcagtggtaggtgcagccggaacattacaaaatggcactagctcagtagcatgttcatgcgtgcagtagactgaagaattaaaactgatcatgtcatgatagatgatgaacatatctgcctggatcttctttgttctgtatgggcatcagccccttgtgcgcgtatgggacatgagcagggtccataagattctccaccaacacgtcgtacctacattacaatggagctagctaagcaaggtaaaatatgtggtggaaatgcagtggaaacctgaaagtaatagttggttcgaaaaataaacgtatgagatttgtccacgtcatcacggataaaaattttactcgcagattcactcatgagttaaaatttaactcctagtaaaattttaagattttaactcatgtagcacgttttaacttagacgtcgaattttaactcatggtgacatagatgaattccagatgtccatttttcggtccaacggtagttttcaaattttcactatatataggctttgcaactacatattttcccctaagcgaatgatcgagctgccatgctaatgggggagcaagaaattaagatttaggagaaatgcttggagatttctgtacccgtagaagaggtccctgacgccgaagactgtgttgaaggacgggtcatcgaggtctgggaagtacggcggccgcttcctctgcaggatctccttgtactccggctccgacctcgggtagaaccacaggatgttgttctgcaccacgctcgggtacgacgccacgcacgccttgctgttcttgtgcacctgccattaattgatccaagaactcggttaatcttcagaaaatgttgctgtttttttaaattttgttttgatttgttttacaggagggccgagggcgggggcctgggggatgaactggcaggagccgtggccatcgaagcaccagccatggtaggcgcactggaggcggcccttgccgtcgacgcgcccctccgacagcggcgcgaggcggtgcgggcacgcgtcgtccaccacgcgccactcgccgccgccgccgccgtcgaaccacgcgacgacgcggaggcccatcaccatcttcccgtgcggcttgcgcgggtcgaggtcgcacaccggagccacgggataccactggtccagccactcgaaccgcccctcctcgccgccgcccacggccggggcggcctcctcctcctcctcggcgcgcgcgtgtggcggcggcgtctcggccgccacggccgacgccggcattgatagccgtcgccgccgctcgccgctggtgtgtttccactgttggcgccatggaggaggtagcctgaccgtgctcagcttgacgccggcgtcgcggagcaggagaggagggcgagcgcgggagagcaggggaagggagaccggagccatggcgcttccgagggggagcttaagcgcgggacatcttttttaaagtggttacgcagaccatggccgaatgaaacgtgctacagtgggtaatattgtttcgtagggtccataagaggaatcatgctatcttttatttctgtatgtatacctattttttagctatccatgtgttgcgtgcaaatgatttctataataactagattacaaacttaaaatagtacaattctttttggaaaacgcaaacatattttagattgtgttggcaaactgagttgggaactaatagataccttccgcatgcaaaacatagtgactcattagcgtatgattaataaaatattagctatttttctaggacaacttgtcaacgaacaaaacgatctctttggacctgcactagagtaaagcaaaacgatctctttggaccttcattatttatatatcatccaaatggttatgaacaactagatagattaatatggaataaatcatttttcacaacacatgcaggttcaaatttaacttctacaagttgcaacgaaaaatacaaatttaaacgtagacatagtttaatttgtctgtttttgcaactcgtagagttgatttttaacttgcatatgcgtccagtgatatatcatatattaatctatcttgttatttttctttattttttccataaccaattagatgacatagactagctaaaaaaaatgtcgagtgttttttgaggggaaaactttcaaatctaactatagtatataatttcactagaactatactataataataataacttatatatatgtattaaaataatatatataactttatatctaatttatatagagataacaatgtagttataatgtagttacactgtagttacaatgtaattataatgtaattatagtgtaactacgatgtaactagcatgtaattggaatataacttagatgtaacttgaacaaatctaccataaacatgcgatgatgggactagcttgtaaaaaaagggtttagatccaatagtaaaatatctcagcacaaatcttagagcggaattgacggccaaaatttttttttgacagtcatctagcagttccgtataaataacggggagagacttttcgaaaacgagactacgctcagtcgttttcattctaggcctcccctaagcccactcaacatccagcgtcttcgtttctccgacacgtgtgctgccgaagacacaaaggcgatttagatttttttttataagaaaacatacatcagcaatgaaaaggaagagtgcataataacaaactggtcagactaaattagagttcaatcaaaagaagatcgaataaaatcaaacgtcagactaaattagagttcaatcaagagaagatcgaataaaaccaaacgtttgcaggtaagttctctcaatcaaaagcatcacccatttcacatatctatgttaaatcatgaaagaaaccaaagcatcgggtcaacaaaaacggttctaaatttttagttcagtggttatctgcaactttcatgtcttattttacttccaataatgcatcgaaatgtgaaaagaaaaaacaattttagtgggaacactgatacagacgctccattccccatgcaaacaaatatagagttttacatttttttttagataatgggcagcgtccggcctctacatcataagatcataaggtgaatacacacggccagatttagagttttacatatgtggttttttttttctttttcgttggacgccgatcgatcgaccaaatttattttccacagcattaaaactcacagagtttactgggcacatcgatcacttgtaagcatggacatagtcctggaagtagaagcttttctcgatgaagttggcgagccagcgggaggcagcgaagcacagcgcggccgcagccacgacggcggctctctgaaccgccgacgtgaccaccgtcgtccccttgccggcggcgaggaacccgacgacggcgaccgacgccacctgcagtgcgacctccatcgccctcatccacttcagtgcagcgctgcagctggtgcactgcatgacatgtgaccagtacctgttgatggcatcgcaagaatccaattttgatggtcactgaattctcttgtgttaattttgtgtttcagatcagtgtaaagatcactagatcagcagatttctatactacctctccatgagctgatctttggtaggagttgttggcagctgattaaccattggagttgcccagccaacctgatgcttgcagtactttctgaaccagtttctgaaggtgatgatcatgttgtcagataaagtgggaacatagcaagctttctgccatttatcaacgccaaccgccgcgaaattgcgctcctggagaaggattaattcgtcaggtcaagactgaacatatcacatatgggcatataatcaaggcagtttgatctgaagaaatgggtcacctcgatatggaggaggtacaaatccgaatccaaaacggtgttcgtcaccatgtggtgaagccaccgtggtatgaacttgtcaggccaggcgctgacgctctgtggaaacacccatatcaccctgctccttccaggagccacagggatgcacaagaacaccagcatcccctgaggctgctgctgctgcttctcctgatcaaaatctgaactttttagacggtttttttagcctgaataatgcaacggatcgagagggtggctgatgctgatacgtgccagtgtctcgaggggcaactctgaccggttgatcgtgcacggcgcgatgaacctgaagtggccccaattctccccctggattgacaggaacccgtcgatgttggcctcctctatcttcatcttgaccgggccgccgcgttcctgatcaaactcaactgtggagaggagatgaatgttctgaatcagtgacgacgcatatgagcattggagaatggcactagatgactaaactgaagaaaatttgggtagaaaattgattgatcatgtgatgagatagaacatatctgcctggatcttccttgtcttggaactgagggaagagccccttgtgtgcgtaggggacgtgagcagggtccatgaggttctccaccaacatgtcgtacctgcattgcaatggagccacggcatagtatatcaagctgcatgcctatgtgtccgtttcggagaagaatggcttgagcatttctgtacccgtaggggaagtccctgacgccgaagacggtgttgaaggacggatcatcgagatctgggaagtatggcggccgcttcctctgcagcacgtcgcggtactctggctccgttctcgggtagaaccacaggatgttgttctgtaccacgctcgggtacgacgccacgcacgccttgctgttcttgtgcacctgccattcatccaacaactcgataatcctgagaaattttgctttgagatcgacgcgggaatgtagattagatcgacgagagtagtggggctctgccttcaccctcccaatataggagcagtgtttagcatccgttatctattttttttctctcttttttttccctttcccttagcaatgggtctttcggggcggttgcgtgtaactaaaactctgcttcttctaatatattgacatgtaattctttttatgtgttcgtgaaaacaaagtttatcgttaagagaatgtagcaaaggagagtacgggagggccaagggcaggagcttgggggatgaactggcaggagccatgtccatcgaagcaccagccatggtaggcgcactggaggcggcccttgccgtcgacgcgtccctccgacagcggcgcgaggcggtgcgggcacgcgtcgtccaccacgcgccactcgccgccgccgtcgaaccacgcgacgacgcggaggcccagcaccatcttcccgtgcggcttgcgcgggtcgaggtcgcacaccggagccacgggataccactggtccagccagtcaaaccgctcctcccctgccgccggcgcccgcacctcctcggccaccggcggcgtctcggtctcggtctcggccgccgatacggccgagaccgacgtcggcagccgcagcgccacgccacggccgatccacggccgacgcggtggcgccgctaggctagctattctctgactggcggcgccatcgacacggaggggaagcgaagcaggccgcgcgccggagcggaggaggagggagaggggagccatggctttctttcacgttggcaacacagtgtgcgcgtgtgtgccagtgtgcatggctgtttggactttggatgtggcgcgcgatgttaaatatttgaagctccaggtggttcttgtagctgtagcctgtaggttgaggtggatctcgcaacaaattgtacagtctacagtaccatgtatagtaagaatctgcctgcccatccacatcatcatccaactatcctatccgtcggatgtcgggttgtatgtggcatttttttttcttggaccatatgatgcttttcttcacgtgctagctagtaggagtgaaaatgtaggaacagggtttacactttcctaaataaccgaaaattagtgaatttcggtactttcgaaactttttgtatgaaattatttaaaaatctaacaatttttttactgaatttgaattaattttgcaagttaaaaaaggtaaaattcaaaaaaattggctaggatagttgcttgccggagggggtccgaaattttaatcccttaatttgtataggaaaacaatctcaccgtgaccatacttttttctcacaagggtaaaataaaaggcaaaggtgatatcgaaactatagtgaacgaaactattcgagggggaagcacatcgatattgatcagaaactgacacttcatgagcaaagagataataagggccctttctccttattactttcatgtattaataagaagagaagaggtataacaatcaaggaagatcgttgtgttgtatgttgtcaaactttggaagatggcaggcatctttctttgaagggtagaggaataatagtgtgctactgtgttgggaatttgcaaatggaggatattggatcaaatcacctctgacctctgttaacaataaaataatagatattctagaagctgacaaacaaacaacagttaattactccctccaatctttagtgtaaaatgatattgattttaggatattacgtatgactatccatcttatttaaaattttagtgtaaatatgaaaaagtcccttctaaaaaaatatgaaaaagtataaatcatgttaaagtatttcagatgataaaacaagttacaacaaataatatttttaattagataaatgatcaaacggcttgtttaaaagttaatgacatcataccatgagacacggtattgtatttatggttgtaatgtgataagaggaacaggatatgtgagttcagagagagaaagaaagacggctacattgtcccaatgctatgtacaaactattttaaactctcgaggggacgtcccctcgttgtttacatgtcactaaaatggttatgaaaaaaactaaaaaaagttctacaacatagattaatatgcgatacatcaatccacaaatatgtaaggtaaaatttaacttttacactgattgtgaacatgtgttaactagttgtagtttgtttttttttttttgcaaagtgtagaagttcaatttaaacttgtatgtttgtgaaatgatatgccatatgataatacatgttttcaattttttattttttctataaccatttaaattacatgcaaacaacgagtgtacgtcctctcgaaagtttaaaatccactcctacacttaaaaaggcagtcctagccaacagtcaaaatggtcgctgcaggagggcaccagcaccaacctgaaggcaaatgtcatcataggataggaaggatatctagttacctctaacctctggttgttggagagtcatataactcgaaatggagctggtgaaccgacgaatatttggtagtgtagcactgtagcaagtcaatgttcactgccaaattaggacgggttattttactgtctccggtttttttcccgattccgcaagaactcccttgtccccctatcttgctatggaacctttgagaggtgatcatgtatcttttatatccttcttaatgaaattggcagagctcctatccttccccctcaaaaaaaaatatacgtatatgtgatatggaatagagctcctgtccttccccctcaaaaaaaatatacgcatacgtgatatggaattctcagggccctttctaaattgattagccgaacgttaaaaaaaagtaattatcatgtgattaatcggatatctatctatctatctattatatactaaaagttcattaaacatcttataaacactcctaagccgccaagtggcgctctaataaattagataaattcttagaaattctaagaaaaaagcaaaacatctagcccttggatttcacttaaaccggtggacccattattttacaccgtaagattagatttgtgagaaaaaaaagttaattcatctgtgatcctccttgcctgctattcgctttggatctataaaaacgtaacacactccacgattcttacacgtgatggggcatcagttaatcacaaaccaacgcactcctccaggtagcagggttctgcacgcaccatgaaacgttgactaggtacgtcaatctctttcaccggcgatcggcctgcccagctgccctagatgatcggctacaagggcagccataaccatgagtccgttgatgtcgaccagactctcgcgtcccccaacctctaccactccggcaatattttatcaattaatatttgatccaaactgaaatttgcaaactattgttgctgtttttttaaaagaaaatttccgttccaacttccaagttttttcatgtttctgatatgaaacgacatcatgaacttccaaattgtttctttccatgttaatgatatgaaacgatcgacatcgtggtcattcagtaacctaacaaatttgcactactgtatataagtaataaattgtgacactttcttattattactaattttgaagtttgcatctatttaagtggcaccaaatcataataacttactaatggttaattttaaaataagttctcaagttgataaaatattactgttgagagttacagatgagcacaattttatttttatatgttgtacttcccaaacgataaaatcatgaaaaattaaagttgtaactccaagtagagcacataccttttatgaattattttatcattagaaaaaaaatctaaaaattataactccatgcaaagatgactctagatgcattaactgttcaagtcataactctacatgtataacttgatatttactactcccaccatccttcctccatgccagtttgatctcatccaagttttttatatctccctaaaataattaacatataacaaatgacttttcgtttatttgtgtaaagagtaaataaatgggcatcgttgaataagctcatgcatgcaactaaccaaaattactttctattggtgtaaccctaaaaaaaattctcttggtgtaaactccacgaaatatttacagcgtgatgcaatcaacaccttgattgatgaaaataattttagaaccatggaggttttgttgtttttggtctcagcatcctttgcttaggtgatgatcaaattggaatagagggagtaatttctaagtcagaaatattctgtcttatttgtaagtgacaaattgcatcaatgtaaactgggctagcttgatgccaaataaaacacatgtgttagtagaaaataaacaaatttaataaaaaaaatagttagctcctaaacatttttttaaaaaaaaaccttatttttaattcacatttagtttattagatatgttttctaaatagactaagtcaacactatcttagatgatgaagaaaactatagggatgaattaaatattatacggtataaatctatcaaatagattaaacaattattgaatgcgcgggctagcttccttgttaattattaaaaacttaaaaaatagatttatttgatttttttaagcaacatgtatatagaaaagtttttgcatgaaacatataaaaacatgctaacaaaaatcaaataattagccaagctgaaattaacgtagtttagaacgcgcccgaaatttgttttctccatccatttgtttagctgcatcctatgaaatcgtcagctaactcttaagatgatcagttgtttatatacagatgctatcgatatcaagcatacttggttgtgttttctatatacatttttaagctgctaaattagaagctaaggaattcccagcaacaaagaactctctgatttcctggacgcatcgacgatcacttgtaagcatggacgtagtcctggaaatagaagttcttctcgatgaagttggcgagccagcgggaggcggcgaagcacagcacggccgcagccacgacggcggatctctgcacaaccgacgtgaccaccgtccccttggcgacggcgaggaacccgacgacggcgaccgacgccacctgcagggcgacctccagcgccttcatcttcttcagtgcaccgctgcagctcgtgcactgcatgacgtgcgaccaatacctgcagacggcatcacaagaatcatttgaattcaaaattcaaaagaagaataattgaattctcttgtgttaagttttgtgtttcaagtcagtgtgcaagagcagcagactgatgcaggtagattgtttagctgtttacctgtccaagagctgatctttgctaggagttggtggcagctgattagttattggggttgcccagccaatctgatgcttgcagtactttctgaaccagtttctgaaggtgatgatcatgttgtcagatgatgtgggcacatagcaagctttctgccagttatcaagaccaaccgtagcgaaattgcgctcctggagaaggaataataatgcttcaggtctagaatggcataacacttggcctgaatcattcagtttcagctgaagaaatagtcacctcaatgtggagcaggtagatgtctgaatccaagatggcattctgcccaatgtggtagtaccaccgtggtatgatcttgtccatccagacgccgacgttccgcgggaatgcccagaccaacctgctcctccccggagacaccgggatgcacaagaacaccagcatcactgtgggttgcttcttcttcttctccttgccctgatcatcctgtacagaatccagcagcaccaacaaggtaattgacaatactgatcttgtaagatggttctatgagcttgaacaatgcctgagatggagtctgaagtggcgagccgtagaacgtgcacggcgcgacgaacttgaagaagcccctgtctagcattgacaggaacccctcgacgttggtttcctctatctccatcttgagcggcccgccgccttccttgtcgaactcaactgtgtagaggagatgaatgttctgaatcagtgacgcagctaagcattgcaatttgcactagactgaaagaacagattaaattggggagcaaattggaaaagaaaatttgatcatgactaatgacagatgaggaacatatcttcctggatcttccttcttgcgggtgcgcatcaaccccttgtgcgcgtaggggacatgagcagggtccatgagattctccaccaacacatcgtacctgcattgcaaaatttgcaatggagctagccatgatcaacagctgcctgacaatggtgcagaaagaaagatttcagagaatggatttgggatttctgtacccataggggagatccctgacgccatagacggtgacgaaggacgggtcgtcgatctgcgggatgtatggcggccgcttcctctgcaggatctccttgtactccggctccgatctcgggtagaaccacaggatgttgttctgcaccacgcatgggtatgatgccacgcacgccttgctgttcttgtgcacctgccattgatgcgaaagctcgattaatcttgattgatttgagatggaggagaggggatgaagaagaagaggaggaggagagtaccgcggggccgagggcgggggcctgggggatgaactggcaggcgccgcggccgtcgaagcaccagccatggtagacgcactggaggcggcccttgtcgtcgacgcggccctcggacagcggcgcgaggcggtgcgggcacgagtcgtcgaacacccgccactcgccgccgccgccgtcggcggcggcggtggtgcggtcgaaccaggcgacgatgcggaggcccagcaccgtcttcccgtgcggcgcgcccgggtcgaggtcgcagacgggcgccaccgggtaccactggtccagccagtcgaaccgctcctccttacccgacgccgacggcgcgtcctccgcccgcggcgtctcggccgccacggccgcaaccgacgtcgacaacagccgcctcgccacggcgcggctccacggcagccgaggcggcgggacgcgggcggcggcggcggcggcggcggcgtcgcggaggtggagcgcggggcgcgcggggcgcgcggcggggaggaggaggagggagagggcatccatggctactcgcgtggtgggggaggggggcgcgagcggcccgcaacgaacttgtggcgcgcgcgcgcgcggttacgttgggtggggcccggcacaaacttatcggcgccgcaggtgattagctggacgctcgccacttggccaaattggagacgggagaggccgatgccgatgcaccggttttacagggtacatttaattatttgccatttttaaaatatgccaattaataatttgctacttttataacatgtggttccttatgtgcctataacatatggattcagagccaaattcttttgaaccactcgtaaaagtggcaaaaagttaatatttcgttttctagtatcacttgtcgagtcgtcgccaacgagccgccagaaactgtccgtgcaacttgtgccgatttttttattgaaagtacaaacagcaaggtagaaccatcactctttggatgataagacagttggttggttttatcggctaaatgccggttaactaaagaagggataaatcccctttatctgtttctaataaaattgaatatgtgatagagttaattttgtgatcggtaaaactaatctctaaaactgtattcgagataaaccctagagcccctccagcgtctataaaatagaagttgaacacaaaggagaagggacgccaaattctctatctaaacttcaaaaccctaaattgcccgaccaactagaaaaggtttgtgaggcgatctcggtgaaattttacattggcgcataagaagaaaagaaacagaagaataagagaaggaagaaactaaaggagaataattaacatcgatggcatattatgtgggtattgaagcataggtgattatgtataagctaaatcattgagatcgtaaatttatattccaacacagacatgctagatttttcattaacgaatcggttcgcgccaattccattaagtagagcaggaaaaaaatgttagaaaaaaatatcgaaaggtatataggaatgaatggaagctgccagtttctaggcacccgaaaggttcaagttttggcatgataaaatactaataagggtgtgttagatccaattttacaccccatcacatcgaacgtttgaacacatgtatgaagtattaaatatatgctaaaaaaataactaattgcacatattgctactactttgcaagatgacttttaaacataattgctccatgatttgacaatatggtgctacattaaacatctgctaatgacggattaattaggcttaagtctcgcggtttagtgatggatactataattagttttttcgttagtgcagaataccctatacgacacctatataatacctgatgtgacacataaaaactttacaccctgatctaaataacccgtaagaatgtactacctccgttttgttttttaatagataacgccgttgactttttttcacatgtttgaccattcatcttattcaaaaaatttacgtaattataatttattttgttatgagttgttttattactcatagtattttaagtatgatttatatcttatacatttgtataaaatttttaaaaaagacgaatggtcaaacatgtgagaaaaagttaacggcgtcgtgtattaaaaaacggagagagtattttgctatagccgtttttacttatggaagagtgacgacatctgagacagatcgaagagcatcgccattgtcacgatggcgacccaatcacaaacatggcagaattgcagagagtctagtaaggcagaagctgaggctgagcttaccaaacacaagcacacgcacacgcacaccacacagtctacctatacctactactacctgtcatcttctccttcttaatcccaactaaatgcgcacataaacgaagaagatttgcactgatacccgcgctgatacaagcaagcatccggcgatggcggcggcggcggcggcaagggggagcgtgtgggagatccagcagcgggacgtggaggccgcggggctggccgacgccgacgcgggcgccttcgtcgcggcgcttcgctccgccgccgccgttgcgacgggtgggcctgacgccgcgtgggaggccgtggcggcgggggtgctgcggccggagcacccgcacgcgctccaccagctcgtctactactccgtctacgccggctgggatcgcgccgcccggggcccgccgccgtactggttcccgtcacagtaagtcacctcgccggagacgaccagactggcaaactgacagtggctggtttcagtgtatgcaaagttcaagcttatgttgatagcgtcctagtactacttaatttctagtgtgatatcatcagtgataagatttccttgtgttaatttccacttgtcatgtcaagtaacctatttgaagtacaatgatcagtgcatgatttctctacgtagtgatttagtgtttgaaatgtgacaggattgacactaaacaaacaaatcttggtagactgatggaagcacatggtcctaggttgttaggatcatcatataaggacccagtttcaagttttcacctcttccacaagttctccgtagagcatcaagaggtcagtcggttgctctaaactagtcagctccagctaagcaaccaaacaagtttgaagtcatttctttacaaccattggagtggctatatgaatgttatttcttgaatggacagtttaagtttccacaggcattttgatcctactcccagtctatcctttgttaggtctactggtcaatggtgctgaaggagatctcaatcaagttccaacaagaaccaaagtcaattctagatacatcagataaatcaaggaaagggggaacatggctccaaggtgctgtgcttaatattgctgaatgttgtctgttaccttggccttcccaaaacaggacagatgacagcacagctattgtttggagggatgagggtcttgacaatcacccagtgaaccgtatgtcactgaaggagcttcacaatcaagtgatgtatgtatatgttatcagactaacagtaagaatcatgctaaagcgtattaagctttgccataacttattctgaatcatcaccattgttttgctgcttttggtgttttcagtacagttgctactgcgcttgataccatgttccaaaagggggatcgaattgcaatagacatgcctatgacatgcaatgcagtcatcatatatttggctattgtccttggtggttttgttgttgtgtcgatagcagacagttttgcacctcaggagattggtacacgcatgagtgtgtcaaaggcgaaagctatttttactcaggtaggaaattagtgaatctttcatgacatagtcattaacactaaagtagggcttcatctaaatttcacgagatttcaggatttcataattagaggagggaagaaggttccactatacaggtacgaacggatgattgatcagttcatttcagtttgtctattctgatagtataatgcacttagcattttgtttttttaaaaaaatgcattttcttcatatatttttctaatttatgacatttgcttagtttgaagttaagtaggagtgtaggacgttatcatgtgaacactgaaaacattctctttcattgattttagaattcagcttagatttttcctgtgaatctaaaaaataggagtacttaagtaccagatagttcatagtacatttcaatcagaaagacaatttgcagaacagataaatatttcataataattccattcttcagccgtgttgtgcaagggacttcatctaaagctgttgtaattcctgcaactggaggctttcttggggtttcactaaggaatggtgatatgtcctggaaagatttcctttcttgtgctgctggaaggtatattatacagaaataaatcttagatggctttggataagtgtattgtctttccattgaagaaaaaaggaacatgcaattgttttttttttctttactaatttcatgatatgagtgacaatatatgttggatttgcaggtcgtccatttatcccacagtttatcaaccttcagacgctctaactaatatactattttcttcagggacaactggtatattaacactatttcattgcttcccctgattttagtatttcttttgtccacccctgatttttgtctgttttatttacttgtgcaggagaaccaaaagctatcccatggtcacaactttctccaataagatgcacatgtgatacatgggcgcatttggatatccagccacaggacatattttgttggcctactaatcttggatgggttatggggcctatactcttgtactcatgctttttaagtggtgcaacgttggctttgtatcatgggtcaccacttggtcgtggtttttgcaagtttgtacaggtacatctgatgtactttgcaccgtcacttgctttggaatgttaaagaagatttatattttatcattgcttcttgtgtgcactgtaaactgtactaattatgtaggatttgagaccctgcttggttgagcttcaggttataatctaaagctgattttgaattttagaatttgattttaggattaatcttaggggtttcctttgttacttttgtcatctagctctcttctcacaattactataacaagacaagtaaaaatcctaactaaattattcttaaaaattaaacctcaaagttccaaattgcttttgatttttcttaaaaattaaaaatctgattattctttgtttattcattctgatttcatatttggttatggcacatctctactgggtagtgagtactaacaacgtgtttcacctcaaaaactgtttttgctctcagatcctgtttctttgagccccctttccccccacaaatcaggaagagttttgccaaatgcttatgtttgaagataaatatgaactgaacttacttaatcatcatgctctgtgaaatattttgcaggatgctggtgtcactatattaggaagtgtacctagcttagtgaagtcatggaaagctgggaattttactgaagggcttcactggaccaaaatcaggtgagtcatccttccactatcagaaggctcacagcttcatcacaatcagaaaggaagttaaaagtagtattataattgcagggtactctccacgacaggagaggcttctgatattgatg

SEQ ID NO: 2000 - DNA, 1520 bp, Oryza sativa
ttactgtcttagagaagtaccatcggtcaattttgagagtaccctcatcagtaggctcctgcttggtgccatcaaagcacagattagggtggcatgtccagagcattctccagtttcttgacacaaggctcgctctagccgcatctctgagtggcataaaagatactataagctgctgaatatcctgtcattacaagagaaaacaaacgaaggcatgctcaatcaatttgtaggtgctttgattctataataatagaactcatccgtgcaataaggcccaatgtttcatctatgtgaaaaatcacacaggcaggcaaggcatggcaggtgttgatagatgataggggaaaaaatgaacttttttttttaccccggatagagagaagtcagggaaatttagagttttttttgggaatacgcaagatgcgcatctttgtattaagagaaataaagagtatttacacgaacccaaacaagaaaataagagggggacgggaagataggagaaggacccaaagatcttaagcctattctcacgccagcatatggaaacgacctaaaccaagacctaaatgattagcaccggtagcaccgcatgtgtcaaccgccagagagttgcttccgccgccatagctcgggctatctctgaccagggcctttgctgagagttgaaaaccctattgtttctctctttccagattgtccatgcagttagagttgcaattgtgtcaaatccccttctgctagccgctcccactttaaggcgggagttgcaaagccagagataaaaggagtcttcattcagggggagacactgcggtagaccaatgctggaaaggacagcccatcaaagtggcgagactctgggcaagcgacaagatgtgatcaatagtctttcatgttgatcacaaaggacacatctatccgggtgaggcaaccccctagaacgcaggcggtccgccgtctagtagcgcctttttgtgaccaaccaggcaaagaaccggcatctcggggagggggggcgaaggtcttccagatgggctcggattggaaaggaaccctacctagaaagagtgcccggtatgccgaacgcgaagagtagactcccgatgcttcccacttccaaataaaagagtcggggtggtcagagagccgcacagaggacctcaggatgctccagagctgaaggtactcaagaatagcctgcaaacccagcgcccctgtgcagtctctaatccatctcctgtcttgaagggcctcggcgaccgtcctgcgacggcgaagacgtgccgggacagccgcccaaacagccggagcaatgcagcgaatggaggaaccctctagccaaatgtcttcccaaaaaagaatggactccccattgcccagaacgcagactgttgaagccgtcgcaaagtttcgctcgttcaaggaaaccgggatgttgaggccgtgccatggcttatcggcgaagtgcgctgcaaccagacccatctcgatcttaaggcgatgcccatgcgatc

SEQ ID NO: 2001 - DNA, 3493 bp, Oryza sativa
aagtcatcatcaatgtgtgactgcgtatgaacatttgcaggagatggttcaaaatcggtgtgtgtccaataccaagttcttccaagcacaaaagctgtatgtaatctttgattagtactaatctgatgatccgagattctgaatcatcaaaccaaacctggtctaggtactactacacgtagtctttgtagggactaatatgtaattaaatttttatccagggtcatttatgaaacttcccacaactttttctcccttcatttatgacatccaacgccagcgcgagccgcgaatccgccgccggtgatccgccgacgagtcagcgccgcctcacgccggccgccggttcgttcgtccccggcggtgctggtcggagagagagagagagagagggatttccccttggctccgcgtcgatacgatccgagaggaggcggattcgggtcggatcggaggcgggtagggaaaaaaaacccgatccgcttaccctaccctcctcctccggtattttttcccctcacttccgcgactaattttcctcccttggtttggacacagattgagagcaagcagcgtggcgacgcccaaatcgcgcgattcgatcgaggcaaccctccccaattccctcaaatcccctatccgaaatccgccaattggccgcgtccgccacgccaagaggtgcgaatttctcgcttttggatttgggagggggctttccctctccctttattgatccgaatttagtgtgatttatgcctagtgattttggcgttcttgggcgtttgggggggggggggggatcgtttggttctgtatgcgggtgtggagttcgtggatcggggggtatgaaatggtaattccgagcgagtcttttgatttggtggactgtccttcgcttgcgacttggggggagaagaggcgcccgcgctaattggagggaggaattgcggatatgattgggggaattaatgtgaggatcatggtgtgcaattctactcgttagctcgaggataaggtgtgagtgtgtccgcttgttcttaggttgggggaaggtgtttgattttgattccaccaattcacactttctgtttatccaagtgaaggatagtagggggggagaaaaactgtatttgcaaagtaggagtaagttttttcagaatattgtactaagttttagctttgatcggttggttgctgtgaggatgggagatggaaaaaaaaaagtgttggccatgctatgtttctcgagtaataagagatatagtgaaaaaacgatgatcagttgggtcttctgctgccttctccctttctctttgatataaaagttgcatactaaggcgttatagaatgctacagaatgtggtatattgttttgctataccccacagcaaggatatttgttacacaagacaagtttgcttggacttaaagttatcattggtcttattgttatcgggaaggatatttctttgatattttggctttcctgttgtagaaaaagcaactttattaacttcaatttgtataacactagatgttatagaaagcatacacaccaaaggaaatgaatgaaaaataaaagatgatatcctttaaaatgcttccaaactaggcacatacaatggtcttgagttccattaataatccatacttctgtttcatatatgtatgcatgcttttttccagaataaaggaaaacatcggcgtatcaacaagtgaagctgcattttcttagagctcagatgaagcggcctcgaaggcgtctgtggtgggatgactgatgagggatgatagtgacattgatgaacttgttacgggcatgctggagaccatcatccaaccagcatgcccgggcaggctcagatgttgccggcaggcaggatggacttctatggtacaaggacactggtcagcatgtaaatggggaattctctatggctgtggtccaggccaacaacttacttgaggatcagtgccagattgaatcgggtccattgagctttcttgactctggtccatacggaactttcgtcggggtttatgatggacatggtggcccagagacggcttgctatatcaacgatcacctattccaccatctgaaaagtaattgatactgacagtatgcactagtgttgttttgcactacttccatactgtgttttagagcaattccatgaccatttcattcttccatggcttatattgcagggtttgcatctgaacagaattcgatatctgctgatgtgctgaagaaagcatatgaagctacagaagatgggttcttctctgttgtcaccaagcaatggcctgtgaagcctcaaatagctgctgttggctcgtgctgcctggttggtgtaatctgtggtggcattctttatgttgctaatgttggggattcccgtgttgttttaggcagacatgtcaaagccacgggagaagttctggctgtccaactctcagcagagcataacgtaagcattgagtcagtgagaaaagaattgcagtcaatgcacccggaagataggcatattgttgttctcaagcacaacgtttggcgtgtaaaaggtctaattcaggtgagttctctatcactatgaacacagttttgctttgaagaagtttgattgaaggatcatttcatattgcctcctgcatctgccattattcccatcatcaccttccggatggtaatcggcttattaaactcatctgcatttgtaatgttaagacaaaaccaagtagattcgaggtggttacaccattggaaataaatgcaataaagtcttcttctgctcatggatgagagatgtcatctgtgattgatgattgtgatatcactcctatattttgtgccagtgaggagcttgagaataatcgaaggttttgcattgtctgttgtttaattgcatgttcatctacttaattgagagattttttttttcgtggtacagatagctgctggttgaagaaatactttgtttgctatttatctgttaggttcatgccatccctcaaataaccatttgttagtgaaaaacattttatgaatatccctccaatctccactcttcagagcttgatacacccttcactaggctaccatgataaggcatccaaatgtttgatgagtttttattgtacagtttacaaatctggcaatacttgctgctttatttatgtttcttccaaggtctaagtgaagattgttgggttttcctttaatttgttatatattttgcaggtctgcagatcaattggtgatgcctatctcaaaagatcagagttcaaccgggaacctttgtatgcaaaattccgcctccgggaaccttttcacaagcccatactagttcagaaccatcgattagtgtgcaacccctacaaccacatgatcaatttctcatatttgcatctgatggtctatgggagcacttaaccaatcaagaggccgttgacattgttcacagtagccctcgcaatgtaagtgcttgct

SEQ ID NO: 2002 - DNA, 939 bp, Oryza sativa
aatgtgatgattgttagtggatgatgatgtggcatcttgttaattagtgaatgatgatgtggcatcttgtcagtggatgatgatgtggcatctttgcatgttaagcttaaggagttagtgggggataactttatagtaagacaggatgcctatcgagccatcgcgaacctgagcggcctacctctatgctcgggtcaccgacatgtgggacccacttgtcagctccatctccttccgacctgtccgtcccatctatctactctactagcttgccatcattcatggcggacatgcgccggtttcttctcgctggtagcgcattgaagcctctccgcaggtaacaaagatgctactagatggatttcttgattgccgatcgaatctctatccttcccgatcgattcgagtcgggttcaaaatatgataaaccctatcccttgttaagttgttgttacactctgtccaggtttctcccttccccgtctctcctctactgctactgctaacctgcgtctccctcgctccccctgcagcgtatggaatggagtatccgacgaccaccaaggtgaggaggttggagcaccaccgcagtgtcagcgactcactcaggccgccgccatctttccagatacaagacctccctgaggtaaaactctaaattggggcgccgggggagacgatctggcacaggcgtggtgtccgtcagggggatcctatctcccctatgatcttcatcctcgccatggattctctgagctccctctttgttaaggtagaagagttggggctcctccagccgctggggatccctcactgggtctccctctatgctgatgacgtggtcgctttcgtcaggccgacggttgccgatttggaggccgccacaacagtgccgcgcatctttggcgaagcttccggtctccacacgaacttcaacaa

SEQ ID NO: 2003 - DNA, 1413 bp, Oryza sativa
tagttttttagctcttttttgccccattggtcttggctgttcatcaagttcatctacatataaagggctactatcctctccttccttctccttgcctaacccctttgttgctattctttttcttgctgctttcaggccattgttgtatgtgatccactttgcttcagttttaactgtgttccatacttccatcaacacaaaaggacctagattgagtttctcattgtcttttatatagaatacatgggccttctcaatccacatttgatcattatagccacttgtataaatcattctagccttcaaccaagcactatggaaaaggtcagtccacttatttaccttatgaaagcggtccttgatttgcttggcatttcttctcctatgacttggtgtagtctcattgtaagtagcctcaacatcagtccaatattgttcattcttcctatcagcaccaacggttgagtccgttgaattgagcagccaagagctcatctgtaaatgttaattagcatatattatcacttggactgttatggtaagtaaaaaaactataaacacagtgaatttacagtgagactcaccatcctaacatcttcttcttgagtccaaaagattcttttctcagtcctaggtgtctcatcaccactgtcaacattaacatatgtattgtccctagctgaaataggagtcgagtaatcatcttctgactgattttggtctccaacaaaattaaattgttgagacaagttaggctggatcaagtttatgaagcctccaagaggtgttgcattgtttcccctgccatattttacacatatatatgagcaatgaaagcaactagggactaatgttatgtgtaaagtaggaactaatgtttgtttcagtgcttcatcctctttgatgttatacagtggataaaaactagttacatagctttattaaactatcaaagaaatctgcaccagtgcaatcaatctttgcatcaaccacaatactgaaactcatgacagtgtatcccaaatcttgtataagcgagggaagtgcaaataacatctaaaattaattcctagccatatgattcccatcattgagctcatcacagaagcaaagttcagagatagtaccatgttgcaggatctgaagattaagaactccatggttgaccactagggctttggccggcgttgccgaagaagccgccggcactgccgttgaagaagcagctgccgtcggtgaaggagcttggtggtggactagccgcgccatatctcgaactccggtgctctggcacacgcgccgccaaccctgaactgctctgctccggcaccatcgacgccgcccgagctcctccctgggccttccgcatcggcgccgccgcaccctttcgagattgcgatgcagctggcttgc

SEQ ID NO: 2004 - DNA, 1586 bp, Oryza sativa
ccatgtcgaagtgcggccgcggcgggttgcaccagccgccgtcgtcgctggggagcgcgtagttgggcgggcagaagttggtggccgtcaccgtcaccgacgcccccgcgcggcaccaccgcgggtccgccctcgcgtcgcaggtcagcgcgtagcactgcccgcacgacgcgccgtcgtcgaacagcgccgtgctcagcgccgccgtccgcgtcccgtacccttgcgtgtacaggttgccgtacccgcacgcaccgcctgcaatgcacgcacaccgcactctgtcagtcagtccaagcacgcgtcgcgacgcgacgcaacggacgaacacataggtacgtacccatggtgccggaggcgtcgctgccgccgtagaaggtggcggtgcccttgctccagcccgacgccgcgaacgcctccaccgtcgtcgaggcggcggcgagcagcgcgtagctgacgaacgccaccacggcgaacacatggccacggcgcgccatctccgaattccgatcgatttcgcctagctctctgctcgttgcaacctgtgctagcttagctactatggtgaactgaatctgattgctgcatacgtgagctgtatatatacacgcgagagatagctttgcacatgcagagccatggcttgcgggcgaaattaaaatttgtcatgtcacgatcaatccgtcccatattctgctcgatacatccatctcgcccaagaagaacagggaggacgtacggtcgtacgtacgctttctatctcgctttaattcgagccaagttattacggctttctctgctgcttctgcaccgaccatgcatgcctctgccgtcatcaggttcagagctagctgcaccattaaacttgaagatgttaaagtcggtgccaaccttgttaggttagctatatagtccatgctcaggagattgagagacagacatgctgatttccttggagaggcattcgtaatactgccattaaacaggttgcaaacactgccgctagctctgcttcagaggcagcaagccgatttagattaggcaccttccgaaatctgcctgtgtttctttcttcagtatggcaaggaagcatacaactatagtagaagatatcaagagcacaaaaatggccggtatatttgcaaatctgcctgacaactaactgcagattaacaagcattaattgcttcagaaagaacacgcactgtgtggttggttgggtgcagtaatactagcagagcagctgcagatcactgcagtatggtccggacactgaagtgaaggaggccagccgagcacatggacaatctgagactgagacgggagatgaattgagcggtgcacatggtctccttccaaatctttctgcatctgctgccaccacaaaacagtaaactccaaaaatgatattacacatcaatttgtttaggatatcttgcttttatattttatttttaacctcatctcaatttgagggcatgatgaactgcctgcaaagacaagaaacagcagaacatctagacaaattcttcagttgcagtgcagtgtggattggttcgtgttgagtgaggctgcgtttgagtgtg

SEQ ID NO: 2005 - DNA, 727 bp, Oryza sativa
tttccttttctatcaatagtggacaaaggtgagagctgatatttattatatcctgttagccattcagaaagtgctttccatgacattccaaacgaaatgatatttttctcatgttcagtcggccatgcatcttcagtttaactaaacaagtcaaaaaaaaaaaacttatatccaacataagatatatatgccctatgagcataaacgcactcagtgataaaatatactagtaagaggtaaagctaaggtgaatgctgacaagagacaagcccatctgtccctcaaagataacaaatactactactgactgaaacaaaattaaagcatgatagccacttctgaatttctgaatggctgaaggggaaaaaaattgaacaggatactgcatgctgatcgagttgaacaagtaagaaaaggtgttcatctttgcagagacaagatctaacacatttctaactgcagaggtagttcatagcatccatcgatcacctacacacaatatcctctctcatgcctgacccctgcacaaacgcacaccggattgcaaatacacataatttagatctttctaatgattttgtatcgtcagataatcttgcttgttttggtcgaccttcagaattgagttgatgaagttcgtcgcagtgagctctttgtaggcatcaccagtgcagcaacctcctgtttcagctgtccaagcaaaagtacaagtgctcgtcacatgaat

SEQ ID NO: 2006 - DNA, 722 bp, Oryza sativa
cacttttggagaggtgagtggctatctcgacctgttgcatcaactctttgggtaaaaaattgatcccagttagacagggcattgacaattcgaagaaacaaaggcttattcatccgaaacctcctccgaaactgctcatcagtatagataggatttgctgaaaaataattagcaactaaatcttcatgtcccttttctcttggcctaggtatgtaccttctaggtccactttgacgctggcgacgacgaggtggaccagaagaagatccttcgattttggccttcaatttatcgccaatcttccttcgaaatgattccattatttcatcttcggcgagaaaatcttcaagtgtatatacttccgctggatcgatttcttcaaggacagtatcttcatcgcctccatctccaccagaggcgaagaactcgccaccagacccctcatcgtcgccaccaggatgctcgccaccagaggcaccagaggcctccatcgccacaattgtgatgcatacaagtcacagagcagttgattttatatacaaatgcatacacggcattgccttatcatttcacattccatttcacatcatatcagttcacattgcaatgacccatcagttcacattccattgacacgtttcagttcacaaaaaacagttcacaatagccaaaaaaaaaacaatcccagaaacagaacatagcaaaacagagactacttccaa

SEQ ID NO: 2007 - DNA, 1687 bp, Oryza sativa
aacttcgaagtagactctggactgggacagctcaatgcaaaaactgtgtcagctactcagctctttgataattatccaattataatcaagctgtaatgacccagaagagcagaaatgatttaagccagtctaccaagtatatccaggagattgatatgcgatggtgtccaaggggcgatatatatttatatattatatattatacatcagatgatcagcacaagccagttcagagttttgagaggtatgttacataaggagaaaggagtgagtagatagaaatatagatatatatgtagatagttcaaccaaaaagatagagcatgtagcaatataagcagaaacaaaatgctctatagattaagggttttctatatatatagagagagagagagatgtcagtcttcttctctaagaacagcaacactgatggacaactcgatcgcagcacacagcaagaaagcagagcagcctcctcctccttctgctacaactatagcagtgatcaccatggccgtcgtcgtcgtcgatctcacagcttcctccggcacaacgggcaggatccatgcttgatcaaccagccgtcgatgcacggcacatggaacacgtgccagcaatccggcaagctcctcaccttctcacctgtctggaaatcctgcagtagtaagaggagccaaatgtttcagaattcacaggattcagtaatcagtgagaattcatgcaaagatctggcacatcaatgagaagcacacggttttgatacgagacagtgataaattaaatatggatgcaatgtactctcatcaattggttgcaaggtaatgtgcaagcaataatgcagagatgttcaatttaggtacagtgagtttgagaaatggtaaaagtttcagacctggaggcaaactgaacatcccgagaggtcaccaatggcgttcctcctgtactcctcagtgatcctgacctccgggagcttgtcgatggatgcccgtggcatgccgttggtgccctcgatctcgaacaggtcaggggactccctgaagggcgatgaatccactgcattcatctgaattcagaggcaatctcgtcagacaaatctgtaactgaagctgctactgcatatttctgaatcagacgcaaccatgtatgcaggggcagattcatgagacgaccaaactgacctggctccggaccacccgctgcaccgccggatcgaccttctcgcggacaagcctgccggtcaggaggctgtagatcacattaagctgcattttgtgcagagagatttgtgttaggtttaacaagccaacaaaaaaaaattagcaaaatgtaaggctgtgagcacgtatatatgacagatgaagcagaagagatgttcagagatcccgtttgtgcagatatttgttgcacaatctacctagggagcttccccccccccaccccccctaaaagtggtactgagaatacatgagcaggttaattagattgtaaagaatgcacaaattgctttggaaaacatcatctgaactattcttttttgtacgaaataatcatctgaactttcaagacagcaaggtttgacaagttgtatcatctcataaaagaggcagttagctttgaccctttgttttaaaataaacacaaacaggttatatgaattaagcaaggcctagttcatataaataaatta

SEQ ID NO: 2008 - DNA, 573 bp, Oryza sativa
catcaagcacgtaaaacatgcttccttgcaagttgcacattccaagaggataaaaaaactcgtttaatttactgcatgtgccagaattggaggatgggaaattgaccccttttaagctagtagccgccatgatctattcacggtttttactttcttccaggaccattcaattcccttttctacgtttgctggagatcgttgatatctgaatttttaaggtgaggggcaattaatttacagttcgcaatacctatttagatgtgactaaaactttaagaaactatcacatcggatgtttggacactaattataaatattaaacgtagactattaataaaacacatccataatcttggactaatacgcgagacgaatctattgagcctaattaatctatgattagcctatgtgatgctacagtaaacattttttaattatggattagttaggcttaaaaaatttatctcgcgaattagcttttatttatgtaattagttttgtaagtagtttatatttaatactctaaattagtgtctaaatatagggactaaagttaaaattagtgtctaaata

SEQ ID NO: 2009 - DNA, 705 bp, Oryza sativa
ctgcagcccttgtaccaggctggatctgttatcctcttttgtggacagagtaaattcggacaagaagctactagcactgtcgattttgttgtgaatcaatctgatttcaccattcagacgctaaggaatgttaccgattacttatcgcttgcaaagacaatcagtgtggcagcactctatcttccttcagatgtacaagggcaaattgacaatttgaaagtggacttaaataaagcggctgatactatatcccaaaagacatcagaaaactacagaaggataagaaaagttctccataacttgtacgtttcaaactattcttgccatgtttacctctggtttcttgactttgaaagtcactgactgaataatagttcatgtgactatatagtatatttatctgtgggcctatatcttttcttcaaaatgacggcactgtgttgctaagaagcgtaatcaaaattcaaaatggttattatggcattgcattcatttatgctagcacattattagtaatgctatgccttcaactgaaaatttgaattcctgttttactacaggtcagttgctttgatttgcatagctgcgttgatgcctgttcttgcattcttgggatatggtaagaatttcattctgttagtcaaactgatgccctttttgttggttttgttatctcagatgtgttaacactcactacttgaacaa

SEQ ID NO: 2010 - DNA, 736 bp, Oryza sativa
gcctctggcttaacacttggcctcctcttgatgctttttgcggaccgcccccaaagggaggaggtgtccgagctgccatcagggtcaaggatcaccccagtagactgctctccatgacgagctcagtctctatggtcattcagactagtatagcaattgcctgtaatagttaggaaaagaagaaggtgaagcactggggcaaagccccattttgcagtggagatgatctaggtggatgagtgcttccttccgtggtatacatggtatgtttcagggaatagttgtaaaggctaatgcctaatggcaaacaaaatttgggcaaaaccccactatgatatgaagagcaatgttctgtatcccctatgattgttcagctggacatgtttctttcttatgtacatgtcttgttctgtgtgtttccatattctgttggtgggggggacattccttgtacactagatcagcctgatgtctatgctggaggttggaacagattttgcaaccatgtcaattgatgcagttgagcaagcgggaggttttcagaaaaaaaaatgcacaattttcagctctggtcgtaagggttgtacttgcacagcagtaaacttacagcaattctaatgtcctttttttaaaaaataataataataatggttacatcttcggcctctgttagcaggcgcacaaccaaattcggatgtccttttgtcgtaatattactagtatttgcttcattgct

SEQ ID NO: 2011 - DNA, 656 bp, Oryza sativa
cagagtatccctgttaccagtgaaatgcaaatagaagggcagacctaaccagaatgacaaatttttagctgcagcgctgaccgtgaatatatgttccaacttaagagttggagtgactaagcatgaatactgacctccttcatgatggacttttcaagaagcatgtcctttgggagcatcagaagatcacttaactcgttgagcagcttgaaagaataaaaatcagcagcaccacttctggtcatcactctcatctcctgcttgaccatgcttctcaggggcagcagcaaccatgccaaacttatcttgcaaccatcgggacataataggccagccgtgcaggcggaaacaccagttggcacaagccggtggtgatgttctgactgatccattcctggagcgtaagagataagcttaaagccatgaatcccttttatacatatctggatctggatcctgcagaacaaacatataggatgagtagtatctgatataaatataatactcgagaaaaattcaagtattttaaaatatttataaatatgtatttcttctcttgtcaattttgatttccccgagcaaatgactcattacgtttaaacactctgccggggatcctctagagtcgacctgcagggggatcctctagagtcgac

SEQ ID NO: 2012 - DNA, 832 bp, Oryza sativa
gaagaactaccccagtgattgaggctttggtagtcctctccgtgggccggctcccgcctagcccaccccttgacgaagggggcgtgcggtggcttcgtgattgagcggtggagttgggctcgcctcaatggggattaggaaaccggcgtgtcggtgacatgggaccgggagtatcatgacttagagacttgaggcagacacgatcacccacgtggcctaaccccctcggggggggggggggtcgggcccgagggtgatacggccgcccttctctttgtctccccgaggggtcggaccgctcccgtttcggccccgagggctggggtgccccgaccccttgtggattttgcgccgcgtgtatgggttaggtgagcgcagcggtgctcacctaaccgcatttattgcggtttggacgagcgcgtcacgccgcatgtaacgcagtgcagcgcgctcgttcatccggtctgtgattagtcacagaccggtcaaatcgtgggttaggtggcgacaggcggtctgacgcacgcctcgccccatcccgtcaggacgagagcctccaagcactcgtccctagccggagccggcgtgttagctcctggagatggcacgttggttccggttagatatacgctaggcttcatcctaaccattacaggcaagatattgtatgaagaagggcgaacatgcagattgttaaactgacacgtggtggacaagaatgaccgatttgtgaccggtctgacaatggtcatgtcgtcagcagacagccatgttcccacgtcgcgcctgcttccggtggaagtggaggtaggtatgggccgtcccatcagaa

SEQ ID NO: 2013 - DNA, 26227 bp, Oryza sativa
tttagcaagagcttcaacctcttgctaactttcctttgagtctatctctctcatccaattcttgtgtttttcctgtggttcaatcaaacggtcattcctgtgtttttcctgcgttttgttatcctctgttttacacttacattcctatcaaaatcctacgtttttcctattcctacgttttctcaatcctgcgattcaaaggggcctaaagctttaaatgatataatcccctagataactgaaaagttttaggcctatgagcaagcacataaatacaagcatcactaagaccaaaattgtctcctcatctagttcttcagatgcatgcaccaaatatgtacaagcatgcctaggacggaaacatcctaaattatcccctcatccgcaatttttcgtgtacacactaaatcaccacaagtataacttagatgtaaacattttagttcctatacatctgtagattaaggctatgctattggtacttcaggaacaatactgataacataatctcccaggctcttcctttgaacaattttaattttacagcaatatccttaatttccatatatgtcaacaaacagtatgtggcttatttcggtaacaaaagaaatggggaatggtttgttattgttcaatacaacaaaattctaaacaataccataatattcatgtgtatccatcatagttcatgacaccactcactacttaagacacctaattgagacagttttaagctttccttagtgatctaagcaccacatttagcatctccgctgctctgagtgtgcgagtgttaaccaggaacaattgaagaacggaagcaagagagggatgaagtggtgataccctccactccacgagggcgtcgaggaagaacgaggagccgctcgatggctccgccttcacctcgtgaaggctgcggtacacgtcgatgtcgatctcctccacccgctgcgagaaggacttgaactgcacgagcacacgcacgcaacggacgcacgaaaccacatcagcagccgccaaacgcgcccacgagctcgattccgtggggaggcgggggcgagagagagattgctggaagcgcggggaggggcggatgctcttaccacgaagcgcttgcggctggaggacgacgtgttgaggcacttgaccgccgcgtacgacggggtcgccatggccgcgtccgccgccggcgccgccgccgccggagaggtggggtggaagacggtgggctacgagggggatggggggaagaggggcggcgcggagcatgcggtgcggggacggcggggtttaagcgaggagtagtgggttgtctagttgtctagggttttgaggcggtggcagttggggggagttggggaggaggacgacgacgagatggcctttagcagttacgcgggctcgaagactgggcttcgtgaatgggctcctggcccactacgcttagcttcagtttcaagatatttccattttaggacaaaaaaatcaaaaaacttgtgctaattctgaaagggttcataaatatttaggtttggtatcaaaattgaaccaatgtgaggagaatatataggtattttcaattcttttttgggtagtgagaggttttaatatttggtttattatcttaccaaaaatttatgataccgaaatttggtggtgtagcaacccatgttagccctaaaattcaaggtaagagcatcaccaacagcatctaatatgcttcccttgagctcttctgctcttggtgtaatgctctaagaacaccacatgcattcgacttatatgtaattgacgttttggcatgtaattctcgtgtctcaactagctccgaagtcttaggctgcgttcgttcctccgttgttcccaactcactctccatcattttccacgtacgcttcccaaacttttaaacggtgtgtttttttgcaaaatttttctataggaaaaatgctttaaaaaatcatattaatctattttttcaaaaaaagctaatatttaattaattatgcgctaatgagttgctcccttttgcgtgcactgtagtagttcccaacatctagtatcgaacacagccttagtcctttaagtttcctttagtcggctcttcgctctagttttatttcttgtacccttgtaatggcttccggccattgctttgagtaattgaaattttgttttcttttaatatgttgacgtgcaatctttttcgcgttcgtgaaaaaaaaacgttttggcatgccttttttaagtgtaactaattgaccagatatcgcagtttgtaatgcaaatcaagtctatggcatgaccaaaaatcctactcatgaaactgaaaattggaagctctaggaaaaacttacatccctacctattcagcagctgctgactaacacaaactacaatatcgactagtataaatgtataatcgatgaacataagcacacagtgaactgattagaaacagggcattccgcattcagcctttcactcagttaggaataagatgcctaataataaaatggaaaaccgcttccaatcttccatggtaatattatcttaagaaaatcttccatggtaattaatctactctgtatttcatcatgaaaaaaaaaatgatctactatgtgcttgcactagccggttgtgctatgctcatcagaagaagccacaacacattttttagacaaagatatgcgctgaagcaatcagtgtaatctgaaaaccagcttttttttagcagccaccatcatataatcaacgatttcatagtttcatatgagaaatcaacatcattcaggtctgatttattgactaagactaattactaagcagataaaatgattgcttgatctggttctgacaaaatgccggagagcgaacttgtgggctagctgtggcagcaccgctgcatcagcaatcagcatgaattgctagaaaaataaattccactggcaattccagcaaaaacactaatgcgctggtttagggaatacgcaaaagatttgtgcattcttgtattaactattaagtaaaatccaatatttttagttctaggatctcatttgacaaggtaacaaaaagagtgagaaaaatccttcatggcttgtgctaaacattaacatgaacagaaaaccagagacttcatggaaaaaccgcagctgcagaatacctgcaaaaaacagatgtcttgatcgcaaggaaaatttcagctgcaaaatacctgcaagaacacatgtcttgcttgcaaaatgaaaggaagaagaggacaccttcggccactacggtacatcatcacattttcccttgacatatcatcatcgcattgaagctaaaccgacctgaaatcctgaacaaatgagaattgaaaaacggtgaaccaaacgacacagcagttatggggcaacaatcagtaaagcaaaatttccccgagatcctttgttgcaggcttgcagcctcgcaggacctgaactgaagcctcgaaaccatcaactgaggcacatacgcacgtatcattcattctcctgcaatcctactagtgttatcaaacaatttgatcatctcataacagcaattcaaccatactcatgatgaaaatgaagcgtatgcaagtatcatcataagctgaagagtaaccgggccggagagcgcatggtcaggtcaggggaaccaccaagtggggggagcgttgtccgacgtcgtcgggcggcgatccaccggaggccacgcctcgctggccatgtcgtccatctcgtacctgcccatgtcggtgaacgagtagcgcggcctctcctgcaccgccgccgacgccgtcgtgtcgtggacgaagccctcgtcgaggaagtagatgatggcgtcctcgaacccggggaaccgagcggcctcgaacgatctggagcagcctttccccacgaacagcatccgcccctccaggtagtcgacgggcaaccaggtggcgcgaggtcgcccgctgatggcggcggcgggcgtcagcggcatgacatggaacctgaacacgcggagcacctccgtgccgccctcgttgtagatgtacctcgcgaccatcagcagctggccccgggactccacgaggtagcgcgtgatggatccgttgcctccgatgaagcccatgtcctcgaggtaatcgtcgcgccgcagcatgttgtactccacgcggcgcatccgcatctggttgttggtcaggcggccgtaccccggccagtacacgacgacgccctcgtcggcggtgacgaagtagaagcccccgttgtagtagacgacgtcctgcggctggttcagcctcgggcccctgtgcgggaaccagcatttgctcccctggacccagaacgcgacgtcgagccgccgcgacacgaggacgacggcggcgagcatgtagggccgaggagacgacgacggcgtcggcggcgaggcggagagggtggcgaagcgcgcgaccaaggggaactgcttgcccgagggggacacgatccccggcgggagctcgacgcggtggccggagttgaggttgtagagcgcgtagcggtggctggagtcgagcgcgaggacgaaccagccgccgtcggaggagccgcagaagcgcgcgacgcggacgtcgggcgggagcgggagggggtggctcgtgcggccgatccagctgtagaaggagggcgtcgcggagctggggaagatgagccacggcagctggggcgggagcggcgggagctggggcgccggcggcggggggcgcggcccctcccgcacggcggcgcgccactgcctgttgacgcaggccatgcggacgcggtcggcgcggcaggggaggcaggcggtgaagccgaggaggacgttctcggggaggtccccccacttcgccctgtccatggcggccaccgtcggcaaccgccgggccgccgccaccgcgccacgcccgcggcggcggcgatagtagtatctcgtgggctctaacatttttggcgagcgcgggtgggtgactgggtggggtggctaccggttcgatcagataatgggggatttatagccgcgtcagggcgggtggtgccttcgcttgcacgaaatggaacgcgaaccgaagaggcccgaacccggccatcgatggattccgccgcttcgctcgccgctcggactcgcgcggccagcggcctccgcttcgacacggagcagctgcgcgttcggccgctcggggggctcgcggcggtgggtacctagtccggaatcgttgtgtgttgccaagcggcgtggtgtcgccgaatgcgctggcgctgcggcggactctccccgtggagcgcgggctcgccgggaaggcgctcggcgaaatggcggcaaggcgctccactttgttgcaggccggaggctgagactgagagctggttagtcttttgggcctattggttcagatggatatctgggctatgcattgggccggccggtgccgtgataatgtgacatgacatgccagtgaattatgccaagctgccgaccttgcactgaatattccccctttctcccctcgaattttttttatttttaattttttttattaaaagttttacaaaaataattttccattttgaaaattgacggaagtagtcgcctaccgccctctgggaaggcgatttttaaaaatcgccctcccagagggcggcgaaaatgacgtggcagacggccgttcgctctcgggcgacggccgtcaacgaaatttgcaggcggcccccttgccgccctccgcgatggcgattttgtactgtgcggggggccgcctgcaaatgggcggcgagggggggcatggaattttgcaggcggcccccttgccgccctccgcgagggcgattttgtactgtgcggagggccgcctgcaaatgggcggcgagggggcatggaattttgcaggcggcccccttgccgccctccgcaagggcgattttgtactgtgctctatatttttgtataaatatcaatagttatcaaatctttttatattgaaaactatacaagattaaaatctccaagactggtaaaatacaattttattattatttagggcatatttggattgttaccgtacaaatattttgttaccgtacaaatattttattaatttttagggcatatttggattgttagtgccaaatttttcttcacgaccaaatatttggtaaggtaaaattgcatttgatcatatttggtttgctgccaaaatgtaaaattgtagtgaagaatgttctacataatctcaaatctagattacgtattaccaatgaataggcttccattttcgtgtgttgtgtgctagtgggaaagaagatatgaagaggttgccttcagattgtcaattatatagcgtcgttttcactgcaatatatgtgaactcaatgagatacattattcattagatgtgacaagacgatcacgcgtgggcgtgattcactttatgtaaacaggcagcgccgaaagttgatagtgataactcgagctgccgcttttcatgtgtgctgttgtggactgtgcgcgctactggatctgacactaccgtgcagcgccgaaagtgtgttgtcgtgagcataagttgttctagcaccatatgaatgaaaagaactatgtagacgagacaaacacaagtagtactgcagtagtaatagcaaaagtagtactgctttacaagtttgtaagccaaaagaaacggtcacataaggactgaagaggtagaacactactgacgaggcctcttacccctgtccctcctaccctgcgccctaatgtgcccgtgggagtacgtgagtcggtccgggggtacggcacggccaacccgtcctgcctgtacaggtgtgacctctggctgctcctgagtgtgcgcctctggagctcctccaagctgagaggagcctagtacgtcgtggtggtctgcaccgtgcaagtcgtcgtcgtagaactggctagtaggaccagtcctaccggcgtgagacgaagaggccccagtaccgaagatcccggctgcaaatcctgctggacaaggaccatcagtttcatacaggtatttaacagtattaataaaaagtaaagtaccgtgtgggcgagggatcgacgctccgtgagaggaagagctggcgaacgcgcccgaagaggtggcgaacgcccctgcggagctcgtggaagcgccggtcgtgcctgcgaacgcgctcgaaggcagacgaggtcctgcgatgaggaaacgtgcagttaaaacatggtgacataatcgtgcaaaagctgaaacaaaaatgaactaatatctgggctgaactgtactgtgcgaaaccggtgctgtaggtcgcactgatccgaagctaggggcgctcgaaggcaaacgaggtcctgcgaggatggatcatcaagttacgacggggtgatgttttcgtacaaaaacagaaacaaaacttaagaaacctctgggctgagcagtaccgtgcgaaataggtgtcgtaggtcgaggtcctgctccgacggtaggcgcgcgaggccgtggttgtaccggaccagctggaggtacgacgtccacggcgctgcgacaggagaagacgcgcatgaccgcacgcatcttctcctgcatccggtcgaaggtcaccctctgctcaacgtcagtcaagtgcaaacctctgttcaacctcacttggactgcggtgatatcggcactgatatcccgtgcggcatcagcctatgcaagatggaaataacaaattcagtagttgtcctatattatgcaagataaatgaaataattgtaagaagtaatacaaattggatgtaccgccacgaagtagtctcggtcacggtgcgtgggatacgcgtccgtgacagcggcaacgtgcggctctagggcgtctggagtgaaggtcacacgcgcacgagtgcgaggaaggtaccaacgaaggtagtcacggtagttctcctccgtgtgtgggaagagctcgttgatcacctcctctgtagctaacacccagtcgtcaacgtactgctgtacacgtggagcccaaagtgcgcctgctagctgtccccgtcgagtcaacctgtgaagagaggtaaattatatggctcgatgaagtaattatcataaaaatttagaaatgaacaatccgaactcacgagtggtcggcagggaggacggtcggctgcacgttgcccggaaacacctgcctaagtccgaactgtctcatcacacgctgcgggcagtgaggctcaacgaaaatgtcgaacaccatcggcaggatggtgagccagtaagcctggtcgcgtgtgcacaaggacaaaagtcctagcggtgctctcgcagcgacggcatcttctgtgtacggctcccagatgacgtcgctcggctggagacggtcaaactcgaacacgaagtccgggtaaccacgtctcacctggacgtgagcgtaacgacgctgcaataaacatgatcggaattagacatgttatgtgaagaaaaaaaaaagacgactgataaacttataacgcagcgaagttgcactaaccccacgtcgacaccagtaagtccccatcgtgggaccgtcctctggccactgcgcgctgcgaccaaccccgtagggtgcgctgtccaccactggtcgacctatggcaaacctctcggctgcccaaagctgaagcaacatagggcagccagcgatgatcgctcccgcgtcagtcttcgtgcacgcctcacagagggcacggtacgtggctgctagcacggcagaaccccagctccactgcggcacgtcctgtggctgagcatccgcgatggaccgtgcgtagtggaccagccggaagtccacagcgtgcccgtgggtgctagtgaacatcacccacccgaacaaccacaacaggtacgcctcaagggagcgtcggaccgagtaatcatcagcgtcagggtgcagaaggtccgcctacaattaagaatgaaatgttagtacaaaacactcattcggtcgcaaataagcacgtatgataataacaacttatttacttacagtgaactggagcaaccaagccttgctaggcccgactgtagagtacggaggaagggtgatggtcggtcctaggtgtggaaggcgcatcacctgctcgaagcgcgcagtgatatcctccttccacccaaaaacaccgtccacgggaccaactgctgctcccgccagcggtagcccgagcaggtacgacacgtcctgcagtgtcggagccatctccccacagggaaggtggaacgtgtgcgtctcaggtctccagcggtctacaagagcggcaaggagtgaccgatctgcatcccaccgcttcgctgggtcacggtcgtccgctgccgcctcaacaagcctacaaagtggtagaaggcctgccgcacgcaacctgtatagagcaaacttcaaacataagtacaacacagagcaaagttgagttgaaatgtgaacatacgcgtaccaaggaacgtgacgggggtcgacacgcaaccactcgcgcgacgtgcgtggacggaaggtgccgagctgtgcaccctcgactgctgacaggaacgagcggtggttcctgtcaatcccacggttcaacagcgccggtgtgtcgtacgccatacctgcatcaaataggttgatcagaaacatataaataattagttcaacataagtaataaatgttgaactaagcgaattactaacacatattaaacaagagtacaaacaaacaaaagtgtttagtccgaacactcatcacgataacattatgatacaacaccgaataattcgcaatactactagtacaacaatagtcggaggtactcattacaacaacattgaattgaaattacacgatagaagtatttagtccgaacactcattacatcacaacagcattttatttcctaaatcgaaagcattgttacaccatggaatcgcctgctgcgcgacgacgccttggccttgcgcgcctgcttgttgttccttcaccaggtggtcgcctaccatcacttgcctgtccagatggactagcatctgcgccgcttggaacttctgcattcttcgggcatttcttgtaagtatggccgcgcagatcacacttgctgcagcgtaaagtcctcccacctgcttctgactcatccatatcatttctgatgcgtctagtttggcgtcgaccctttttcacccttaacttagatggatctggaatataaaaaacttgggcactcagcgttgtgtaagatcctgagatcccgaacccatatatctcctcactccatgtatgaaagattgcttctttcctgaaataatttgagacgtacacattgggagatatgccacaatcaccggcagcagcaagaacgtgtgagcaaggaaggtgatgaagcttcggcttcatacaactgcaggtacatccaccatccgccttcaagacacattcctgcacggcttgcttgcgatagataccacgcctgctcctatcaacacacattatttcataccgatgcacttgtgtgccttgagcaacaactcgatgtctccgtgcctttttgattttatcttccatgtactttgtcactacgttgccaaacactatgttgtcatcggccatggacggaccaattttcttgtatcgatccctaaagtacgcttgcgtgccgtgaaggatgaattcaacaatagcaaccaatggaagtacccgaactcctcgcattacccagttgtacacctctgccaaattggttgtcattatgccataccgagatccatcggtgtcgaacaatagagaccacttctccttaggctcattctcaatccactgagtgaaatttctgatggacgaccctgacctccttctcattgttggtgggtcatcatgtaatgcaccaagaggtatgggaggctcgtcaccttcaactagtggtctgcgagattgctcatctgtttgcttcgttgtcaactcatccaacttgtcccacaactcattaaatttcttctcttggttctgtgcacagagcctcttaaagagctccataagatgcttgttcttgaattgcttgtagaaatttgcacccatgtgacgcatgcaccaccgactccgaacatcaggccacttagctggaagtcccttctcatcccaaccgttctgcaagtagtcaatagcccgcaacatacccgcatgacgatcatgtataaggcaaacgttgggcctcatacgcaccactgcaatgtgcactctctctaggaaccagtaccagctttcagtgttctcactctctacaaatgcaaaagccataggtagaacctggttgttcccatcacacccaattgctgtcaatatctgacctcggtatttacctgtcataaaagttccatctatgcatagaacaggtcgacaatgcacaaaagcattgatgcaagcacccaatgagaaaaaggctctttgcagcacactctttgttcgatcatcaaccgatgtaaatgtatgtaggtcatagtacgtattattattcctctgggcaatggtggctaacaaacgaggcaaattatcataagaagcttcaaatgtgccatacctcatctcaatgatcttttgtttggctctccaggcctttgcatagcttatggtgtacttgaatttgttctcgatgtgcctaataattgattttggttcaaagccaatgttaccaacaacactgctgtacatctcacttgccacaaaagctgaagtgatgtttcggtgatacttctccaccccttgtaagtagcacttgtgctcggtcacaatgctaactttccaataatcattccatttacccttatatgcatggacacgccacggacaatcttccttcatgcacctcacttcatacacataatttgttgacttgaccaccctaaactctctctgcaaggaaactgcccaatgcttcaccgcctccttcatctcatccttatgagcatatcttgcaccctcaattacctcgttctccttatactcccagggtacatgatcaccctctgatataacaagtccagagaagtcctcatttgcccaatcagtggccattacatcaccttcctcatcggatgatgcgtcgtcgtccacttcctcattatccgaatcttccctctccatttcatcaacaattataccgactctctccccctcatccgccatgcccatagcctgctcctcccttggttgattttcctcattttgcatcgatggtccaacaacatcccctgcattgataggaccctctacatcttcagtttgcattgaaacatttatatctttctcttgtaccgacacaaatataacgaggggccatgaccgttcaaaagccatttccacataccgtctctaagcatcagtgctgtccatcggcattagttcccaaaaataaccttctgttgcacgactcactacaactgacactgacattgtgtagacttcttggtctattctaaatcctctcaacaaccaactataaattgactgaaatgttctctccgcaggcctatcgatgcccttagatgtcattacaaaatctgacagatcaacaccatctggaccaaatctaatatttccttcaccgtgaactatctgaaatgtgaccttacttgacattgtgcctgatgaaaacaataactgcgttaacctcgcatttctgtactacgccctaagttacattctctacaatattgttctctaaatttctaaaattacgttacattctccagatcaaactaaactacatcttacaattaacactactgtctatgtctcaattcatactattatattctatgatatggatctacacatatgtgctgtgtgctacagatgtgctaaaatatatggaactaaaactaaaacgcaacatatatactcaaacataacatattagtacaaatgcaaaagatgtatgggagcatacctgtgatgaattgagcgaaccagcagggcttcgccgctccccttctgctgccctcccctctctctcttttgttttttttggatttttagtgaatataatgaaattttacagaggagggactgggctttatagggggagaggcaaaaatcgccctcccccaggcggcaagggggccgcctgcaaaattccatgccccctcgccgcccatttgcaggcggcccccccacagtacaaaatcgccctagcggagggcggcaagggggccgcctgcaaaattccatgccccccctcgccgccaatttgcaggcggccccccgcacagtataaaatcgccctagcggagggcggcaagggggccgcctgcaaatttcgttgacggccgtcgcccgagagcgaacggccgtctgccatgtcattttcgctgccctctgagagggcgatttttaagggcggtaggcgactccttccgtcaattttcaaaatggaaaattatttttgtaaaacttttaataaaaaaaattataaataaaaaaaattcttctctcctctctctctctctttgttttttttttgtgtgtgtgtgtggggtggggggggatccaaattccaacacagggccaagcagagtggtgtttggccaaaggccttactaaatcttggctgagttttgagatatgaaattaacaaattttggtagaggatgtgttgttaatggtgtgcttggttgatactaccttatattttatattttaatgtatgacgctgttgactttttatccaacgtttgaccattcgttttatttaaaaaaattatataattattatttattttatggtgacttgatgcatcatcaaatgttctttaagtatgacataaatttttttatatttacataaaaattttgaataaaacgaatggtcaaacgttggtcaaaaagtcaacggcgtcatacattaaaatacggagggagtaccttgttagattctgataatgctaaactttggttgagttgagagtggcaaaaaaaaagcatttgaacggcgatcccctccattccatgagggcactgaggaagaacgactcaacgaggagccgctccaatgctccattgccctgaacttcactgtgtgaaagccgaggtacacatcaatgttgatttcgtccatccaccgcgagaaggacttaactacataaaagaacgcaggcctacgaatataagccacaccggccagtacacgatatatatagtgaagtcccgtagtactatacagtagtgaagtcccgaagttttgtacgctaattggaagagtatacgctaatgcaatatataaggagctaaatttcaatttaattatcattcttatgtacttctgtaattatcctatatatactaattatctattattgagtaatatactgtttcatctgtttcatattataagactttctagtattatccacatttatatagatgttaatgaatctaaacatggtataaaatagcatggtataaaattatcaaattttgataaaattataaaattatcttattatacaaagtcttataatatgaaacggagggagtaattaacatggtataaaatagctagcattgaataatttacccggggtcatgtgaccccggtaaatagtactctctccgtttcatattacaagactttgtagcattacccacattcatatgtttagattcattaatatatatatgaatttagacaatgctaaaaaaaattttataatatgaaactgatgaagtacgtaggttcgccagtggcagcagggagtggctgtttttagcccttaggtttggagagattcagggtccaccacaaattcaataaatcaaattcacaaaataccactatcaattttccagcatctatatccatgtaagatcttggatgggacattgtgcacatgtaaccaattaaatctctattttaattgataccaaaactgattattacacgcatgcagcatgcgtgttgctcaatatatagctcctcaaggtagctaattgcaaacactaatacttgtagtagaacctaatattaataaggcttaagtatatatcatgcatgtatgcatgcatggccttgttgatacatagctaagctaggtcatctgctgtagagatggctagcagaagcagtggcagaagtgacggtcgccgcggggtttgcactcgccgccgcggcactgcgactggcaccacgagttgcaggcgtcgttctgccccgggccgcacccagtgttcccgccccacgagtggaagtccacgcagcaacgcggctgatctgccgccgctcctgcaattaattagcacagtgaaattaaacaaacataaaattcttcagaaatctagacgattattcggcaaacaggaaatgttaattgtgaaatccaagtgcaaattaataagaactctctgaacaattactacgctaagagttcttacctgacgaggcaacaaaagcaactaggacaagaagggcgatcgctgcacaagtgccaatacgagccatggtcgtcgtctctttcgcgtcgtagtttctcgactagtttctgttgctcgatctctgcgttgatcttgcttgttcttgaggtttgcacacggtatggacgtgaatttatagtcatagtatttcctccaaaatatggaattcccaggtacgtatgctatggaaatttcagatatggaatatgtacagcacttagacattttgagatgatgtgttaccatgcatgtagtataatatggatatacattgtttggaaatgaaatatatatgtgctcatgactgttgccgtgcctagcttaccttttgttcgcaagaatcgaaaagatcgactattgccttcctttgctaattgctagtattaactgccatggattaacttgatacatatagaattaaatccacgaaagttggaagaatcggaaaaggttaattgctcccgtgacaacaatttttttctcttttgttttttactagcaaaatgccgcataatgacacttttgaactatttacatgaagaaaatgagtggaaatgagctgatgcaatatccgaatcacgacacgtaaaaattttattttcttataatatgtataatgtaattgttgaatatactcatgaagaaaatacgtgaagttgaaccgacgacacatccgaatagcgacatacagaaactatatttttaatgtaattgtggaaataatctcgtgcgttgctatgtgaaaaaaagtatggagttgaagtgatgacacgtctaaatcgtggcacgtaaaaatcatagaaaccaatgtaattgtttttttctaagggagtattgttttcgatttataaatcgcatgaggacaaatatatacctaataacaccactaaaaagacacatagatgacggcactataagtgtcgaaacagttaaaaccatcacatgtacaacttttcccacctatgcggggggtggaaaaattacagaattagcacatttcaggaattataggagccgattttaaacaaaaccgacacctatattataaatattggttttttttaaaaaaaatgacaccagaaaaactaagacgagccaaacgcgtcccgtccttgtccatactcgctccccaccctacacaaaatctctctcactctcgctctctctcactctcccccgcccctcctctccctccgccccctcatgcttcgctcgccatctcctcctctccctcttgcctccctcttgcagcggatacggcggcggtagcggcatcggcgacggattttttttcctacaacttgtgagtcaatgtcaaaatttaagttttaaaattcaattttgaagtggattgtatggtattttcaatgtagtttcttgctagaattgaacttaaggagacatatataaaagtttacccataaattattttttgagtaaaatacaccaccagtccttaaagttggtgcgtggtgtcacttaggtccacgatattgtaaaatcaacattaagatccatgaacttgtttaagtgaatcattacagtccaaaacacgtctgaccaggctgaccgtcctacatggcagtccagcgtgactacatatttgcaattaggctcctccacgcccgatccacggccttcacggtgtcggagacacggttcttgccgatgaccgacatgacggtctcctgcccctgacacgttagtgtaatgattataacatgagatgaacaaatggtgaatttctcaatcattttcacacaagaggcaatggatgaaaatttgtttgattaacaaaaaaaaagtatttaaagacaatttgttataggacattgaaagattgtggttttttattgtggttttttttgttgtgagacacccgaagaacgcgtctctattcatggatacataaaaacatggtaattagttgtttgatacccgacgcattattttattattttacaaaagacaagtttgtccttgagaacaaccacagccaccacctcctcatcattgccacggccaccgccacagccatgctactccttctgctcctgctgactatcgtgctccacctttggagccaccgctgccgtcccactctcccgttattgccgccaccggaccgctagctccgcagacactcccatcatgcggtccgccgcggcacgggcaggttccgcccatctagtcttggccgcggcgccacctcgcaagtcaacctcgccatctttctctgacatgtcgctcaccgctgtgagattccttaaccgggctaggcggctcgccgtcatatgcgacgtggcatgcacgacgccgcgccgtacggctgaggcgatcgctttgatcgacactaagaacctcactgcacatctcgtgcacatctcagtaataattatcctatcctatgcatgaaatgagtcagaggcccacgatagctccaccgctagtgtctctaatatgttgtctcatggaaaattttaattttttttacaatcgatattttttatctcaaacaaatattaatgggcaagtattttaattgtttgcattttatactatttaacggtttcttttacccgtaacgaagcacgtgtattttgctagtaataataaaataaaatattacttgtctgtaaagttggtatgtgtatgtcaaaaatagtttgttttcagcgaaattcaatcttgtggttaccacaatatagagcacaatggcacttgactgtaattatctaaagtctcaagcacgtacactatgtacgaccagtaaaaatatctagacagtcgctccctcttttttcctctctcttcccgtctttctccgcctctctccgtcctcactttctctgtttattcctctccctcaacgttgccggccgatccaccacatcgtcgacggcctatccacaacatcgtcgccggccttctttttccctcgagttgccggccagatccacgatgccatcaccacggaggtcctcctagagggcgaagacgtggaggcggcggtggtattcggaggcgagcagcttgaggcggagagagtggtcggagacggggaggccgagcgagccacggatggattcgcatcgctcgccatctccttctctccatctcgcctccctcccgcggtagatccggcatcgatggcggcgtcggcggcggccgcgggtggatctggcagcggtggcagcggatgaggacggatccggcggcggctccctctgccccctctcgcctccctcccaagcggatctgacgacggggacggcgaccgcgtgtggatctggcggcagcggcgccggctgagagtggatcgggtggcagcagctcctcccgcggcggattcgagggcagcggctcctctcacagttatccgatggctgctgctccccctacccggagtggcggccggcggctgcttccctccttgtgtgttggcagtaactccccgcccccctggctgcccctcacctccccgacgtggagccgacggtggttcgatttttgatttgtgaatattttgaggattttgtttttttgatttgtgaatattttgaggattttgtgatttggaatgttgatatagtaaccacagtacgacggcggtttgatttgggatgttgattttgtggagattttttattttgatttgggattgcaattgagtaattttgtgattcatgtattttgggaattgggggcaatgggattgggagcaatcgactcgattagccgattgatagagtcggcttcttttattttcactccaatgccgattgattaaatttgtttttttatttttttcggcttctttcgagtccgctcaggaattttttttttcaagacggtctcggattcaaacacggacgacagacgaaaaaaatcgatcggaagtattaggtgacgaccggaaaaatccaaatatttatattagttatagatatcgatatcatggacattttttaccttttatatataccacctcacaagtactagtatttccaatccccctttacaacttaatttctatatatatatatatatatatatatatatatatatatatatatatatatatatatatatatatatatatatatatatatatatagaaaaatacatatatagggtcctaatcgagctcatttcttataccatatactatgtttattttgttgcatagatgtttgctcataaagacaatggggcagcttgttcaaggaaagaagtgtgcattcacgctactagagagcgcatacagggtttggaggagaggctcctcctgccctctcggagggcacttttttaattaatataaaaaagctgtgcgccctcttataagagaagtggctgaaagcaaattttcccgcatagcttgtcacctctatattttcacaattttcaaatatatagggcatgcttggtacatctccaactcctaaatttagctccaggaattgggtttggagtggagttgtggagctgcctaaacccaactccacaactctagtacattttgtgagaggactccacccagctccactcccagttttggtggagctgaaactgtttggctgagctctagctccaaggggggtggagctagctggagctggagctgtgccaaacagacccataatatgaaatcggatgaaatcaaacttatatcaaaactatagagctcgacgagacatacaattttttttatttaagatcatttaggggtttcaaacattcgttacaaaatcttaaatctatttttacaaaatattatatctacatttcaaagtcctccgatggagataaactctattttaaagttgtagagttcaataagatcgataacttgtagtctatgactttttttatttaaaattatttagaatgccaaataagattataaattttcatagcaatacaaatcagcatgaagacattatttgaaatgacgtcaagggagaaggcggttttgtaggctggaggatgggatttgctttagcccgttgggctttttggattactaatcgctagagggataagaacaaatctagatcctgttggggcggcccatgaaaatgtggttgtacccgtcaattgtgtcaagctaccaaccggggccaaatattctctcgtctcgaaaaaaccaatcattttctatttttcctttcccctgcagaacactgttgccaccatcgttgcttcgagcttccgaccctatcaccccgaccacatcctcctcccctcccagccattgttgtgcttcactattcccgacctgcgccaatgccttcatgtgctttctaaacattggtgtaccaagttttgctaccagctctcttctcctttgacaccttcatgcgctttgtgtgtgtttcacaacagaggtgggaaagagaaggataccaatgatgccacatgtccatatcaatattgggcatgttcagctgctaggtataactagaacagtcccgtctgtagcctttgccggattcctaggatcaaaggtcggaggatagttattgacttgctatagatgaggtcagatggcattctgttaccgaatttttatttataataattaataaaaaataaattataggaataagtttgatttttttaacagggggagtataccacaggttcacagtaacaagtgctccagacggtggtgagacattaaaaaatcacacagtttgccagttagcagatgactacaaaacggacaaggatccgactctagtgaaactaaagttctatcaaacagctttatcacgtcacaaaattattctccataaatctatctagtagtagtatacagtctaattttatgtactatgcgatcgaaacaatccagtaactccactgaagcagtattaggacataccaattctataaagaaaagagtaaactttgttgatggcctataaacttggatctaggtgccacttagttacattattttgtaaattgttcatctagatcagtgatcttgtttgatttaccactcgaggtccaatggcgatcccaacagggggggggggggggaggtgggcttgagcccctcctactattggctagacccactatacatgctcttcaattcttcatatatacgtactctctccatttcatgttgtaagatgtttttgactttggtcaaagttaaactatctcaaatttgactaagtttatagacaaatatagtaatatttataatactaaattagtttcatcaaatcaataattaaatatattttcataataaatttatcttggattgaaaatgttagtatttttttcctgtaaactttatcaaaattaaagcagtttgactttgataaagtcaaaaccgtcttataacctgaaacagagataatataacttttaaacttgtcttatatttattctatgttatttcattagcacctcctaaaatttagtcttgcgttcgtcactgtcgagttccaaagcgtatgtgaaagattacgatctagatgagtcatttataagattataaacattagtgacaccgtgatccaaatttaaggatcgatgatgtattttactcaaaagaaaaatataaggaaatagcacgcttgcagcagttatttatgttacctttcccgcctccttttcgcttcttttatcctcaataattaccagtactagccctacacttccactggcgatctccctggcaatggccctactacctccctgttccctgaaactttacagaatgtatctatgcatgacagataagctaactattgttccttcacctgtcaaaactaaacatatttaattatctctgctgccaaactagtgctacaaattacaaatccaatttcggttggtgaacagaaaggagaaatgtaggggaaaaaaaagaagcaaaaaatgatttttattactgcgatgcactccagctgttggaagagatgtgcggcccaccaagtcgcctccattcccattggaagtttggaactggccgtgcagctctttgcattatattgcaacgtgcactgtgcacataatgaaatggccggtttagttgaaatgtatgatttgatctattaataaatcgatttaactaattaatttattggcaggcactggcctaccaaacctctgcaaattgccaattcctcctaccaattcttctgtttatatactgagaaagtgccaagtttttgtctgcttcatgtaacctatggatttcgctgtccaaaaccattgaaatttattcatggaattggccataagattatttttctctgtatcttttttctcccttgttaatgatcttttgaggtgacatgtcattgttacatggtaaagtgaagaacagaagagaagaggaaggcagtgcagctgtgcaggagaagggaaagtagctaagcaagtaaggctggcagatgccatgccagctgcaagctaggcgatcgatcaagagatcgcgtcatcatctctgatcaatctcacactgtggtaagctaagtttgatcgttgtcattcgaatcactcatgattcgtttcgtgtttgtttgaatttgttgcatcgattccatctccaagatcttcacatgcatcttgttgtagaacaagagtagaaagaaacctcatcaaggtcaaggtcaagctcggacgactcctctccatggatggagatcggagtaggaggagtgccgccgcgatcacgcggccgccgtcgcacggcggcccggcgtggcggcggatgatcgcctggattcaactactcagtgagtgatctctccaccttcttgctcgcgcggcgatccatccatggatcctagctgcagaaaatccgagctcactctgacttctctcgatcgatcgctggatgtgtcgcagaggtgttcgtccagaggtacggggaggtggcgaggtggcgcacggcgttcctcctcttcctggcgctcctggcggagcggggcctgcgccgcgcctacctgtcgtggaaggagtcgcggctgcggccgcgcgccgccgccgccgtcaccctgcaggccgcgttccgggggatggccgcccgccgcgagctctccctccggcgcagggccgcacgagccgcagccgccgcgctcatccaggcgcggtggcgcgcgcgcgcggcggcgcgggagcacgcggcggccgtgatctgccagtgcgcctggaggcgccgcgccgcgcggcggcggctcgcgaggctccggatcgagcaggagagggcggcggaggcgtgcaggctcagggagatggtggacgtgctccagcaggcggtggaggacgcggaggtgcgggtgatcgccgagcgggaggcggccaagaaggccatcgccgaggcgccgccggtgatcaaggagatcgtcgtgcaggtcgtggacaccgacaaggtggactcgctcgccgccgaagtcgcccgcctcaaggtgacaccatcgatgcctctaaatgtgcaatttattcatgtgatccatgaacaaaattcagatcaaagaaatcggtctgattcatatgatccatgaacaaattcagattaaagaaagtggtctgattcatgtgatccatgaacaaattcagctgaaagaaagatgcagtgaccaaccaaaccagatgctacattttgacatttcgagttgcaggatttgctgggagcagagatgaaggcgacgtttgacgcgaagaaggcggtcgccgaagccgagctgaggaacgagaagctggctaggttgctcggtgtcgaggaggtgaagaacaggcagctgcaagaatccctgaaaaggttcagtatttcagaattcagacttgttagctctgaatctctgatgtgcctgcacaattaatgtgtgatcccagtatgcgagttcatgggagaactcatagtgttttgcatggatttttatttatttttacttaggatggagatgaaggcatctgatcttgaggaagaaaaccagaagcttcgaggagctgtcgcgtcagtcccttatgtcaggttgccgtcaaacgtaaaccgtgatgatcctgatcttgaggtacctgaaatcacattgatgaatttcgacgcacaattttgatgctcagcgtgctcaatcatgtgcatcttaacagccaactccagagaatgaggatgagaatgagaatgagaaagcagtttattgtgaggtgaagccaatgatagtggatagaggggttgacatccatgtaagtataatcatcaaattatatttgatcagtatattcgtagaatgagttcctgatttaacaacatttaatttcaatctaggagaacaattctcaactgcctggcctgaatgatcctgaagctgagaagcagcagcaggtatgatgcttagtaattcggaacttctgtttgtgtttcaagcagtatcacaatttcgttcaggtgtcacgccttaaacatttttttctgaatatccaggagctgttgatcaagtgcatatctgaagatcttgggttctctattggaaggcctattgccgcatacctcatctaccgatgcctgatccactggaaatcatttgaagaggacaggacaacagtttttgatcgcattattcagaagataagtgctgcaattgaggtatgtggcagtggtatgcacatatctgcaactattattcataagaagatatatgcatcaattgtttgttttctcttgcaaggctcgagacaacaatgagacattagcatattggctatccaattcatgcacactgctgctgcttctccaaaaaacactgaaaatcaacggggcagctgctttggctcgtcagaggcgaagagcatcacccctgaagacgccacaggtaatgtaccgaaaaataaactctgtatgctcaacaacctaagtgattttgtaagtgagtttgggattctggactcaatattagttgcaaaaattccaggaaaatcaagcacctaatcatcctgaccgtagtccagttcctgatggacggttagtcggtggactaggtgaagtttgccaggttgaagccaagtatccagctcttgctttcaagcagcagctcactgcattgctggagaaggtctatggaattatcaggcacaatttgaagaaggaactgtccccactgcttggtctctgtattcaggtagcattgtgctttctgcatatctttctttcagtttcaaaagtatatttgctgaaagttaagaatgacggatataattttctctaggcaccaagaacatttgttgtaagccccagagggtcaggcgctcaaggaacagacttggcacagcaagcttctatggcacattggcagagcatcatcaaaattcttacaaattcgctgaatgtcctaaaatccaattatgtaagataaaaaaaattaaattggcagtagatacaattttaattcaagtatacacgccatctaaacctctttacattgcaggtgcctcccttcctaatctgcaagctgttcacccaactattttcattcatcaatgttcaactcttcaacaggtacacatgcatactaacgattcacttctccatatttctcaaactagcaccatgaactcatatgacaaatttttatcacttcaatggtagtcttctgctacggcgtgaatgctgttcattcagtaatggagagtatgttaaagctgggttggatgagctagagcactggtgcttttggctgactgaagaggttaaaaacttaaaaaagtctttacgttgtctgaacaagtctttcaggaagcagtctcta

SEQ ID NO: 2014 - DNA, 1420 bp, Oryza sativa
ctaactaaaaggtttgtgattgaatattaatatattttttctatttctgcaggtgaagtattatgtgataatgtgttgataaattgataaatcattggcagggtcttagacgagagtgatcctgacatacaatcaaaagcattggattgccttttaaactggaaggatgaatttctgacaccatacagtaaaagtctcaagaatttaattgactcaaaaactctacgtgaagagctcactacatgggcagtttcatatgattccttgtctatccagaaagaccacagaagtagtgttgttcctttggttatccgtgtattgacacctaaattaaagaaatttaagttgcttggttctcgaaaggtccgtatttacttagctaattgtttatgtaccacaatggttaaaatggatatttgttttttaactggcacaaactaacacctgtatatcgtgctttgttgtgccagcacacaggggttagccatcgaaaggcaattctccgattccttatgcaatttgattcaaatgagcttcagctctttttctcgttacttctgaagtccttgatccctgggaaccttcgacttgaaatatttgggtctcagtctgacaacctgcttggaaatatttctgacattgtggaagcttcaacagagatctgtttagagaacctaacatggaaaaaagcaaatggttttcttcatttggttgaagaaatctttggtacttttggtatggcacttataagtccagttcttgatgttctattgctcattgttgttcgcttgcttgagagttgcatgcggaatctcagaagtatgaatgaagaggactatcctagcaagcaatcaaatgaccctgatgacgaatgttctatgactctggaagctggtaattctatgagcctgaaagaacactcaaaagatctgccctcagcagaccataacaaggtgtgtaaatacttgtgtgttgcaacggatttcaaataaacatcaaattttctaaacttagaacttgtatggccacagatatccttttagtatgatggatatcaagaaataactcatatgatttgcaaccaaacattaatctgcaaacaactctacagaggttgtggttgagcgatggccgatggcagactcaccattaatagaactactttttaagttagcccaactatagtgattatgtatcgtgattcatgcaactagtccaaactagttaagtctattgtagttcattttttcttgtgcttgatatcaacaaaacgtctcctatcgggtatgataatatatccacgtcgccaatcttaaacaacagtgacaggtatcggcttggatccgtaggcatgaaggtgcttgaaactgctgtcctatatgccttggaaaaagcatggtgctctgactgttcccacttc

SEQ ID NO: 2015 - DNA, 708 bp, Oryza sativa
aggttttgaataatttagaacaaccaatcaaacaaatatgctgttcattgttgaattctgtttgtgtcaccttctatcatatgttctatgaaatttcagttttgttgggaggctatttcgtcatgcacttgaagaatcaaggcccaaatccgttctagttcattcattgtcagtgtgcatatctctgttggatccaaaaagattggcatcagcttcctatcaagcatttagaagcaacttaagtcacggggcgttggtcactgccagtccagagactgttgatggcatgcttgagagcctaggtgagttctggatatgtctttgtgcttttttttgttaggaaaaaatcttctttggttcatctatactcgaccttatcatatgttccatttctagggtatcttgctacctgccctttgcaatgttaagtttttgtatattggttataactgaccatttttgtaggcaatttgctgaagttattggatacttctgatgctgaaaatgttttgcctacgacatatggatgtttacgcccaccccttggaaaacatcgtttgaaggtactggatgatgcaatgctcatttacaaattacaactgaccatttatccatttctgcattcaatgattatttcttgttctgtacaaagtcatttgcttaatggatggatctatgcatttaataaacatatttaaattgcctaga

SEQ ID NO: 2016 - DNA, 5400 bp, Oryza sativa
ggccggctgggggggcctcgccggcaccgttgacacctttcggctagccggcgaggccgggcggcggcgcgttggggtggcggcgcgtgaggaattgggagaggagagaggatttttagggtttggttgcctgcacgaattttaaagcaatcgggtggtccaaaatttgcaagatttatgagggggttttctgtcaaatgatctataaacagtccctattaaaaaaatagaggagcatttgtaagaattttgttgaaaaaaaaaacattgtatctatctttgcaacatatgagtacacaagtgtggaattaatggttctcatatagtcatgcatgtatgttaggatctgtccccacgggcatgatatgcttagggagcgttcttttcctcatagagattgtcacaacatattttttaaactgctaaacaatattatttgtattaaaaaaactttctgcaccaacattctcataactcttttaaaccgacttttcaaccttttaatatttaattgttttatttgtgcacatgaataatcgtcataaactaagaaacacatgaataaagcaatatgactgctaggagtagcatttacacaattacacaacacaactttcaattgttttttaaaaataaaacttagaggaaccatgaccttgagtccttccaactcgctagaaaaatgaaccccttaaaaaacttttcgcatatataattcaaactttgtatggaaaaaaattttctgcttaacactcgagaagtttatgattgacccatgaattatttccccgtgtttgaaatatatagctgaacaaaccagctagatgcactcatattcggaagaatagtcaagtgtggtgcagtgccccccaacagaaagattaggacatgaaagtggcttgcactccattatctcgatcaagctagcttggccccatctagagcatgattcaagtggaaaagaactaggaaaaaggtggaaggattagattaagggtgccatacaaaaaaccattactagcactaatcaaatttttaatttttgaaagctataccatattgcacatccaaccacatccaccaaaacagtggtggcagagtacacattgttttttaagggaagcatcgcaagtggattattgctactcattttgtaccccttttgagttaattattgctggtgatgagatgatgttttgtgaggttgttgatgatgacacaatataatgtgccatttccatcggtgtctttgatggctggtgcacaaccacacgaggcccagtttaaactaagcacaaccggccacatttaaaccaaactaaaattgaaccacactaccaaacaccgatcgaatcatcgaatcaaatcattatttgacagctaccctgcattgtacgtgtacgtacttgggtatcagcaagcaaatcagataagtatatatccatactaccgtacatagatgtgtactactccctccgtttcaaaatatttgacaccgttgactttttagtatatgtttgaccattcgtcttattcaaaaaatttaagtaattatttattcttttcatatcatttgattcattgttaaatatactttcatgtacacatatagttttacatatttcacaatttttgtttgaataagacgaacggtcaaacatgtactaaaaagccaacaatgtcaaacattttgaaacggagagagtactagtttgtactccctccgtcccaaaaaaactcaattcttaggtttccgtgcctaacgtttgaccgttcgtcttatttgaaaaagttatgaaaaaaattaaaaagataagttatgcataaagtattattaatgtttttatcatatgacaataatgaaaatactaatcataaaaaaaattcatataagacggacggttaaacgttgaacaccaaaacctagaaattgagtctttctgggacggagagagtacatacatgtacaacgaagatgattaaaaaaaagaaaaaaaaagtaaagctctattactttttgttggtatattacaaagtacaaacacaaaaatgtccaaacatatgtagtaattcacatcaagttaatcccctaatgcaatatcaagagagctttttggccattttaaaacaagcacaaaatgctccctctctctctctctctctctctctaccactctgttcaatggagtaattatatctctcccttttcacacactctagctgcattgatcctctccaatagcgatcaataactcaactgttgattctcctaattacccaagaatggagaataaatccgatgggtatataacccaaaaacaaaaacgaaattgaaatgtatttttttttgtttttccccatttttttcttttttttctctttttttttcagggtcagtgccacacctcacgtcgctaccttagtagttagaagccgacggcgacggcggttgcggtcgccggcgtctccggcaaggagatgatatcctcttcgtcgtcgtcgtcgaagagggagccgatgaccatgaactctccctcctcctcggccacggccatggccgacgatgagtcgtcttggatctgcctctgccacttctcgcggtacgagttgatcttctccagcgtaagccccgcgcggaatcgctcgatgaacttgtcggccttcgcgttcacgtcggggctcgcgcagtacgccggcgccggcgacgccgtgacggaaggaggcgcctcctcttccccctccgacattggcggcggcggaggaggaggcggcggtggcagcggcggcgacggcggcgggagcgggtaggtgtagtagacgacagcgcgcctgggataaaacggcggctgctgctgcggcggaggcggtggaggaggagcggggcgggacggtggctgtggcggtttcctggatcggcgcgtggtgggcggaggtggcggaggcggctgcggcggcgcgacggagtggatgcggcggctcttgctgccgcctttcttgaagaggttgtagaagatggatgatggaggcggcgggggagggggcggcggccgccgcggcggcgccggagcggggttggtggtgcggactgtggagtcagggctcgccgaggcgtcggacgacggcgacgagtagtggccatcggagaggtgatggtggtggtggtggttgtggtgatgcttcttcttgctcttgatgccaatgctcttgcgcttcttctggtagaacgtagcaatggcggaggcgaggtccttggcgccgcccacgctcccgctccgcttcttcttgctccgcggcgccgtcgccggaggcagaggaggaggcggcggcggcgttcccggcgggaacatggccggcgatgacgatgggagggggtacttgatctcctccacgactatctctgcctccaactcctctgtccttggcaggctctcgacgctgcggctgcgccgtcgtggccgagcaggtggtggcggcgtcgctgccggcgccacctcttccaccctcatctcctccagcaccgcgtccagcctctccgagttccacctcctgctcctcgtcagcgtcggcggcggcatcaacgtgtcctgctgctgctccagcgccgcgtccagcatctcgggattccatgtcctgctcctcgccagcgtctgcgtcggcatcaccgtctcctcctccacccgcgccacctgatccagcaccgcgtccaggtccagcctctcggagttccacctcctgcttctcgtcagcggcggcggcatcgccgtctcatccacccgcgccacctgatcgagcaccgcgtctagcctctcggagttccaccttctgctcctcgtcagcggcggcggcggcggcggcatcgtcgtctcctccacccgtgactcctgctccagcaccacctccaacatctcgggattccacctcctgctcctcgccagcggcggcggcgtcggcgtcaccgtctccaccggttgttgcggctgcgggtgtggtctctcctcctcggcgatctcggccatgctcgggagcctctcgatgctgccccgccgccgccgccgctcttccttgggcgggagcgatttccggcgcacctcgtaggtgtccacagggatcgtcttcacctccggcgtcgtcgttgttcgcttttgcggcgcgtccacgtcccagctccgctcaggccgccgcgtccggtaaagctcggcgtcgtcgtagaaccgccacgccgcctccggcgacgtgaggccccagacgccgtcgctgtcgagccgcagctccgggtacgagctgctgctcttcaaccgtcggatccccgtgctcccgtagtggttgttgccgccgtagctcgccgccgccgacgtgttcagactcgcccacacctcggcggtcgacggctcctcccccacagcctcggcagccggcgccgccgccaaggacggcgagacctgatgctctctcctgccaccctcggacgccgcccccgccgccgccgcggtagaagccgagccggaagaggactccccgtcgccggcgcggccaagcaggccgcacaggatggcgaacgccacgaggaagaggttgacgacgtcccagccgctcttgaggctaatcccccctcctcgtcctcgctggtaccctccccctcctcctcctcctcctcctccccctccccatggcccgcctcgccgcaccgccgacggcaagagcatgagcacgatcagcgagaagagcagcacgagcacccacaccttcgccccgccggcgccaccattctcctcgccgtcaatgctcatgtacgacgtcgtggcgccactagcaccagggcccgcccccgcgccatcgccgctcctcgccctcgcgtcgccgtccatcgccgccgccgccgccgcgcgccagccaccttcctccctccctagctcgactcgattcctcagcacacgcacgccgcgacgcgaatccgaaaccaaaagcggggagcagctagaggttagtggcgagctttttggatctctctctccttctctcgcttcgctttggctttttgattgatcttttcgtggaattcttgccctcttctgttctctctctttctgactcgttggtggagtggtggttatataccacgcgaggtgaggtgaggtttgcttcgagtgaaggcaggttgggggggtttgaatttaatttttttttgggagggttatattacgcgacacgaaatgatttggttggaagaaagacaggagggagcgtacgtttgtttatttatttatttatttatttatggttaaggaggggaatgattagtcgttgtaatgcgttggactaggcgagtgaaaatgtttgattattattaagttagtagtaggagtagattattggctaattacgcggttttctgtgtccaag

SEQ ID NO: 2017 - DNA, 12085 bp, Oryza sativa
  unsure (1)..(12085): unsure at all n locations
ttcttttagatgtcttgccttgttgattaaacttcctttgccatctctcaaggacaatgcaaatctgatcaagaatgtacttatggacattgcacagagagctgggaattccaatggtcatttggtcacatcttgtttgaaactgcttgctgatctacttaggggtttcaggatttcactttcagatgatcagctccagattattgttcatttccctatttttgttgatctccagacaaacccttcacccgttgccttgtcgcttttgaaggcaatagtcaaaagaaaattggtttcccctgagatttatgatattgtagttaggataggagaattgatggtaacaactcaaactgaatctatacgccagcaatgcatccagattctgctgcaattttttctaaattatccactctctgagaagcgtttacagcaacatattgattttttcctgacaaatctaaggtaagaatatccgtagctacttacctttggtattgcctttgtgcgttgtaagctaaccttatgcaaatttgcagttatgagcatccatcaggaagagaagctgtgcttgagatgctccacaatattcttaccagatttccccagaggatagttgatgaccagggtcaaacatttttcctccatcttgtagttgccttatcaaatgaacagcaccagaatgtgtcttctatgatccttagggcaatccaaaagttgttggggcgcatcggtgatcagggaaagaattctatatttgaatatactctttcatggtacacaggtgaaaaacagaatctgtggagtgcttcagcgcaggttaatatcagaactactttattttcccaagcactacattgcacgatttagtgcgggcagttgcaaattgtgccctggatttgctttcacattttgggagagcattgaagcatttccctcatattattttattgcatttatacaatcttcgtttcatgaactgagaaataatccttgtaaaaaaattttcaggtcattggtttacttgtaggggatcgttcgttgggaattggcaaacaccttaacaacattttggctaacgctaagcaaataatggaatgttctgtcattgcttctggaggacaagtagatttagctgatgaaacttgcctgccattttggaaggaatcgtaccactccattgccatgatggagaggttacttgcacgatttccagagttgtacttcaagcaaaatatggaggtatgattacttgtgagctgtatttttaaactgttttacaagaataaattctggcatgattttctctgatagtttgatgcaatgctattctccattaattgcatgctgagaaccatcatagtacatagatgactcttgatatgcatctgttagccttctattcaagtgcacttggatatggtcattgcttcactagtgttccctttgaactagctctgtataacattcagattatgttatttaaatctagatgatgactagcctttgtgtttgtgccttattattactgtatttccgtagttacgtcttttttgtcccatttaatgatacttagtattttttattttgatacttctgatttgcgagaagtggttgttaacagtatgtgtttgagacctgcaacttccttttggttgtgcaatcaagtttgtgacccaattctacctgcaggaaatttggatgatagtttgcaagttgctgatccatccccattcaatgttgcgtaatatatccagctctcttgtggcctcatatttctcttttgtagagaagagtaagcgtgaaaagaaatttgatggcaagtcctcactgcttatccaaccaagcatgctattcctaatagctgtttcgttgatgaaacaattgagagcagaactaagtgatactacagcgaacaatctaattgtacaaaatctttcgtattctgtctgtaacttgcatacattggttaagcaaacaacctcgccacaccagttttggtctagccttagttcttctgatcacagtgcattccttgagggttttgaattgtttggttcaacaaaagcaaagaacgcatttctcatctgcacttctgcatctactgatgtaaatggatctaaccttgatggaggtgaagagcttacatctttgttagtttcttcgctcctgaagaggatgggaaagattgcaatgcagatgcaggatacgcaggtaagcagcatctctcaacatgaatattattctcagattgaacttatactttgcatacaatacttagagttgtactttcactatgcatgtgcagatgaagattgtattcaattgcttcagcatgatttcatcagcgcttggtgctgaagtatcactatcctatgctaacctcttcttgggccccttatataaagtttgtgaaggatttgctgggaaagtcatcagtggtatgatctctgtcttcattattccaaactgggaaagcttcaaaattgttgggattctttgttaagtccttgtagttgtatttatgtcattaaacttatccgaagctatttttattatcagatgatgtcaagcaattagcagacagtgtccgcgacaagttgtgtgacctgattggcaccgagaaatttgtagaggtttacaacagtgtcaggaagggcctcaaacagaagagggagagcagaaagcagtcagagaagcttatcgcggccgtggacccggcgcgccatgccaagaggaagctgcgcatcgctgccaagcaccgggagcacaagagacggaagataatgaccatgaaaatggggaggtggttgaggtaattttggtatcatgtgctatgtagaatcaatttgtacagcgctcatttccgcactgcaagttcttcgcgtagaaggcctgcacgaaattttggcatctctgcagaattttcccatagtccaatgtgttggtagatctgcttaatgtaaacttcgctctcacagcagagtgaactactagtagacagacatacaccaccatatgacaaaggaaagagttgcttattagacgtgtatactgttaggtacagacgtgctcgtgttttttgaccttagtctatagtacaagcgcattgagatacggagatcatatctcgtctcttctttattgttttttggggtgtaactctatttatgcggagaacaaagctgacgctaacgcgaaccagatttatgtttttatttacggatccggatcagctgcagtcatattattgactaagcaattgttttacagtgatgatgatgacctgtcagtacttctaatggaaagtgcagccagattaatgccatccaatatatttcttttgaaatgattctcctcttgaacagtcttctcattcaaaatgctacctgcaagaacacatagcaccaatctcatgtggtgtttgaatctcctaaagataaagataaagtttaagtgtttcacgtaaaataaggtgataataacgtgtgattaattgagttttaattattacaaatttgagaaatggattaatctgatattttagaacaactttcatatagaaagtttttgcacaaaacacaccgtttagcagtttgaaaagcgtgcatcaaaaagtttatccaacttttgttggagaaaagaacagagccgtatggtaataatactacgtgcacctgtttagtgggaaagccagtctaatcggtttattggcaatgagccgatgatagcacatgtacctatcaactgaagaaagccattccaaaaacacctacggattaaattatgaaaaagaaaacgacttttctccatcgaactatttcgctagagcaacccattaaactatttttgacttatttttgcaccctaaactcctaaaaaaaattccaacttcttaacggttttttctcaatataagttgtattttgcactaaaacttgatatgtgatatgtgcactataactatggacttttttttaaaaaaaaagaactatttatgtaagttagaagcacctgcgactgatttaagcatccatattttaaagtttcatgcaaatagtcacgaaaaaaataaaatatttttaaactttgatagcgttgtcatctgtgtctaaaaatttccagcttacagtacaactcgtataaaagaaacaaaaactaataaatgctattaagaagaaaagtgaattgtttttaacattcgctttgatcgtttagggctgaatgtagcagttgcactgctgcagccagcaatactgatcagcgccattcttgaagctaaaatgaaaaggcaaaaacagtttcacggtttaaaattgttcaaaggagtaaaatagactctttccactaagaattgcctccaaattaactcaatggtgcgaagtgagcttaactcgtctatgatgacttcatcaatctcaagatatgctaggttcaaattctagatttaatacggtgtttgtatttatgactaattattttttcagtggtggacgacgtaaccgtcgacggtgggacgtccgtattaacttcatcaatttcaagatgtgttggcgtagtccggaggtactcatagtgataagatgtgtgcgcgtatattcatagagggaagagtgtgtccatgttgtaaacgcctacatttatactatgttgttttttataaaagaaaaagattaactcactgctaagtttggggggagcacatcgatcaacatctccggtcgtggccggtctccagccgagacgacccttccatacgtacgtacgttgattagttgaagccagccagccagccaagattattgtcgctgtctgcccactgctctgccttaccacccccggccccgcgccgtgccaccgggctcacgtcgctgtgctagctacacctaccagctggccggccccgccgttgccacgcgacacactgtcgttccctgcccgtccggccggcaaacgccctcgcagaattctgatagtaatacaagtataaaacagagcattggaaaatacagaaaaaacacaggaataactgtttgattggaccacagaaaaaacacagaaatcggatgagagagatagactcaaaggaatttttccaagaggttgtacctcttgctaacttttctctaaaatctctatagtattagccattccatgggaattttaaaagatagtataggattcaatccttagtttcaaaggctttaatggaatttcttccatagaattaaaatcctttaaattttctacacttttccaacaaatcaaagggtgcctaagccacccccgtctctacgtccgccgtcaaagtcgccccgccggtccacgccgacgaccgccaacttctacacacaccgcagctgcgcagcatgagggtatagctagcttgtcagatcttgtttggtccgtcgtccatatacgcttgtgtgctctaatgtacttgcccgactcctactttttcgttctacgtacgcacgttttctaaatagtttacgcattacgttttatgtaaaaatatttttatataaaagatctgattttgaaaaccatattaatccagtttttaagttttttaatactttattaaccatacgtcaatccgtcacactgttatatatgtgtgcttgagagctaaggtccgaaccatcacgatacacaggaccggcccttagctagggaaaactattttaaactctcgaggagatatttacttgttgtttctatgtcattaaaatagttataaaagaactgaaaaaaattgaaagatgaattaatatgtgatatatcattccacaagtatgcaacttaaattcaacttaaaatttgttttttcctgtgacatatagaagttgaattttcagttgcataattatgcagtgatatatcatatactatatcttaatacatttttctctcttttttttaattttttcataactatttgtgtgacgtactccctccgtccaaaaaaagacaaaccctgagttttcgtgtccaacgtttgattgttcgttttatatgaaattttttataattagtattttcattgttgttagataataaaacatgattaatactttatgcgtgacttgtctttttaattttttttcatagtttttataaaagagtttgtcttttttttttgggacggagggagtataagcaactagggaaacgttccgttgagtttaaaatccattctcctaagctagcatggatcgatgaggaccccacagcttttttaaaaaatatctctatggaccttatttttatgtataaataaaaataaataaatgacaccacttaaatacatagtagtaattgatttaaatttctggctccgtctggacaggagccgggccacttgtactgcacagttctggacttctggtttagcagagactcgccgcgcgcgcgcgggtggccgtcgcgttgccggccgtagctgtcgcatatccgggatcgagacgtgcgtgtatgtgctactgctgcatgcggcgatgtttcctgccgcgattttccaggcaaagtccccccgcgcacacccacactggcacatgtactacgtcgccgtcggtttgaacgcggccgtggtcaccgcacgcgcgcgtgcagcatgtcgccatgcattcacagctactagctactatacagtatacacacacaattccggttgataaagcgctctgcgtgagctgagctgagctaggcgtcgcgcgcgatgtcgtcgctgtacccgtctctcctctcgctgagcgagagccccgccgagtaccggcaggtcggcggtggccgctacgcgggggaggacgtcgtcgacgacgacgacgacatggctgccgtcgccgacgctgtgtccagctacctctccttcgacatggacgacgtcgagtattacacgccggaggtgggcttccactcaaagcagcacaacccgccgccagttgctgcggcgccactggaagccggaggaggcagggagcaaagccggcgggaagccgccgtcaatcttggcaagatggacaggtcagtcctatgaattctctgacaaaacaagtctcccttggttagctcgatcgtgatgcagttttagacgagtccagcttttgacacggctgccttctttgcaggggaccggcgccggtgagcggcggcgcggcgactggcggcgtgccgaggagcaagaacggcagcaagatcgcgttcaagacgaggtcggaggtggacgtgctggacgacggctaccggtggaggaagtacggcaagaagatggtcaagaacagccccaacccaaggtaattagttaacccatccatccatccttccatcgctcgccggagagcacatctcgccgccgccacgccatggttggttgatcggcgtccgtacgtgcaggaactactaccggtgctcgagcgaggggtgccgcgtgaagaagcgggtggagcgcgcccgggacgacgcgcgcttcgtcgtcaccacctacgacggcgtccacaaccacccggcgccgctgcacctcaggccgcagctgccgccgcccggcggctactcgatcgccggggcaccggccgtggtggcgccgcacggccgcctcgggctggaggaggccgaggtgatcgctctcttcaggggcaccaccgccacctcgctgctgcttccttgaccggccagtccgacgcggcggcgccggcggcgacaactgactagctagtgtgagtcctgggccgtacaggaatggacaattagtttgtctccgatcgaggaccaaggcgacctgaatcaaaattacggcccatcgatatatagtaggtcgtttaattcatcgaaattagacgaatttcatgtacaattattgcattacagtattatttgaaacagtattgtatatatttgctatacaatttgatggatcgtatgtctttagcagttgtaagtatattaatctatagatctagtagttcagccatgataaacctttaattatttgtctagaaacaacagccatgatagacgctatgggtcataccattttttaattagtgagataggagatttaattacctcattcgttgcatggagtaaaagagaactttccttagctcttatgattgagtcaacagcatgcacatatttgatccttagaacaaaatttcgacaatcataaacacggatgatagaacggtcggttgatcttttatgctagatgaaaccttatgtgttgctgtacaaatattatatgataacggtaacaataaagtataagatatatttgagttccgctatacgtacgacgtaactttatatactttgtacaatttgcatctttaatcgatattcgtaaaatgctatgaataattaaaacagtgtggtttatgataacttagattatatatattgcttatcgaaaggaaaaaactaacatgatgtggctttacatagaagaaaaataaaataaacatttttttgcggggataaaataaacatttttgaccatagaataatcatccaaggcctaaaaacaattaatgtggtgtggcttaacgagagaaataacattaattatacttagcccctattttttctgattaagatatagattcaccttggtttatgctggcacgcgttttaaactattaaacagtgtaattgttcaaaactttctatatagaaattgttttaaaatataaaataaatccttttttaagttttaaataattaaactcaattaatcatgcacagatggctttcttgttttgtgtgtctatacttaatattcatcttgggtggatgcgaaagagaccttagtatgaatgaactatatagctacatagaatgtggaataacacatagccatccaatcgagactcaatggcttaggtcatgtgctacaacaaatttagagtaattaacttcacaaaatctcacatattttgcttcaagttgtacaaaactatatgagttttgacgcgttgcattggaccatggtattatagttctatagtttcacaaaacaacacattatttattttatctgatatacatatgaattcaaaattgagtaaagtgcacgagtaacccttaaacttgtaatagtgtgtcattaggtccatcgcccgcagaatttctaggtcagcctaggctgccattgtcaaggcccctcctcttcctttgccaacaggcgacccaaggtcactctggcgagcgccccgtgcgatagcgcccgcagttataccgagaagaaggataaaaaattggtaaaaagataaaaagaaggagaagaaaagaaaggaaaaggataattttaagtgggtcatagccttggggaaaaaagtacgaattacccccccccccaaaaaaaaactatcgtggtcggccaaattacccccataaacttgaaaaccagacattgctcaccctaaactttcaatatcggacgaattaccccctagacctaaaccagaacggttttatatacattttgagagtttggggacctaatatggttttgtagaactctaactataatatccggggttacgttctatgaaatttacttataaatttatagcacgaacatcgtttgcggtacactagattacactattgttacataaaattatcttagtcgactcaggttgtgttcggtagagctggtttccatcttttaccccttgttttccgtagcatattttttcaaacttctaaatgatgtatatatatatatgtatatatatgtatatgtatatatatgtatatatatatatatgaaagtttcttttaaaaagcatattaatctattttttattttttatgttttaagataatacttaattaatcatacgctaataagtaccccgttttacgtgtgggatgagcatatcccaagaacaagtacaatagtcgatggattggcgataggtaggccacgtagactgcggtgcaataggttttagctttacgtgattatataagttaattaacgtaactaagctatgtgttgcaagtctctgaaattaaaaaggatgaatagagatgagatgccgtgtcattcatatattgagtaaagttgtgctatttagtgacctagttttaaaattgcttttcatgtttttctttttagttatattaacgtacattcggacatacaccctccgtcctaaaataaattcaattttatacatgaatctggaagaatgcgttgaaatacatccaaaatcgtaacaatcattttatgtatatattagtgcaaacgacaaataaacacaaaattcaaaatataattatacgaggagcgactatgcgtgtcaaattaatccacaatcatgcatattagagtgaacaagaggcgactgtgatgacgctctctctcgtggcccgatcttctggtgaggggataactctcgctttgatcgagtgcaacgtttgcgacgtggctaccaaccagaacaagtccaggatgccatgcaatcgctacaccacaaacgatgttgtaccaaccgtgacacgcggttgatgatccctgcaatgcaaacgagagaacactgcaataacaagataagatgcaatctaaatattgcgaataggtaattaagcacaaaggaatagttgcgattgaagtggtagatctaatcgacctggcaaatcaacacaccaactattgggggctctaaatctatagtcgctggctaatcgagcgaggactagagacaatgtgaatggcacttggcaaaattcaactaaacaaaacccaattgttctagagggtgtcatggacatttatagagaaaaatagatttagtgtttagtgctaactagtagaggtagagggagacacttctgagataggtctagtctattacaaggcctaaggcccaagttcggtttcagcaatagcactgccttgttttgacgattcccgttgactcggaatgaatttggatatgagactggatgcgtttgaaaggtgatgagagaagttttccatgaagtccaagatcacccaaatcggagttggcataaaggtgctaggtccgtttgaagtcagtgctatctccggaggacgaactggattgcaaaactcattggactttaatatcttgtagactgccattcattcgatgtattctttgaaaatgttttatacttctcatgcttggttttatgcatatagttgatggtcacatcagattgggtgaggccaatctaccacgccgcagtatttgagtcaccaagttccacaccattatccaaaaaggcaccgttgagttcttacgtctcatgaccagcaccctctatctctaaatcctggcttcgccactagagagagaggaggaagaagaggagggagtgagaacgacatgcatggccccatcattntttttaattatttttggtgtaactgacatgtgggtccacggtttttattattttccaaattaaattgccacgtaagtatcacgccaataccatgtgggagaacttagttaaattagccacgtaggtgccatgtcagccaaaaccggggataatactgtcaaaaaaccttatttatgctggttttgtaagttgggggacccgttgtatctagttttttgttcaaggatgaaaatagtatttggtgtcatgttaagggaccttaagtgaacttattccaaagtagtaagacacatttgggcctttggcccaacctaacgattgggttgatcaggactcatgcaggccaaagttgaagggtaatctctttttataaaactcatgcattttattgatagataactaggtggaaaaagtacgaattacccctcccccgaactatcgcggtcgtccgaattaccccccgaaccataaaaccggacattcttcacccccaactatgcaaaccggacgaattacccccctcaaaccaattcagagcggttttgtccaacgtggcgcatacgtggcaatccagtcagcgtttttttaaataaaaaaattgtgggacccacctgccatactcttctcttcttcctctctctctattctctctctatcgctttctctctctcgcggctcgcggggacggcaaggacggcgacagcgg

SEQ ID NO: 2018 - DNA, 1265 bp, Oryza sativa
cctagatgattgcctatttgttttcgtagttgagttaaaaattcggtgcttcatacatagtagctttatgttgctattcattaccataggtgttttgtgctgcatttcaccccatcagttggtgtactaacaccttacacttgagttatcttttgttgcttgctggtagttcagggttatgcatcttgtggttactggtacatcaggggcatccgttagatcttttgtttttcttcaacaaacttaactgttgtttatttgttcattttaatcttatttttttcattctaggatgtgacgatgaaagtctttgttccactctttttcaacatgttttttgatgtcaaagctgggaagggtgaacaagtaagagatgtatgcttggatacactttcttctattgctgccaaggtgcagtgggagcactatcgaacaatattgatgagatgcttccgtgagttgagcctcaagcctgataagcagaagatcatattgaggcttatatgtgctgtgctagactcgttccatttcatgaaacctgcgcatgatgtctcaaggaattctgatgctatgaatgaggattctgattcttccttgactttctcctcaacgatagtctcttctgagaagcaacactacctgcaaaagatagtcttcccacaggttcaaaaactgttaggagcagatccagagaaagtcaacgtaagcataaacctggtagcacttaaaatacttaagttactaccggtagattatttcgagtcacaactttcaagcatcatacatcggatttgtaactttctcaagaaccgtcttgaaagcatacgagatgaagcaaggtcagctttggctgcatctctaaaggagcttgggattgggtacttgcagttcgtggtcaagatattgagggcaatactgaaaaggggttatgaattacatgttttgggctacacacttcattatttgttatcaaaaaccataacttctgatatgaatggtaggcttaactattgtttagaagatttgcttgctgttgttgagagtgatatacttggggatgttgcggagcaaaaggaagttgagaagattgcatccaaaatgaaagagacgaagaagagaatgtcattagagacactcaagctgatttctcaatgtgttacattcaagacacattctttgaaattaatctcaccgatttcttcccatcttcagaagcaccttactccgaaattaaagtcaaaacttgagatgatgttacataatat

SEQ ID NO: 2019 - DNA, 1123 bp, Oryza sativa
attcctgcagccctcataggacaaatcaaagtacttctgtatatatgagggggtaaaaattttgaagtagaaatgcactaattctgaaatgacagctaaaatagaatggaggagccgagcaagtatcatgttcaacagaatcaccaaaaatagcttttgtggtacaaaatgaagaatggacctctgtacaccaatataatgaagacatgcccggatgctccataaaatctgaaagtatttgatattgtagggaagaactagttaattgtatttagcaaatcctagaaagcatagccagtacttgcatgatcatatcgaatactcgatgctaattgtgttcttgcatagttgtctcttcttatgatgaagctattaattatgttggtcaagtgcaatatcttatctgtggtaacccccatcagctacctcactgtcatgcaggaaagtgtctcaatcaagcaattgaaggatttaaggtctttatgtattagaattgtttccttggcacttaaccagtatgggagtaatgactttggagaaaaattctggaatatcttttttacttctgtgaaacctctgattgactgcttcagacaagaggcgtccagtagtgagaagccaagttcattattttcatgcttcatggctatgagtcagagcccaaaactagcatcattactgggggcacacaaccttgtaccagccattttttctatcttaactgtgaagaaagcatcaggatccatcacatcctatgcacttgagttcattgagaatctgatcaagctggatactgatttagagcagcatggagatcattcactgaagaaaattcttgtcccacatatggatgttcttctccatagtctcaatgattttgttagttatcgcagagaacttcacaggtatatttcgctttatttaattttggagtttgttgtttatctatccattattagtgaaacccctcatgtgtgaggctaaggcctttgaaactattttttattttgtacaaatgtgctgcatttgcaattctttataaactcttcactggttctatctgatcctctatcttcatggtctgactatcagctagtattatgggccataacccagtatgggg

SEQ ID NO: 2020 - DNA, 664 bp, Oryza sativa
ttaggaaaaaatcttctttggttcatctatactcgaccttatcatatgttccatttctagggtatcttgctacctgccctttgcaatgttaagtttttgtatattggttataactgaccatttttgtaggcaatttgctgaagttattggatacttctgatgctgaaaatgttttgcctacgacatatggatgtttacgcccaccccttggaaaacatcgtttgaaggtactggatgatgcaatgctcatttacaaattacaactgaccatttatccatttctgcattcaatgattatttcttgttctgtacaaagtcatttgcttaatggatggatctatgcatttaataaacatatttaaattgcctagatttgtttaggtttagtcattttgttttgtagatttcagtctcggaccagatggagtacagaaaagaagggacccaggacctgtgccagtctggtccacctaattggattgggtctggtaaacctaattggattggtgctgcaattggcccagcagattgggcgtcccagtatgatagaatgtgtgactcgaaccgtttaaggccatttaaccaattaattcacagaaatgatgttgccgccagggattgaactcacggtctacagctacggcatttacacctaaactagttg

SEQ ID NO: 2021 - DNA, 1373 bp, Oryza sativa
tacatttaactagcaagaagtcacagtattcaactacattctaaatgcatggtccacttacatcagtattggttcaagtgacaatctcgccttcatatttattctttttagaagtccggagaatattttttcacagtgcaacacgatttgaggcaatgtttgtaccaaatgtattgtctcttcataaaaggagatgaagtcatctgcagtattgagctcctgaaccagtggaaaagaacaatattagaagagctgatagactgaatgcacatcactgaagacttatacaatttaaatgaactaaacttggatccctttccaaacgttaaaaactaattttagaacactacaaatatcgcacagagagaccaaatggtgtgcagctaactatcatcttcagttcatcattcaaacttctacttatctctggtcaccatcatccaaataacatccatttttttctccaccgctaaatgctccccaaaagatcccaacaaacttataaaccaccaatcttaaaaggtagttgaaatagctcctcaacccccaccaaaagggatgtaaagcatttatttctgacacaaagtcagcatcaaatcaaaacagggaaaatgtaaaaaaattgtacgtccaaatatctagcttgctagctaagagatcaaaacattatcccatggaaaatggtgcctgaatattcatgattgaacaatatattagaacccttattctaatagctaaataaacctatttttgtttcagtggagtcaagtgtataattctaattctaacatataatagcagttggacgttttcaaacaccacaagatcacaaactgacaaacatcatgttcacagtttgccaatgccaaaaggacaaaactactcatgacacattataatcccatatacgctgcaaaatttgaatcacatataacaagaaaattccaatcattagaagaaaaataaggcactgaactccgacatgatcacaaccatccatttattctttcaatgttcacagttgttattgcagcaattccaattgctccatttcctaacagaagtcaaagccattaaccaacttatccaacgtgtttccttaatctcacaactgacaatgtaagagcttcaccagagcgaatgattaaagtgaaagtccctgaaaaatacatgtctatatctgcacctaatgaccaagttcaacccatagagttccagtaacttatgcacatacagaactcatggccactctgaggacttgttcggattaaagggtttacaccagattttgtaggactccatgattcttttggatttgctactattcacattcggattgtaggaatcacacaaaggaattttggagttctgta

SEQ ID NO: 2022 - DNA, 1189 bp, Oryza sativa
tgggcctgatgtatccactcaaatcttcatcaggtacaacctctagaggggcttggccacagagcatgctcaccaccgaagacattcttggcctctgaacaggtgatgtgtttgtgcatagaagagctacattgagcatcctaagtgcttcttcttgagagtagtgagaaccaagacgctggtcaacgatttccagtagtctcccttcctgcttcaatctttcagcctgtgggcagaaaataaatccagttagtagattcgtgtttaaaatgtgtagcaggactatcagcagtttacttggtgatattaacatgcaatgcaaggctaaatttcttgggtaattcgcctttcagatgtgaaacactttcagttagcactaggcaattctttcttctggcatgaagaatattggtttgtttgtgggctaatcctgatcaagagaaaattgtttatgggcacacctagttcattgttagcctttgtttgacagaatctcagtagctactagacagactgattatccattgttatccgttgggtgagtaccaagaaacttggtcttatttcattggctatagcagaatagctgccattcaaatgatcgattttggaactaatgttgttggtttatgttacaattgacctttattcctatcataacataattttgaacagccaatccaaatcatcaattactcagcatattatcagcctaaaatgtgacagagctctccaaagttaagcaaactgactttataaaagataacatatctatgacagaaattcgtcccataagatcatacccaattctatggggctggacggctggttatgaattcgagtcctaaaagacaaaagcagtaacagaaaaaaagaagctaaaatagcatacccagtcagaagatggagatattcgtcatctgacatgctacttgtattgctcattccactaacaatctctaatgtcaccactccaaaactgtatacatctgctttacatgtcaagcaacctctcgtggcatactcaggtgccatgtatccactggttcaaataaagaacggtatcagatgttggataataaagatttttacaatatacaataatagaaaatgaaaggtgaagtagccaataaaaatatagaatgacagcttacactgttccagctatccgagtgctcatacgcccacg

SEQ ID NO: 2023 - DNA, 1623 bp, Oryza sativa
tcaagagcatgaaccggatgaactcctccacctaacctctatctagctaaccaccaagaaccctaattaattactactgccagtactactactgctactttctgttcgagatcgatatcgagatgcttgatcgatgcaccgcatcgcatttaaaagggaagagatggatgaactactatttgtgacgtacacatatatagtagtaatttaattagcgttagttcgttgtcgtctcggctacgtgccacaaggcctcctttgtaacgcaggaattttataggaattctgtgacgtgtgtttttagatgtggggattcctataaaattcgtgtggaacttctctgcctcctatatatgtagaacttaaaaaatctatgtatatgtgtgtgtggaatagtatgttttggaccacgtgataaaattgcagagtgtttccttgcagattatggttttcttttaaataggtgagtatgataagttcccccctctatccatgcttatgaagttcagtatttcgacatctaaattatcaagaaaaaaaaggacatgtttgaaataagaagggaacttaattttgtttgaaatagggaatgagcttaatttggccatgtacatagcaagtgacaaaagacatgtgtcttccatgtaatcgaggagaaaaaatagtaccaatgaaatggaaccatggtcaaccggtgtgcttggaaaaaaagcgtaccggaattacttataaaatgagccttttgctagcatttctgcatttggctttgatgtggtgtcttttcttggactaggagcagtagcatttcgaagaaatctatgatatgtggtagcaatagttgaaagatgttaaaattgattagatcttgcatggtctttgacagtatatattctcacggattcatggtgcttaaatagaaacccgtgtagaaaggtagaaaatcaagcagtgctgctgaatgtttcacatctccgattttggtttcataagatcaatttcaggttcagtgagtttggatgggctttaatttgtgttaggctcttgtttggatgggcgtggatggaccaaggctaagacccatccagtgatccagagagactttagggagcccaaatccaggcccaatccccaccaaaatgaacttccaatgaacaaaacatgacttctttttggaaaaagtacacccaaggtccctcaacttgtcatcgagttacaatatcggtcctcgaaccacaaaaccggatataacgcatccctcaacttacaaaaccagtgtaaactaggtcccaagacggttttgagtccggttttatcccatgtggcagctgactcagcgtggaacccacgtgggccccatgcgtcagcctcttcttccctcccctctccacctctcttcctctctcctctcttttccaatctccacgggcggcgcgcggggagtagctgcacgggcggcggccggcgggcgcaggcggcgtggggaggagccgcgcgcgggcggcaggcggcaggcggcggcgggcggtgcacgagctcctcgccggacgaacgctagaccggctccgccatgtcggccgcgaggaggtggcgcgcctcgtcggctcgctcagtcggagtgccgcc

SEQ ID NO: 2024 - DNA, 503 bp, Oryza sativa
cctcgcaagcctcacaaggctgctaaagagagaaacttggcacctctagaactcttacactcagatctctgtaaaatgaatggggtgttgacgaagggtggaaaacgatatttcatgacgttgattgatgatgctactagattttgctatgtgtacttgttgaaaacgaaagacgaggctctagactattttaaaatttataaggcaaaagttgaaatcaacttgacagaaagataaaaagacttaggtctgatcgtggtggagagtttttctcaaacgagtttgacttattctgtgaggaacatggcattatacatgagaggacgcctccctattctcctgagtctaataagattgctgaaaggaagaaccgcacactgaccgacttggtgaatgccatgttggacaccgcaggactacctaaggcatggtgggggagacattgttgacctcgaatcatgtgttaaacagagttcctaacagaaataaggacaaaacaccat

SEQ ID NO: 2025 - DNA, 590 bp, Oryza sativa
aaactaattaaactagataattaattagcggagggagcaattaaattaaatgaattaaaatcgtgctagtagcttacggctcggttgtcggtggcgacgccggagatgacgaacatgaggtagaaggtgatgatgaactcgaggacgagcgactgcacgtcggagccggcggggagcgtgccggggaagtgctcgtggcggccgccgaacatgagccggagcgtgccggcggcgagggtggcgcccagcatctgcgccgccgcgtacgccggcacctgccgccaagggaacctccggcacgtcgcgaacgccagcgtcaccgcggggttgaagtgcgcgccggagatgtgccccacggcgtacaccatcaccatcaccgccagcccccacacgatcgccacccccgggaacgtgatctgcccgttcttgctctggttgatcgtcaccgccccgcaccccgcgaagatcaagaagtatgtcccaaagatctccgcgatgatctacaccatgatcgatcaatgcggcgcccgccattgtcaagatcaagaactctcaagatcaggaggaagaagaagacatgaaatgatgat

SEQ ID NO: 2026 - DNA, 525 bp, Oryza sativa
aatctcgctctaaaggccgaaaaaatcagcgctcgacacggactcattgtcaccacccgtcacctaaaatctactcagcgtcggcaaaggagccatgggttctagcaactaacttacctgttgaaattcgaacacccaaacaacttgttaatatctattcgaagcgaatgcagattgaagaaaccttccgagacttgaaaagtcctgcctacggactaggcctacgccatagccgaacgagcagctcagagcgttttgatatcatgctgctaatcgccctgatgcttcaactaacatgttggcttgcgggcgttcatgctcagaaacaaggttgggacaagcacttccaggctaacacagtcagaaatcgaaacgtactctcaacagttcgcttaggcatggaagttttgcggcattctggctacacaataacaagggaagactcactcgtggctgcaaccctgcttactcaaaatctattcacacatggttacgttttggggaaattatgaggggatctctcag

SEQ ID NO: 2027 - DNA, 755 bp, Oryza sativa
tcctgcagccccgactcgttcccgtccggaaatcatcacaggtaaacaccttgcctgaaatcgtgttgatccaaatagctctgatcaattgtctaacctttgtcagtggatacattaggaccaatgattggtgatgaagaagaaattccccgtatacaagcagctgaagactcgcacccttctatcttagtcaagtggtgggacgatgacaggcaacctcaaggaatcataataaacaaacaaaaagaagatgaggaagtatgcttgctgaaaaaggcactcagccaggccactcgcattgtgaatgtaagtccatttacgcatagctttaattgttccccttcatattttgctgaaaacgccggtaaattcttattgcagagaatccatctcaggaatgaggcaaagaccacgacacttgagaaattagttccccatcttggaactcttgaagccaccaaaagccagttacatgaggtcagagagctcgcgaggaaaactgagcatgatctgaggaatagaatctctgagcttcaaaaatctaactatgaattgagtggttcatccaaaggtaaataccatatccgtctgacatagaaaatcaaccaagggaggagcaggccatgggcatggcggatgagggggagagagtcggtataattgttgatgaaatggagagggaagattcggataatgaggaagccgacgatgacgcatcatccgatgaggaaggtgatgtaatggccactgattgg

SEQ ID NO: 2028 - DNA, 716 bp, Oryza sativa
gaggccttcttcaaggagtgccccccccctgatgacaagcagcgcaaggagctcagccgcgagatcggcctccagcccctccaggtcaagttctggttccagaacaagcgcacccagatgaaggtaatatactcatccgtgcatccatcgtatatcttacacgtcatgtgaacgtgcatcggttcataatgttgtgtttataaatgttaatggtatgtgtggttgcacgggtttgtatgttgcagacgcagcatgagagacacgagaacaatgcgctgcgcgcagagaacgagaagctgcgggcagagaacatgaggtacaaggaggcgcttgccaacgcgtcctgccccaactgcggcggtccggccgccatcggcgagatgtccttcgacgagcaccacctccgcctcgagaacgcgcgcctccgcgacgagattgacaggatctccgccatcgccgccaagtacgtcggcaagcccgccgcggccgtctcggccgcgtacccgccgctgccgccgtcgaacaggtcgccgctcgatcatatgggcattcccggcgctggcgccgacgtgttcggcgccgacttcgacaagccgctcgtcatcgagctcgccgtggccgccatggaggagcccgtccggatggcgcagctcggcgagccgctctgggcgccggcgctcggcggcgaggcgctcggcgaggagggggctgcagga

SEQ ID NO: 2029 - DNA, 651 bp, Oryza sativa
tatatgatccatttcgtttactacatcacataattaacctataagtgtatgtataacagtacatatatcgcacaccacatcctctcactatatataaactacaccaagcacaacagggataatattgcagctagctctagctacaaattaaacttaaagcatgcagcatatacatatagatatataagtacatatatatatcatcatatgctacgtttttattcgatcgttgaccacattgatctatataatatagatactgcatgcaaattataaatgcatgtaacgtagctaattaagctatagagcttgattaattaggcttggcggcggcgggaggtgtaaggtccggtgaacctccggccgccggagccggcctggcgctggcagttgaagtagacggcggcgacgggcgcgccgaggttgtagcggcgggcgaaggcgcgggtggtgaagttgtggcgcaccgccggcgcgtacaccgtctccctccccagctgccggaacagcaccagcaccatcctgtggatccccgtcgtcgggttcgggctctcgtagcacaccacctccctccctgcatccgtatcgcaaagcaaccgcgcctctcagatcatatatatcgccaattcattaaatattttatatataacg

SEQ ID NO: 2030 - DNA, 895 bp, Oryza sativa
tccagggtttatttactagtagtagtagtcagcagcgcaagttcgattagttggcggagtggtgattgacgatttattaggttatttttgcttgtttctggctttctgcagttcggacgacttaccttgtgattactgattagcaagtgtgttagtatcagtatgttgggtggtgtctcttgtgaggaagtgagtttaaccagagtattcttaagatgaccaagctcaccaaacatacccagtgttttgtattatattgtctatgcttgcatttttgtttacttgattcaaatgccactctgtgcgtgtgacctaagcaaaacaatgtttactgcctatgttcaatttcatgcatcctcacatcactaaagtgaacttaggggcttccagatctagcagagtgcatcattttatttagtgaatgtgtttgtggacagcacgtgttttttcattatcattattttgtgtccttgtatgctgatggtgtttctctgatgcggcagatgggggtgtggctctgcagtttgagagcggctactttgtggagacgctcgtggaaggggacaagcttggcgtcacgccacacaccattagggtgtcccctgttgagggtggagagctccttgcagtggactcggcacatagcaacattgtgcgaataactccgccactgtccgagtgtatgttttcttcttgccatcctcagctcagcgcttccttggttattttaaatatgaatgtaatatatgacatggaacattttttggtgtgtcatccagcggactgtttttaggagtgatcagagtttgttccttctttccccaaaggcatgaaactttaaaattagctttgttaaacatatcagtggctaataagcatatatgcaaatattttt

SEQ ID NO: 2031 - DNA, 538 bp, Oryza sativa
ttgaaaaaaaatacaatttcaaatttaatttctacaagttataataaaaataataaattaaactctaattagtatacgtattccctgtcaaatttaacatggccagagagactaagggggtgtttagatggggctaaaactttttagcccatgtcacatcggatgtttggacgctaatttagagtattaaatatggaataataaaaaaactaatttcataaatgagagctaatccgcgagacggattttttaagcctaattaatccataattatcaaaagtttactgtagcatcacattgtcaaaatcatggcgtaattagactcaaaagattcgtctcgcgaattagtccaagcttatggaatgggttttgtaattagtgtatgtttaatactctaaattaatatccaaacatccgatgtgacagggacttagaataagtccctgaaaaccaaacagcccctaataactgactgcacctagcccttttaggctaggtaagcctagcagtagttcctctcaggaaatggtagttatta

SEQ ID NO: 2032 - DNA, 671 bp, Oryza sativa
gcggtagttaaatgccacgccatgtttgctagcaaggcactatcttggcaaccacaacatccacacagattgatagccaaatggaggacatgaaaatgccatatcttactggtgggtgtcaactgagtacagcttctacagggcattgcctagttccatctttaaccataaacatcagaattcaagatacaaatcacacatgagcagctctttcctttcacctatatgttgtttggcctcagaatagggaaacctacctcctgttcctttcataatctgtccacatcttcttcgcaatataatctctcaaagcatcacccatgctacattggttgttcagttcttcgacatcattgccataagcatcatccccactgggtaaaactacagttctacgggatgaaactggcattgcctggttaaatgcccacccatcatcatcatcatcatctttttggccctgcattatattgtgcagcaccactgctgctgctgggattttcgcttgagtttctatctgatagaatgttgcgacatttaaaattgggaacctcatcttcaatagcgctgtggcacgctttatgttgttgcgcagctttgagtgacgaaggttgaacaactccttgtagtcacttggctgacaattgctctgctcctcctcttcaatatgg

SEQ ID NO: 2033 - DNA, 711 bp, Oryza sativa
tctcggttgtagaaacattatatggacttaaacaaggagaattatgtaacataaagaaatagtagtacaatttgaacatgatacaactatttcctttgcggttacatagatgatattagattcgaactagcagggaggtagtgcaatagttgaacacaacgacgatgtagtaatgggacaaggaagcatgacagtagaaatttcaatttgccaagttgtccgataatagctaacccctacgtgaggatccctctcctctctcaaaccgcgctttagtaaccctgtattgctctggtagttcaagttgcacaacatggctaggtagagttagaacccttctggtgtctatccattctctgtattgacatctccttggtggttcctaggaggaaataatagatgtgaagcgagcaaagttagtaaatgttgtgagaaaataaggattcatgtaatcaaaatattcttaccatgaaatcgtcgtcaagaatatttggacaaataaagaaccttcgacccaatgttctaggctttatggaacgaagaacctgacaacgatcaccacacctgcatcttggacaggcttaccatggagagagtgcctcaggtagcacccgccagtcgcactgttgttcacgacattgtcgttcgtaagccgcttttctatgtaagtattgctcagtactttcgatgcgaaataccaacgaccttctt

SEQ ID NO: 2034 - DNA, 1457 bp, Oryza sativa
aggggtttaagccggcgggcgagtggataattttggtggtggctttgcgtggaccgggtgcacggtcggagagaagatattttgctcccgggccttggaccgttgggtggacacggcaagcttgctgacatgtggaccccactctttcctcatgggccaggcgcattaacgattgggccggccttgttgggctagcaaacagaggtagactaccggattgggcccaaattacgaagcggattcttaaaaaaaaacaagggctttaatgccatttctaaccttaccatttttgttatcaaaattgtgtaaaaacgccaaaattttggctacattgccaaaatttggcaacaaagtgaattttggtagcatatatgttgccaacaaagtgaacacatccaaaatagctatattgccaaaatttagcaacattgccaatcttaccaaaattttagcaataccaaaatttggtaaggtttatttttacatcaaagtgaaaaggctccaaatttcttccgttgattttcagtgaaaggattccctacagaaattctgaaattattttttgagatgctaacttggtagttatttttggaagtaaagtaaggcctttgatgccattttccaccttaccaaactttgataaaattgtaaaaaagtgactccatttagtttcctaccaaatttaagtaactataccaaaattttaaaatgctaaaatttgataattttttttttcatcaaagctggattgacatatgtacaagcagttccccaacacacacatcgacttcataaaagtacagccggtttgaaagactaaaacaaagcaaccagtaattaagcaaataaaactaattaaagcaaggagaacccagattaacccactactaattaactgcaattatatcacacgcttcagcttcaagcagcggcggcgggcttggtcttcttccccaacacctcgaggatcccctccctgccctgctcgatgccggggggctcgacgccggcgtccttgagggtgacggccttcctggccgggtactcggcgacggggtcggcggcgacgccggcgcggagcgaggcgtcgtcctgcacgtgcgccaccttgcggaacagcgacccgccgacgaaccgctccgcctcgtcgagcgccatgtccggcgccgccacctcgggcaccgtctcccgcttcttcttgtcgagccgcacgttgggcgcgtgcgccagctgctgcctcgccgtcgccaggcccagcgacaccgacaccgcgatcatccccatcgccacgtacaccggcacgtagtcccccgccggcttcttcgccgccgtcgccgctgcggcggagagtgagcgggagcggccggggacggacaccgccgcggcggcggcgcggaggagggaggagactcgcgaagccatcatggtgggagctaggcagctagcaagtgatcgag

SEQ ID NO: 2035 - DNA, 609 bp, Oryza sativa
atagctgtgcaagcccaaatagttcagcatactgaactaccatcgtgttggcatttggaatatctattccactttcaatgatgtgtgtgcagaccagaattttgacttctccacaagcaaatttttccatagcaagttgtatgttctttgaaactttctgcgggaaaaagaattggcaagaaatttgattatgacaaaagcaccattcgactatgcaaatagaacataaatcttgattgttaacctaacattattccatatataataactagcaacttaagatatagacttgactgaaattgaaggttgtaagctttacagaaaataaatagtcattgacaatcaaaatcaaaacgaactatcgaagaacaaggtcatcgacaaggcccatatagagttttctggtaaattagtttgaacactaatcagccatgcaaggatatcctaacaatgataagagagtttcattggtagaaaatcacatgttggactttggctttaacacaatcaagggtatacaaattaaaattgtctacaataaataatagtcaaatagcatactaaacacatttgaaatgttaagtcaataaacctttccatgagcaacag

SEQ ID NO: 2036 - DNA, 676 bp, Oryza sativa
taaatacaactccatcaaattgactaccattttctgaacagcaagcttccctttcagtcttctcttctcccacgtggaaggatcgttcagtttgctcaaattccgtggtctctgcttctcgtgaggtctgcaggaaacatcaatctggataaatggtcaacgtgaatttttactttccaccagaattgaagggacaggcccacaataaaacatttataccaaacatcaagtccggaaatagcaatttttacaatgtttatataagtagtaatgaatttttcttgttccttaaatggaggctggaacgtgcagaaaacatgaaagttcttgcagccattcagagcaggaatcaattttggcaaaatgcaattattatgtcaaaattcgcatagctagctactcaggcatacaggttgtatctgtagagcatgcgggcggcctggtcgacggcgagcttggccatggcgtcggcgtactgtatgaagacgtagtcgagaccgtcctcggcgctgatgcagacgaacttgccgacgccgaccttcttgtgcacgacgtactccccggcctccagctcccgcgggtccacccggtgacccaacgagctccccgccgccaccacccccttcctcctcccccctcccccttcgtctccgtccccgtcgctctccccctcctg

SEQ ID NO: 2037 - DNA, 593 bp, Oryza sativa
gttagcaacactaacaagaaaaatcaacattgaaaacaaagaaacaataattaccagatgtccagtatgagcactgacatttccaccttcatgatcactggaagaacccaggtgaaggtatgagggaaaataaatcaaaccaagtctttaagaaacaaatatataagtcaaaacaaggatggaatacattacgtgtggattgtcacatatagtcgcatcaactcgagcattttgggatcatcaaacccaagcatgtgtgaaaagtttgctgcatagtccagtgcattatcagctgctatagttttcccatccttgaagatccttcagtgaaccagaaaatagggttactattgcagttacaaaatttacaggattgcctggaaagtaaagatgttggatgcattggtaaaaaaagctacctccggtaaacatacgaagccactggtggaaggcgagctatcaaatttaagcaatcttcataggtaggctcccagaacctattaaaatagcaacagagcagtcaataacatggacaaatctattgaacaattaatgcaactcttgaggcagtataaatcccaagcatactttga

SEQ ID NO: 2038 - DNA, 727 bp, Oryza sativa
gtgccctcgcgagaactccctcgaccttgcctgactccgtcccgcagaccagcaagtcatgtcccatgtcccggacgagagctctgagatcttcccgccgctgcaaaagactgatggcacgcgcccggaggatacaaagctccggcatcccgatcacgcaccaggtctccctcgcagacaaatcatcgaacagtataggtgcgtcctcgagcgggtaacagccggagacaacaactaccacggacttgtccggctcgagatcggcgaggtcccccaggcgcaccaggccttggaggctggagatatagtcgaccaggcgagggggaggaggtaacgcgggggcgtccatggcggcgaggcgagggcgcggttgggcgcgtcgcgtcgcgtggggattcgaagcgcgagagcgaggcgaggcgaggcgggcgagtcttcccacgtggaatgaccaagctgcccctccgctccctgtgtcaactgttaaagtcactagagaggaaacgaagagcgggctgggctgggccgggccgggactgcaaattcgtcagtttgtatcggacctaaaattctagattttttttcatttttagatttttttaaaaaatatttacagaaataatctatcggccaaaaaaattataaaaatagaccctgccgcccactatggggcggcaagctgacgtggcagacggcgggtcgaccgcaccgtctgccgccgtcggcc

SEQ ID NO: 2039 - DNA, 1831 bp, Oryza sativa
cacacatttggcctcataccaacaacttttgttttaaccaatttcaggaaccagtaccagctgtcggtattcttactctcaacaaaagcaaatgccaagagcaatacctgattgttcccatctacccctattgctgttagtatctagccccgatactttccagtcaagaatgtcccatcaatgcagagaacaggacgacagttcacgagtgccatcttgcatgcatgtagagctaagaacgccctttgcagcacactcttgctaggatgttcaattgaggggaatttcttcactgtgtaagagctcccagggtttctttcttcgataacaccaagcaggcgtggcaaattgtcatacgaggcttcgtaagttgcaaatctcatctctattattttctgtttggccctatacgccttggcatagctaatagtatacttgtatgtctcttcgatttgttggattattgaccttggttcatatgtgagattatcgatgacatgcgcatacatctcagatgcaacaaatgcacatgtaatgttcctgtggtatttttaaacaccaggtagaaaacatgtatgcttggtaacgactgacactgtccaataatctttccattttcccttataagcgtgcactctccagggacaaccatcttttttcttagcacaccgaacttcatattgcgaccggttgaacttggcaacccaaaactctctatgaagtgacactgcaaaatgttttacccccctcttcatatcttctgctctagtataaatcgctcccttgaataacctcattttctttgtactcccatctcacactatccttttcagagacgaccagactagaaaaatcctccctagcccattctgctggattaatatccgtctcatcatctgacgaatcacctttctctacacgctcgttgtcagaatcctccctctccatttcatccacaatggcaccgacagtctccccctcgtcggccactccacctagttgaatgcccactggagctactacgcccccgtcctctcgtgcgttgacctcttccacagaagtctcatttacttcagcacttggtccctcgccatcatccatgttcatctgcacacctggatccttcgggtgaacaaacggaaccatagctagaggctacccgcgttgcaatgcattttccacataccatctccacactcgagagttttgaactggcattagttcccaataaaaaccctcagttgcccgacttactataacattgattgttatgtcacttgtctgtggatcaactctcaagcccctcattaaccatccttttatagaaggtacactcctctcagccagtttatcaattcccctttttgatacaataaattctaatagatctaccccagttggcccgtaacggacgttttctgggccatggtaaacttgaaatatttgtttgttcgacatatctgtcaatgaaataactagatcatattactctttcatgcaataaacatctacaacgtaatatcttcttgtgtatgccaatgcaacggtaaagtattgattccaaactagcagatctacgtagttaccgatatctacaatacgcacttctagattagtacaactaaaaccctaaaaatataatgcatttattcaaacaaagtttttaaaaaatacacagtatttaactcaataaacacatataggatctatgaatattacctgtaatcggcgtctaaatccggcagggcttcgccccttcttctcttctcctcccctttcttcttttttttttactggatttgtggggggtggaatgagggctgggggctgg

SEQ ID NO: 2040 - DNA, 3624 bp, Oryza sativa
ctctctcaaaccgcgctttagtaaccctgtattgctctggtagttcaagttgcacaacatggctaggtagagttagaacccttctggtgtctatccattctctgtattgacatctccttggtggttcctaggaggaaataatagatgtgaagcgagcaaagttagtaaatgttgtgagaaaataaggattcatgtaatcaaaatattcttaccatgaaatcgtcgtcaagaatatttggacaaataaagaaccttcgacccaatgttctaagctttatggaacgaagaacctgacaacgatcaccacacctgcatcttggacaggcttcccatggagagagtgccgtagttagcacccgccagtcgcactgttgttcacgacattgtcgttcgtaagccgcttttctatgtaagtattgctcagtactttcgatgcgaaataccagcgaccttcttgtaaacaagtggttaggtcgagaacaggattttctgtatcgacccactcgatgtatgcgcaagccgtagtgcgggtctgccgagtagagtagtgttacgaagaataaaacgattgcccatatggaatgaataagcatatgcagatagtaaaatacctcacggtcatagttaggacacctaaaaaagctccttcctcgaatatcaggattcatcaaagccattagttggcatcgatcaccacataggcagagaggacgctggcaccaaggtggtagtaggtatacacaaggatcgctacgccagttcggatcctcaacgcccaggcgtctagccattgacgaaagccggtaggatttgtaatgaagcaagtggggaagagagtactgaatgtgactgattctgaaagattgtgaggcctcgctcgttaaggcgacttatataggcaccaaaaattgagtgatatccctgacatgtgaacgtggcggggcatggtgggtatgcctgattggcgccgaaagttacatgcctgattggcgccgaaagttacattggtcgtatgcggcaaatggcgggcaaatactcgtatcacacgcgaataaaggaggctgcatctgtgcggcaaaaagtagtcatgcatgcgccgaaaggtatcgtgcatgcgccgaaaggtatcgtgcacatataacaacaacgtattcattacacaagcatacagtactagcatgtgaagcaaataaacaaagagaagtctgctctactggccctgccccgcgccgcgaccacgcttggtcctccaggcctgtgctcgcacatagttctgggagtaggtgaaacgatccggtggcacagcacgggtagcacgtgtgtctggcggcggagtggcctgcgcctagtcctgcgtctgcaccggcggtgcgcctcccagctatgtgaatcgacagatgttgcaaattattgtggacaggtagattttaatgcaacaaatcaaagcgtagtgaaagatcttaccggtgaacagcagctggacggtcatcggaaacggtactggaaagagctgacggaagccaaactgccacatcacacggaaaggggcgtgaggctcaacgcagatgtcgaagaccatcggaaccgtagtcatccagtacgcctggtcccttgtgcagagtgtggacagacccaacggcgcacgagcctgggtagccgcggcactgtagggctcccacacgacgttagtcggcagaaggcggtcgaactccataacaaactcaggatacgaccgcctaacctggacgtgagcccatcagcgctgcaatacgagacgatcgatgtgatgtacaatgaacttagcaatgaacttaacaataagagaagatcgatgcaacgtacctgacgacggcaccacagagtacccatcgtagggtagtcgacctccggtcgctccacgtacagtgactccccgtatgcgtgttggtccacctcagggcagccgatcgcaatcctctcagctacccagatagaaagaaagagagggcacccaccaaaggtcgcgctgggatccgtcttcgtgcaagcctcacaaaggccacggtacagagccgccaacaacgcggaaccccagctccactgaggcacctcgcctaccgcggtgtcggcgatgctcctggcgtagtgcacgagtcccttgtcgaccgcgtgcccgtgaccgccacagaacatcacccagccaaaaagctagagcaagcacgcctccaaacagcggctgtaggagtactcgtcggcctccgcctatagctgctcgacctgcaagcgttcgataaaatgttaggcaccttaccttacgactaaatatgtagtacgcttgtcatttcggtacaaaaacactcacggtgaactgaagcagccacctcctcgtaggtccggtgttgcggtggtgtgccaacggctggagcgggagatgtggtgcgcgctgtactggtgcgaaacgtgccgtcagatcgtccttccagtccacacacgtggtcactggcccaatagcgtctcccgcgagcggtagcctcaacaagtacgatacgtcctgtagggtaggggctacctcaccgcatggcaagtgaaaagtgtgcgcctctggcctccatcggtcgaccaaagctgctaggagggaccggtccacattccagcgtctggccgggtctgcgtcgccggcggcagcctccaccagccgacacatcggtaggaggccggcctcacgcaatctgcaataacaaattaatatgtcattataaaaattattacagcgcaactaatttatagtaatacactgttcgtacctctcgacaaaggagtcgtgaactgtatgtagctcaccgcacgtccgtgcccggaacgtcccaagctgagccccctgcaccatagtaaggtgagaccggtgtcggtgatctatcgccgggtccaacaactcaggtgtatcctgacgtgccatctctgaaaaatatagtgtttcatgttagaacaattcaaaaattagtaatgtagaacaaaagataacttgtaaaattatgaaaaagtaataaaatcataagaattattatgtacaacaagagtacagactatttaaatatagcaaacgttactaagggtacataacgatgacgtgcaatttaacatatatgtagagttcgataatataacataacaaaacataacattacatgccgaagtccgacattacatcagcatacctaaagacacgggtgcctaagtctgacgttacataacgagacctaaagacatgacatgccgaagtctgacattacacgacgaaacataaacacatcgataagttcgaaacaaattacaagcaaaaccacatgccaacatagaacagaagaactacaccacatagctagacgtggcacgacgacgcctaggacgtggtcgagtggaggtagtgccttcacccgtagggcgagctccatctgctgctgatcctgatagtcctgcctcctccgcacttggtttctccttgtctttaggacaatgcttgtaggtgtgcccacgttcatcgcatttgctgcaacgcttcaccctgccagcctccgactcatccatatcgttgcggatgcgatgagtcttcctccttccagccttgcctcaaagcttcgattgggg

SEQ ID NO: 2041 - DNA, 1162 bp, Oryza sativa
aattatccagaatctacgcaacagcgaaatgtgaagctctctagttaagatatcatttaccacacgatgctaagcagcaaaaaatgactgcacatcatgtcttattaacagaacccactaacccagctcctttcgacttttcgacttattcagcaacacgcgtagcacatcatgatgaagctcaatggagcacaatcaataaggtttcacaaccataattaactcatctgttatgcaaacacacattgcagtaaagatatagcaagcacttcagtgggaaaaaaatttctactcatcatggtttagaaatcagaacagtaaactcattgtcatctaagtcaaaacaaagccagttctaatcaaaatcctatgtaactctttctttaactttacgagagaattatgtcgtgcaaaaatattagtgccgttgatatcctggagcaaattggagcataaagaaactggccttttgtttcagctgatcagctcaaacctgctgatacgcatgtatcttgcaaagcacagctaattaaaatcaaccagcagaatctacgcaacagctaaatgaggaactctctagcttaagataggacttatgagatagccgtaccacaagctgctaagcaggaaaaaattgtttatccatcatgccttatgactgttcagcaacaaaatccccatatagagcttattttgagtttaagactgattcagcaacacccatatagcaatatcaaaaatatcagtacctgtagcaatgatgaaactaaactagaacatcagaaacaaaaatcatatgtatagcaatatcatcacaaaatgcaactccgatgtcaagtgcttctgtcccttcaagcctagctccaagagcatcaacatattatctatcaaaagttcaaaagccaggcaaggcacatattcaatcattttcaaaaagggatagcaagaacaaaaaacaaacttcagtgctgatcgatcatcatcggaaacatatcaggaccacatgacctatttggtgaacaaaaaattgctcaaatccacaagttcaccatttgggtcatgtgcacctgaaccaaaaaaggctacctgtttctaactagagtaacgatgtaagcagctcaatgtaagtaaggaacgcaacgtttatgtactcaattcgcag

SEQ ID NO: 2042 - DNA, 1341 bp, Oryza sativa
ccatttcatccatttcccctttcacttttccaccactttgaaccatcccccaacctctctctcctcccggttaacggccttgcactcgccgttccgaccatttccctcactccctcgacctactaccaccctcccttgttgcgccgcactcgggaacatactccgccgccggggttgtcgtctcccagccaccggagcaccggcgccattctctacctcctctcggttccctggaaagaggcagagaagtagatgacgggaggaagaagagaaagaaaaataaaaaggagtagagaaggattgagaaaaacaaaaagaaaaaaaatcgaagggtagaaccgtacttacacagttgtttctctctccaatttcttcggatataataaaataatctcgcgggtgtccaacagctaattaccagtttttgtggtgtcctatagcaaatacacgtttttgtggtgtctcacagctaattacacgttttttgagtgtcctgtagcaaattttgccttctgaaaaagggcgggttcatgagatatttgaccatatttattcaatggttgccgtcaattcacatatatgcagtctaaatctatgatcttaagaaaataatattggctttgaattagtctgcgaattagtttcgatatctttagacaaccttgaggacctggaccactttcagaaataaaatgtatgaatggtccaaatatatgttgtagctaaagggcagtggcagccaccagattatgtaatggcatgtttacatgtaacacataaaaatttaagatgttcaatcccatttcagtaattgatgtatgtgcagcacagcagtgtagttaattttagaaaaaaaatactttaccctgaaagccatgaacacatatattacccaagaacatctgctccatgtactacatgatttcttgcagtgtatgaagcgtaatgttctgtttctttcaggtagctttaaatgacagaaacaaaagtaattagtttctcaataatttggtcatcctcaacggatgttgtacagtatagttctttcttcagcgcaccagaatttgttgagtttccaccatcatatgtaacactggccagaaagcttatgcataattctacccaccttgaaacccaaattttcaaggtttgctagacgaaaaacctccattgcttgtcaaaacacatggtaagtaaactattgaagcctcgagatgcctcatgccacggagtaattttttagtttgatcccaaaaaacaactaaatgtattaataaagaggtgaacattttctgttgtgaaactgaatagcagctaaatgtttttggcagcagggcgact

SEQ ID NO: 2043 - DNA, 1158 bp, Oryza sativa
tggtatgccacactccgctgcggcagcaatgacatgggtgcatggcctgtggagcagcttcggctttgcacaagagcaatgacatgtgccgtcggctttgagaacacactcctgcttcactctcttgcggtagatacccctgcctgccttatcttgacatagtatctcaaacttgtgctggtgggtaccttgcactagagctcgatgtttcatggcctttttacgcaactcctctagctttttctgcatgaaagttctgaataaaatgctgttgttcggcataaagggaagaactgcttggaaccgatccctaaaatacctgcatgtcccatgtaaaatgaactccacggacaccgcgcatcacctagttgtaaacttctgccaaatttgttgttattattctatatctagcaccacctgtgtcatacgccttggcccatttctcttttggttcatgtagaatccactgagaaaatttccgaatctccactccagttcttctaaccaatgttggactatccgttgggagaggtccaagagcttgaggagggtcagcaacggcggtcgatggagctgctgcacgctgatcactacatttggctgtcaactcatctaatctcttccaaagctcattgaattttttctcctggttttgattgcatagcctcttgaacatgttcatgagctccttgttcttgaattgcttgaagaaattagctcccatatgacgcatgcaccacctactttgtacatcttcccactcaccaggttatcctcattccatactccaaaactgcaactcttctatcgctcgcagaatgcaagcgtgcctgtcatgtatcaggcacacatttggcctcataccaacaacttttgttttaaccaatttcaggaaccagtaccagctgtcggtattcttactctcaacaaaagcaaatgccaagagcaatacctgattgttcccatctacccctattgctgttagtatctagccccgatactttccagtcaagaatgtcccatcaatgcagagaacaggacgacagttcacgagtgccatcttgcatgcatgtagagctaagaacgccctttgcagcacactcttgctaggatgttcaattgacgggaagggtaccgagctcgaattcgccctatagt

SEQ ID NO: 2044 - DNA, 7670 bp, Oryza sativa
aatttcccattgtgctgaagcaataccttctctattcgagttaaaccgccccatcaacttggttctaataagatccaacattgtaacaatgggcttatccctgtaatcaatgatgtagttattgaatacttcgcttatgttattgaccactaaatctgtcttgcatgttgtgtcaaatgcatgcctagcccaatgcttagtaggtattttggtaagccactcccatgcaccttccctctccttcttcagttcttctatcgcaatctcaaaattatgtttagtatatgcatatacagcagagtccatgtatgccttgagatctccacccctaaaactagcggtgcaaaagttttggtgtatatggcgcttgcaaaacctctgttcacatgcaggaaatacatctttaatcccaccaagaagaccctgcattgaagtgatacattaattaaataaatagaggaaaacttaaaaggccatgtagataatagaaatgaacattaccttttacctatctgacattattgtccattttccgtatgggccaacctctccaccaagagcatatttcagttgttgcaggaaccaacaccaaccttcgtaatcttcttttcctaccaccccaaatgctaaggggaaaagattatcattgccatcccttctagatgcggcaagtacttgagccccattagtaagcttgacaaaacatccgtctactcctacataattacacatggactgttcaataacaaaaaaaaaaggatgcaagtcgtataataacacccaaaatagtatagtctatgaagggcctgcaaccatacttgaagccttctatttgtgcattgagacatatgaagaggcccttgaatctaggattgttaccaagtgggtacggattataggtagacacaatgcatcgactacctgggttcttatctagtacagtctgcaagtaatccctgatccttaggtattgtttcttgtggttccctaacaccacctcatccgccttgctccttgccctataagccataatctttgatatgtcaactccatatttcctcataacagcatccatcatagaagtgattttccaattttgggtcacttctaatgtcctcttcatacactttacttaaccattcactactcaccctactactatccatagttgtaccacatgtgtaaggaccaaccatattcctgatggcaatagttttctcattggcaatttgtgaggccaacatgtaaaatgggcaagaatcattcacacagcatacttttactctatcactatcatttcaaagatacatgtggtctctacaattgacaatgtggtagctcttaagtgcccatctaaattgatgaacatctcgaaaacacattttctcacacaatgcatcagaagaaagaaacatgctctcatcataccaaattctttgtactgaaagctttttcttttattcggtgctcgacaaggtgttgcttcatgcccatcatcatcactggaacataagtccacaatatcaccctcattgtcttccttgcccttccttgtagatggtgctatatgctggctacattttgctctggatgaattgacaacaactagaggggaattaacaactagagggcttggttgactctcatgttgaactgcaacttcattgccattccttctagctattggtgcagatcctgtgtctagtagattaatagccaatggaaatatgtcctccacatcagtatctccctcgcgacgctcatctggatcttctttttgcctcttaatctcctttaacttctcctctaaatcattattttacagttatagaaaatcttcatcaaccgatgatggatttgagctatctgacatggcatcattttccaaaacacacaagtcatccacctcggcaattgcatcacccaagtttgtaaccaattcagtatttgggccatgcagattgcttgactgagatacaccttgtctctggatgatgtacaagtttgcaactttttcactctcaaattgcttacacatttcatccacttgccaatcactttctatagcaaccatgctagctacacccctcccatcttttttgctgtagtagataaaatcacattctgagtagccaatgtccacaatcagtccaaccaaattgaagtagcaaatgatatctatgtccatctttttttgcacatgcatcaggccattaacaacaccatcacggaataaattcaaggtccaaatatcatcctccatcctatcagatcaagaaaatcacctatgactaaagctgcaatttagtgacaaaaaaaatctgctgcaacactatcatatccaacaaagattatcataggttcaacaactagaggggaaatttcaaacccatcatcacaattaggattcatttagaaatccaaatttgcagtaaataagtgaggaaaaggcattcttacctgctgcaaagttcagaacgaggctaatttgctctctccacaggtctccttgatccttcgttgggtatagatcaaatcacgtagtatgttgttggccagggcagagaagtggcgggagatggcccaggttagcaccaatacttcgcgcctaatgacgatgtggagagggtaattcccactttatcgtcatcgcaaaaacaggaaacaaaatcacggaaacggcgaaccggagcagaaaacgacgcacagaaggaggtgaacggaatatgggtgcaatgaaacaatatgcctcaaagggtggggttttgtgataaaaattagttaaccaggttttgtgataggtatgcccccaaaacttggggttttgtgatatttactcttaaaggaaactaattgattctacctaattaatagatagaattaagccgtcatgtcatagtcttcacgatttcttcttgaactcggtatcttatggataagtttccgccaactaattgtgctctttccttcaccgaatccactaaaaaatcttaccaattttggtgttaacagaatggagccgagagaaggaatccccagcttgcttggatccatgctagcttctcatcgaaaaagaaaataaatgggagaggagagatggagagaaagacttgaaacttttgtaaaatcatctggttaaagtggaaaaatcaggccacctctagtctaaagtgctctatctgtttcatattataagttattttgatttttttctagtcaaacttctttaaatttgatcaagcctataaaaacattatagtacttttttaacacaaataaacatagtatcaaaaaaacattcaatgctaaatttaataaaactaatttggtatttagattgttgttgaatgacaacaacgttcgtcgaagaccatggttcactcttggtggaagagtaaaacaatgtgtattaatattgaatttttgggatcccccattacatgtcccttatggtctatttatagtctttaatacgaactcatacaccctatgactaatatataaaggggatttacataaatacccttataatagggatatttataagggtaaaagtaacaatttggccataggcttgttagtggaccgtgacatgggccttctttggcaaattggcctgtttaggccccgtgttctttaattgtgatggcgaaaacgcctagcttggtggcaaatgctttcagctttgccctgaggtagctgcttgtgcaccaattggcacttcgctctggcacttcgccttgggcattgacttgtttcgataggctcggtcgaaggttctcatggcatgcctctaacatagatattgctaaatttttctataagtttgatcaaacttaacaaagtttaattagaaaaaagttaaagtgacttataatgtaaaaggagggagtaaaacttgggtaaaaattcgtggtctatagtacaattactttaatttgacacgacgatgggtagcttaaatatcttgtttgtacaatgagaaaaactaggtttatgatattttgtacacagttactattttaccaaggactgtaaccttcctgctattaccattttaaagagatatatatgtaccgtgatatttttctaaaaagttcgaaccccacaaatgttcaaaattcaaaccgttcaaatttccattggattcatccccgcgaatggggaatggggacgccgttgctctgcggccgacggccccacctgccattctccccgctacgccagccgcctagcaaagcagccaccgcctcgcaagctcccacacaccacaaccaactcctcccctcccagaacggcaaaacccccagaaacgccaaaccctctcgccacgaaaccctagggagagccgcggcggcggcggccatggcgaccggcgacgacaagcccccctccctcgacgccgacatcgacatggccgacctcgccacgctcgacgcacccgcgtcctccgacgccgccgccgccgcccgcttccgccccagggccaagggcaagccgaagccgaagccgaagcccgagcccaaggcggaggattcgaagctcaaggcggatgattcgattcccatgtccaagcccgaggagcccaagcctgaggctgccgcgccgatggaggactcgatggaggtggatggggtgggtccgagcgccagcgccagcgcggaaggggtgggagctgaggaggtggaggatgaggaggactacgtgctgcgggagattgacgtctactttacgcccaagcccttcgacgaggacaccatggtaatggctgctcgcagactcccttccgtaattgtgctgtaggggtggcaaatttgctaagttgttacttgttagtagtagtaaggaattgagctaatttaaccagttccaacctattgacccttttcctcttcacatgtacatgtccttgtagccaataattcagattatttggcctggcctgcacaaactgttctgctcatttttttttgtttaaagtgttctctatgctttttttgtttggttaatggaaaataaaaacttctctagtaaagttgtgttttgcatatagaaaattgactgattaaattaacatatataaaacgttaatagctccactacataagggcttttttccatgtttcaatctgataaaaaattgaacaggaaaatattttgtttttccttctggttgaattgagatacactgcaagtttgttggagtcttttggcagatgctatttttatcatatttattgacactaaactttatcatataattcacagctttacgtaatgcaatatccactgaggccgtgttggcgcccatatgagctaaatgaaatatgtaaggaggtacatgcccaattaactgtcctcttttgatgatttatacctaatttggaatttatactgtactatttaattgtactccaatactttattaaagggattatgactgtcaggttcgtgtaaagccattgagttcaaaagttgaagtagacttggatatcaatacagagtgtgaaaattatgacccagaggttcctctgccttctagactaactgaacaggtgatcatttcctttttgttttcactgaattaatcacatcaaggttttcctttgctgtgtacagagcaaactcttatgtatggccagcatatttctacaatccgcatggtgttcttattagttttggaataactcgatttcatatttttgctgttaaatgtttacgttcatctctgaagtacatatttcatagtattgccatttgagtgatcttttgcagtatagttaatcttcctgtctatttcaaattttttggataaaaatttatcaatttctgatatcatcttgatctaattattattaatttatccattggcaaaaaaaaaaaaccattgttactgctgaacatctttagttacttaattggaattggaacaacatattttcctgcatcgtgttctaaacctctagttcattttagaatgtaacattagtaatcaaactagtttaagttaaatttcctgctcttttttttgcggggaaatttcctgctcttatgatgttcttatgaattagttaatagttcactttcgaggcaagaaattggtatcctctgtatttgcattagtataattggtatttcaccttttctttttgttattttcagacactatcatcatccaaagcagctgatgtggctgattatgcagttggagttcttagaggcaacttggtaagcaacatgagaatagattgtaaggttaacagttaatgttcactaattgcactgagtagcctatgcctctatggaggtctagcatgctacataaggtaaagcaatgaacaccattccaaaccataaacctgaacttggtggctttgatggttgactactctttttaatgtagtagtgtaattattggagtggtggttagtgctttggcttgtgtataagttgctacctcccaatccaaaagaaacaaaccattcataagcaagcccttgtattgtgattaccggttgcttgtcgcacattgatcaggcactctactcatgccagtaagaatatctatactccttacaaaagggaatagtggtggtggtgctgcctccctaccaccaactcccagccttttattttgtagagaaaaggacatgtgggctagagggcccacatgtcaatcactgacaccactttttacttttttgtggaaaggaaaaaaaggatagtgtggggccaaagggtccacatgtcagtaacaaatatatacatcaatcaagagatgataataacatgttaatgataataattctttaattaattaaaatcccgttgcaacgcatgggcaatatgctagtgttcaagtaaatattcagtgaaaacaagaaactgatgtatatgccagtgaaatatggtggtagttgtttgtcacactctataaccaaaacaactccaatccaaactagagataatgagtttggttttccttgaatgtgttcttgtccttggtatgtgataaatgtaattcagggcttgctccaataaatcttttttatctggtgaaaggcctttcgcgtgctacaagttggactttatcagagttatttaaagtgttgctgtattcattgaatagaaccaatatcttgccctgttttacaggttcatttgaatcatattgatgcagtgatgcaactgcgaccatcaatgttacatgtaaattctggtcgatcaaatgctaggcaggcacatggaggagcgagtagtgatgctagcggctcaactatgccatcagttaaggtgaaacatttagtctgatgtcagggctggtactattttattactcttttacaagaacaaaaagctagagaaacctcagaacaaccagtcagctaactaatgttcttgtaagttccatagtctcgacaaattttgttcacagtagcagccataaatatatatatcaacctgataagattaaacaaatgtatttgcatagaatccctcttgtatcccttttgatatgattgtttgagttatgtatggtcatgcatttcctattaattggagtaagcatgtaaaaacttctgaaggactgattgcctgttagtagccaaatgttttgttagctgagttgcacgatttgtttagtggtctactgattttaatgtctggtt

SEQ ID NO: 2045 - DNA, 6383 bp, Oryza sativa
gcttagtgtgcaactgagtgctctagtactaggtctttggatagaggaggaagtttttgtgcaaggctagagtagtaatggcgaggtgtataggttagaaattaccttcatttgttgtgtgctccacgaaaagtgagataggcgttaggtggtgacagccctgtccatccttcgtatctctccatgttcgggtacatcatagagcttaacggtggacttgtcctagcagaccatgggaggaccggtgcctgaagcatttgatagattcttacctttatcttaattaactaattaaaagacatatgaatcctctctagccactttatcttaggttgttgtcattggatagaatcttgatcatagataatacacacatgttccttgtgttcgatacccttcgaatacactaaggggaagtgttacaacagtgttccgtgctcttgtggatttatccgtgaacataagaaataccaacactagttaaagaacataaagaaactcaaacacttactttaataaaggaagcatccatcgaggtacaagcgagagaagaaggcaaacaatcccggctttctctagaactccgttagaagaatgccaacactccggcactccatcaaattcttggaggaactctgatattttggagcactccttctggagctttccctcactttctactaagccaacatactaaaaataaaactacaagtgtgttgtactatacttgagctgaaagttgtgtttgttgaagtatgtgaggtctcctcattttatagcttccaatgatggttagaatagcggttaacccctcacaactgtcattgggacttcatcagggctatccacgtgtaaggtggagatgaggtgggacaggatgggttcggccgacccctgggccccacatctctccaccaactttctccaatagcttacaggtgggcccctatggtggttaaggacggttggtcccacttttggtttcgactgacttttgggccctctgttgacggtcattatcgatcagtttcgactgtcaatattaccaaaatagagaactagtgatgcttgcaatgcataaatatgttagaataataatattccactagtattaggtctactaaccttttgcagagaataacaataaagtggaggagaatcgacatcaactcaaacgataaatcaattggacgatgtcgagaatcagacttatgcatgaatgggccaagaactcagaattgacacgatgaattgggcaaaaattcacaagtctacaaagtgaagcaaaagaggaggtcgtcagccgaagatgggctggtttgggccagcccatggttcggccaaaccagggggttcggccgaacccccatctccaccgttgaggccaaggttcggcatggacgtccaagattgcaccccaatgacggttggagggtacttcggacaatcccccttctacaaccgtcataaccacctctatataaaggcttcactctcttcacttcaacacacacctcaagcaagagctctctcatttctctcaagtttagtttagtagtatctagctggtggaataggaatagagtagaaatcaggagtccggaagtcttcggaagagttcgggtatggctctagtagctttcctttcctcttttgtaagctttgtacttttattagaatactcttctatatacatttatggtattgaaatactttccgagtatatgagtacctactttacattatgttcatattatactgaatatacggctagtttatctgggagatgatttggtgcgggtataatgtttgcttatgcaattaatctttgtcatgaagatgatattatagtagtatctggtagtttaggcgtggtgtctagatcacgggatatcattatttggggttatatgctgtggatgagaggtgggccgctgatggtgacagctcagtacgggtattcctccgcacatgtatatactaagttaattccctggggagggtattcctccgtatttagccccggttgtatggtcatgacgggctgtcgtaagaaactcggcagtcaggggtggtttctcgaagtaccaggagggcatcgaatagagggtattagctagtatatcggttaactagaatgtatgtatactatgatattagaagtataggaatagattttctttctcttttcttcccacttagcttagataatatattatgacaatgagtagctaatgcttgtgtgtcactctacccttggattattttaacccctgcttagaatatgattatcacaagtaatatataaactattagtcaagttctctctacatgatcttcccacggaataaaataaatacgacacccttggaatactctcgggtgaaatgctacaatggtatatccgtgcgcttgtggatgaactctgtaaccataatatatcagaagtatttctgcgccattactgggaattatatttctagtcatgacgttaagaaataccgacaccctccaatccttgtactagcgtatgattggttaggggttcattttcatcgcatggcgggtgtattttctccttaaatgacctgcatacatatatttgtcaaaactagtagaagtggttagtagtaaattcgtaccactaagttttgataatatgtttgaaatcttttacccaggagttgatggttaaagtttgcacttaacaaccgtcaacataccctaataatcttattgtactactagcttcgactttaaatttttagagctacacatacctagctctaaaatttataggaggtcgaaatctgccaaaattaaacctaaattaaggaaaatttggatactaaatgattgcattttagataccccacttttgatgcaaaattttgtcgtgacacacgaatgcctaggagattggcttagctccagtggaggtgctaaatcttgatgaggttcgggcgtgccagttaatttgatcctgcaactaactggatggaaatatatcaatgatcaaggagctgatcatcaacttaggggctgaacatcaacttagggagacgatcaacttatgaagctgattttgataaggttttgatgaattgactataggttccatttatgtaaattaaagtgtatatcggttaactaatcgatacatctgatagctgaagtccacaataatgataactcatcggccagaactcctatgaacaccgcataaaaaatatcggcttactagaattaaacttattagcaacaatgtaataaatcggacctaaccaagaaagtataagatcaaagataataaggacaacctatttggctaatagatctacacaaacatgatggacatatcgatcaatctaaagctacaatatgattaaagaaatagaaacttaggcagaatatcggacctaaccgagaaagtcctaactaagctgatatgattctaaacaacgatgcagttaaagatagaatcaatatatctgagaggcaacacttacttcaacttgaatagaatattagacctaactaagaaattcaagtcgggcccttaattaacttgtatagatggaatcaactagatcccgggtagttacaggcttacagaagatcaaatccattctgaaaagattagaggaatgttattcttaaagatattttttattgaaaatgttggaggactacatttcatttcattaaggagaaagaaagaaagaaagttgatatatatatatatatataaaatagtcccccgcaaaaaaaaagatttataagatcacttaggggtttttaccctccatttcttattcctattaggaataactcactacaacaaagctaacaactcttaaagaaccagatttgtacataaactattttaccccttgtgaatggatgatactccatattagaaagacattgtgtaaagtagagtttgtttgctaataaagcgaagataaaagaattgatgctatgattgttatgtttatggtacctcacgtcactacctttcatgtgtagttggcatttaattttgttataaaaatcatgtgtaaggtgcatatgatcacgataatagtagataaggtcaaccgttatacttttagaatggattaaccaaataatcaacaaatttggtacagtataatctaaagaaaaagcttaactttctttaaaaacatttcattgaaagtggtagcaacataaacttagttttctttttgggtggatgacacaatcaaatgtagctatagaagatagattttgaaaaaaatattgatatccccaccaaaaaatgttggataatttccatctttatttgcataagtattgctttgaataagttcaaaacaaaaataagggaatcaaaattaagcaagttccaacggtgcaatcaaacatgcatgtagcttatcactggtagtttaattattatgtcatcacacaataagttctcaacatacataaggctgaaaataactaaataagcaaatatttggatgtaactgcagcaagatcatgggagagcttggtagattcaatgctccatgcgcttcatcactttataattctttgcacccttgatacgaatgctctaaccccaggtggtgttgatggtatgagcttaatatcctcaagggatttgcagattggagccaacaacgtgagtaatttactaaccctttcatcacctaaccagaaatagattgtgatcttcttaaggtaatcagcggtaaattctttaaccagcgggggtgccgtgggtggctcttggaggcaatattcgcacacttcctgtaattgaaaatgggacgttaggttttctcactgtgcatgggaacaatagatcatagagcaaaagaggattgatgaatcgccatattgagcttcaaagtgagatcctctagcagtggtgagtaccaaaggaagtggagtaagggagagaattcgttggacatgcaccattcaccaagagtcaggcttattaagttgtcgaacattgggcttgtccaaatttccatttcaaatttatcctgtgtatatggggaaaaaaagaaacaatgtcaaatgagttaaagatataaagttaaagcagcatatggaaagttggtttggtacattgagacttcaaatgcccccataagcttcttagttcaacatagttgtcaacttctttttgtgtgaatgacctcttggaacaaacttagcctttatgttcctttgataagatagttttgggtgaatgacaagaaactagagtactcatgatgaaccaaacatattttttttagagaatacaatactatttatcttcttaacccctttcctatcttggtgatgtactttcatttagataagtttgtttgtttgtttaaatcccattgaatctcaatgttttaccaacaaagtgaagataagcatgcatgaaaagcatctatacctctcttaggggagcaatcaactcgatgcttcttgcctttgtaaggccactaactataccatggttgatctcttccccatcttgttcttccccctcgtccatgtccgctaaatcatcagtagaatgaaaaaactcatcaagtataactattgccacctccaggcatggcaatgtcatgatcataggagctctgtgttgagggttctttatgcacaaagacattaaacttgaactagatatgagaagatcttcaaatagacaacaattatcgatatctaggtgcaacaaagaaccagatgagatttcagggacctccaaagagcagtccctaagctccaaattttctagtgctgggcatgaagagttgatgggatagaagacattggcatcaatacaaacattgttaaggaccaaaaatttcaggcatatagaagtgaagtccacaaccccatagtccaacttgaaaggttcacaatctatatcttcagaaaactcaaccactttactgcttctcttaatagcatatgttatccaagagccagcatctcttgtatctgcagagtggaggcgcaaagcatccaacaaagaagagccacgttggcgcaacattcggttgacaaagttgcagaacttctggcctctatgccttccaaactgatttacatcaatgttcaggtatgctgatgaggtccaaagatgtctccatcgtgtggataacatgcctgtgtacacaagctccaaagctggtaaggtggacattatggcgtatagcaattcattaggaagattgctgattctgtcgatgctcccattcctcgtatttatcgagcttccttgatccaacatgtggcctgcatctgatacaaaagtgatttttccttttttttttgcataaagtagaacaacatgagaaagtatcaacattcaaaataaa

SEQ ID NO: 2046 - DNA, 16019 bp, Oryza sativa
caacatttttcatactttttatgctaaatattgtaaaattcactaatttacattattttcttagttaatatagaaaaggaagaaagaggtacaggtcatttaaacctctaaaataggcataagggcatatataattaaaaattcaattcataatgctccatgttctaccacaaaggaaattttgtgctgaaaatattattcatggacaaaaaaaaataacatgtcaaggtaaatattgcacatttgagaatggctttagtactagacaatgccttcttatttgtggtgctttgcactggagaacaatgttttttttcttatgattaccatcttttgtcataaccatgccatctgaagcttgtttatgatgtggttgcattattacaagcccattgttgtgacctgcaaccctatgctgccgttgcagattgacaggagtgctagagtcttgtggaagtagtggattagagttccttttgcttttggagttaaccatttgcagtgcaatcctcaacacatagtctgcctgagaaattggaagaaaaaccaagatttgtcaaagttgcttggtatgttatgctaagcttaaccttgaagtgaagctaacgtgacacaaaaaacaccaaaaacaagagtctctgtatgtgtttataataatggaagtatgttttgggttttgcatgcaccaactatgagcacataattatttaaccgtgggtagcaagatctaaattttgttcgtagagtcatacacctaagattccaccggactcctgatttctactctattcctattctaccagctagatactactaaactaaacttgagaggggagccactccacacaaatacaaaaaagaaaagcagcccaccctcaacaacacatctccgtgcaggggagggtctattgtgtaagcacgtgaaaagaagtatggtaacattgtaacggtagttttcatatatgtacaacataaaatagtttaactgacacattttgctctatagaaagagaaataggaacttgccattgatctggcaagaagaattaatcacccaaatttgagccgcgcaaagacgacccataattgggtgctggggatttaaacctacacctccaatcctattaatatcctagcaaccaaaccatagcctagttggtacatattttactacggaatcaaacgtgttttgaagtctgaacattatttgcatagttccaatccatagatgttctaggcatatattaccaacatttttcatagacctcatgaatcatactccctccatcctaaattataagtgtcagggttatggataccacatacctaatagtagttgactaaatctcggcaggatccaccacataccatgtcctatacggaagcaaccttcggatataggaggagttccggaaaaggaaagacaaccagagttctacatggaaacgacaaggactacccggattgtatccatattagtttccttagttctacttagacaatgggacacctatgggtataaatacaagccccctaggaggacagggggacacccaccacgggacaatcaacacccaacacaatcaacatagaagcctacatacgccaagacacgccgccggatatcgactttagggataagcacgactagtaccctacggtgtctccggatactgtcaggagagacgaaagcgctatctctgatctcgctgggcacggattcgaggtggaaggctaccctgttgtcgactacgagtcagatcgtcagaccgccatgtcgacaacagttagataggctaccccaaatattgtactggtgtgattatcatgaataagagcaataccggcttcggccaacaggatgtagggttattacctgacagttcaggagcccgaacctgtataaaaatccctgtctccatctctttacctcagtctcgcatatatcctagcaacgacgatccccatactatgcaaataccagaattgcgacatcaaacgtcgacaataaggcctatatttttttacacggtattcaatgatatactttaaccactaatttatctcatgttatgtttccaacatatatgaaattagcattgtatgaaagtactttaaaatatgaatatagtgatataacatgcataatatttagcatatatatggttagtatgattattagtcaaaagttatcaagtttattttttcttagaaagagggcgtcctataatttgggacgaagggagtatatatttccgctattatccagaatgtatcatttccaagtcaagcattaaagtagcatcaaaaagtgctaatcagtctaaaagttggcaactgctaaacttgtgtccttacattggaaagaggagggcaccatgataggtgaccactccaatttattcccttgatctggaaatcgttacacatgaacgaatatgtttcatttatcttcttctactgaaaccacaattacctccatatatagttaatagcatacctagcatacctttctagatatgaagatgcggcagacacatgatagaggatttaatttgttatgaaacagtagggtgcagatttagccagctcgatcaattgtactccctccttttatacagaatgcatgcttttcaaaaattcaaactttgtagattttgactggtaacagtaatattttaagtatatttagttataaaaatgtagcatgtttggtatagaccatatttcaaggggctttcacatcatatcagttttctagctactaacagcatattacatacaaatctttctaagtgaaaagagaatctcaaaacgtcaccttattgatccacataagcaaaaaattctagaccatcagataaagaaaaggagggtggaagtagccgttggattggattagtaaaaaaatagtgaaacattattctagagctttatagccttctttcttacagtggagagagagagcgcgcatatcaggcaacggttatggccggatggactagcttggccgatcataaataaatataataattcaagcacaaagattgaaaacatatgctctaattaaccaaatggtaaaaggaagaaaagataaaaatatgattacgtacgcacatagtaaccatcatgatgcttaaaggtgaaatctccaaaggcaatgaaatatcaataagacgcatgcatgctcgacgaaacattcatcaggcaacggtggcaacggttatgcccggatggactggcttggccgatcgtaaataaatataataattcaagcacaaagatcgaaaacatatgctctaattaaccaaatggtaaaaggaagaaaagataaaaatatgattacgcacagagtaaccatcatgatgcttaaaggtgaaatctccaaaggcaatgaaaatcaataagacgcatgcatgcttgacgaaacatttgagtagtgcaattaatgggtgttcttctaacattattggtgagtaaacatggcaaaccattttatttcttcaaatcagacaacaatatttcaaaacaataataaaaaataacatcttaacaactatagttacgattatgatgctatgctcaaacatatacctataatatttagcaacgacaggactaataaaactactatttattttcgtgataacatttatttattacatatcaatataaatatatttgtattgaatgtagatttttggtcaaataagtttttccggacacctattaagtacgtaaaaaaatatgagaatggtagggtcatgcaaaaatacacacggtgattagtggcaaggaggcagcttaagcaaaagcgtaaaagatgattagggagggagaaatggcagcatagaagacaaatacaaattaaacccaaccctgtccgctacaacaatcctaaaactctattctacatataaattatttttaaaaaaacatacaaataaacccacttctcatatttataaaccgcgaatccaccttcgccgatgagtgtagctatagactaagcataatttatcaatacaaacaacgtgtaaatgtaaacatgtttagtacatagagaggttaaagtcgtgcgaacgcacgactatatacgctagttatgtgtttaatgtacttcaaatttcaaggtgcacttccaccatatttgttttcttagctacaaacattaaatgtattatatcataaattactgtttgaccaattatttctcatatataatgaggagggagtaccttgctggtagcaaccatgtaagttttgtcctcttcattagtagcattatcctgaatcattttcattcttccaggaaaatctattggaaattcctccagaagcttttccatcctgtatacataagaagttactacttttaccaccaggtctataagatatgcagtacaactttatgctacatgcatataacttcggttgttgtcactctaattgattgagaatggatagtgtaattgtttttaatgaattctagtctgagtactgcagctgtatgtgttacagaccataaacttacaatgattgtattaggtgtaaccagtagctaaatattgagatggcactggtatatcatttcaatcttgattctttaattaatgctctagttcactaacccttataagaatgattagttaatttgacacatgattatctgtcaagatgagacagtaacatagtcatgtgtcgacttacaaaacaatatggctgcaaatattatagaaactagttgatttcccacgttttgctatggaaattattaagcaattctcgagaaaatagaaaatatctaattccttgtatatacatatatttctattagcatatgtatataaaattgactgaatgatggttggaatagtaaatatgatctgatatcttgattatatgattgtccaattaactatctgattaaatatatagcatttagatggggtggtgattaatggcattgtttaattagtgaggaagtggaggagacttttatctaacggctaataatggaaagacttgtcgatccaatggttaaaactattttgatgacgtggccactacaagataattaagctattgccaccaaattattacaacaaaaaatatttcgtagcaatatattgtactatagcaatgataatttttctatggcaaataattatattttattgcaacgatctacaatcgttattttatttagtacttttgttgcaatagaaaatgagatatcgccacgaaaaatcttactgttgcaaaaaacatgttctatagccacaattttaatttttatggcaatttatataatacatggtacttttcactactttttgttgccacgatccacaaattcattgcaataaaaaaattgtcgtctcataatttaacttattttttttcatatggatacggattgagacaaattttatatggaaattgtagctctcgacgagatctataattttatagttgataacttttttatttgaaatcttttagatatttaaatctatgattcaaatctcagttagataggctcaaatggaacgatatgcatattccaacagaattgatgcgtaggtgagttggtaaaggagatcatgcgtgaaggataggtcttgggttcgaatcctagccaatacatggtgtaaagaaataaatataaatagataggatgatagattaataatttaaacttttaatttggtacgtagaactaatgccacatatggagtggtggcaataacttttattacaacgatgtaaagtgttgcaatttgatttttttgccacatccattccgtggcaacatctaaatttattaccactaaataaaaatcgttgcaataacctattaccacgctatttattaccacggctagcaacgattttaaaattgtggcaatatgtatttattgtcataattttagtattgatgctacgatttttttcgtggcaacaaatgatttttttagtagtgggctaaacgtgatgcctgtttgtggtctcacttatatagaaagcatagatttataaatttggagtatagcttataatggaaggctcgtcatatgtatatcctttatatttacaccaccatccacacgcatgacacaaccctcttgggtcggtgggatcttatgagcacaagaatatatatttgtgcatgtagcttttactgatctcatttctggattgatgcttggttcgaatttaaaatttatgatatatgctagtaaagcctaaaaaaacacccttaatagtgaaggcagcatgactcatggttcttatgaagtgtatgttgcccaatgccaaatatccttttattagagtgcgcagcccggctcaccaaccaaccgtgggcgtgggccattccggtcacattgggcctgctccaccacaggcccaaccagagccacaactttaggtcttgggcctacacaacccaaaagactagtctgatgggtaaggaccgtccccaccttttaagttgtgctcccctatcatcaattaccgatgtgggactaaacccaacaatctcccccgtcacatcaatccatgtgaccccgaagacttgttacttggcctccccatcatgtgacctatggaaatcgttccgggttctaaacctgggctctgataccacttgttagagtgcgcagcccggctcaccaaccgtggtccattccggtcacatttggcctgctccatcacaggcccaacaggagccacaactttaggtcctgagcctacacaacccaaaagactagtctgatgggtgaggaccgcccccaccttttaagtcgtgctctcccatcatcaattaccgatgtgggactaaacctaacaatctcccccatcacacatcgggcccaacaatctcccccgtcacatcaacccatgtgacccccgaagacttgttacttggcctctccacaatgtgacccatggaaatcatttcgggttctaaacctgggctctgataccacttgttataaaagttagtcaatatagcggaacgacgactaaccatctcgatatagcatggtgattctaccacttctaggtggcatatattcatcaaggtggagtttgttagaatagatgtcgaatatactagtcctatttggttacagttggacttggagttggaataggtgtaggatagagttagagtcgaactctgtcatatgctctctcttaaataaagaggggggcaccacaatgtaaccatggcgactacgatgtagtgtagacacgcagagagacgatgatagcgtggccatggactcttagcggctaggagctatattggttggggaggagcgcccataattagagctctggggatgtaggcttcagttgaacctcagtaacaagtatcatgtgttcatctggcataccttgggtgatcaatgactgaagcgatcgggaaggttagtcgtcgttccgctatatcgacgaacttttataacaagtcacttgttagagtgcgcaacccggcccaccaaccatgggccacccaggtcaaattcggcctggtccaccataggcccagccaaagccccatcatcaattatcgatgtgggactaaacccaacaatctcccccgtcatatcaacccatgtgtgaatgtgggactaaacccaacgatctcccccgtcacatccccgaagacttgttacttggcctccccaccatgtgacccatggaaattgttctgccccaccttttaagtcgtgctccccatcatcaattacccaacaatctcccccgtcacatcaacccatgtgaccccaatgtgagactaaacccaactatcacccccgtcacatcaacccatgagacccatggaaattgttccgggtttcaaaccttgggctctgataccacttgttagagtgcgcggcccggcccaccaactgtgggccacccaggtcaacattgggcctgctccaccacaggcccaaccggagccacaactttaggtcctgggcctactcaacccaaaagactagtctaatgggtgaggaccgcccccatattttaagtcgtgctcccccatcatcaattactgatgtgtgactaaacccaacacctttcttggtcttttctacagagtgtatattatatctctcccaattaaaattaccctgttagaagtaattacacattctagattgttataaaaatagtgtttttgaacaatttagaatatacatagaattcaaaagtactttgtaaaaataaccgttgagcagggttgacagtattggtggttaccacatggtaaacgtagtaaattatcttggtggttcgataggataaaccgatgatatgatttggcaaagaaaatttaaatttaaatttgaaaatgaagaatattcgaaatattcctacaagtagtaaatacattctagtgctaactagtaaaatattgtgtgaaaaaataaaaaaataacttcgttcttttgagccaaaccaaagtggaaataacaaataggaaaaagaaaagaagaagtgggttgggccatttctcgggtaccatgtatgatctcggggtatatttatacttcaaaactaacaattagacatgcatgtaagtgtaaaatagaatattggaataatcattaaaaatgtataaatagatgtttggatggaatgtagggaaaaaacatagaaatattaaaaaagatgttgtgcccatcagttcaaaaatcaaagatcagtgcataaactatatttgacatagcatcaatcgaaatccatttgttaatttagttcctctccctattgagatccaaccaccgcacacaagcccgagcaagaatgaattgattcaaatatttgagctgccagagccaggcaacggcgagtggagacgcgaggtcaaagcagatggtgacatgggctagcttgagcggcagtgaccttggacttgagcattgctggcaccaactcaagcaggcggaggcatggaaggcagtgggctggcagatcaccgttggccggcatggcgtacgtgtgctagagcaaccaaaacagtgatgcaccgttgttgaagccatctcgcccaagctcctcatcgccattcccatggttgacaaatatgttataagctgcctgatcttctcgattccacaagaaaaaaggaaatgaagggaaaaaaaagataggatgtgatggaaaaatttcctacatttatcgcgtggaatctatagcaaaggaatatttcatccggcattactattaagtcattgctataatctaaaaggcgctatatatagtgatataatcgataggaatctaaatcctacaattttccccttgttttcctccattccaaaggaaccctaaaggttaatttaatctatattcaaagcataagcatgagagtgaaaagaagcaatcttacgtcatctcgattatcgtattgcgagcttcttgagaaatttgggtcctccagttgagggattgtcctgccatgttgtttgagctggaaccttccatttaaagagaaatatggtttccttcgtgaactgagttgaaaatgatggaaacaatggaaaaggaagagttttatcttgcacatagagtggaacaagcgatcggagatttataggggggaggggtggtgattaagggcatagatggtaatattgcattcggcgcgtgggtagttgggtgttgcaaagtttctctttagtgactgttgttttttgtttacattgttacgtgtgtgaacctcgactaccacgtgttggtatagttgcaatcggtcataatacttgacagagagcatgcgtatcagcatgactatgctcctcctatgttgccaacaatctttattggctgcatgcgtaatggtcccgtgaatttggcattacatatcaagtatacacatacaaccacatttggtagtagtttccagttgttcaccatttcaatgcttggctgaacaacatgtcgacgacacaatgtattgtccttagagaagatcagacaaaattcctacacgagcacccagcagcgagcaccctagcttgctttgcctctctttcacgaggaacaaccatttcacggtatcacaaccattgacagatggcatgtgtatgaattttttgaggtggaaaacaacagtccgatacaaatgtatatccttgttcctcgacttgaaaaaatgcacatgaaagtaagcaacaatattgaactgataaaatctatctatatgttcttggttctcagagacaatagatgtctagatagccacttgacttagccagatataactagactgatctggcaaccgaaacatgatatatatctaccaccgtaattttgacaatttgactctttgtaaaaacttattataataataggccgtgccaaaaacttatttcaaaaataagccgtgacctcagcgccataggaattggcgctgagatccaccatctcagcgccactaattttggcgctaacctccatctgatgtggcttgtattagctacatcatcaagtggtccgcgccatactctttggcgctaaccttgacagtagataaaatgtaaaaaacggtgactcctatcacgtaggtatcatttgtgtggtggtaatgcgctaaagattctagcagtaggtcctgggttcgacccctacgacatgcacattttttttactttttcctactatctgctatagcctaatttgctaccaagatcataagtttggcttataaaaatcattttattctggactagacaaatatgaaaaggatacatattataaaactttttagatatttccatgtattatagattaataaaattataaatatattcccaacatttaaaaattattttgaacttcagaaaatatgtaaaaaaaaatattgtgcatgttctcaaatttttatataccttaattgttgtaattgacatgtatatcgtcatatgctttccaaatttatttttattataataaaattgagaaaatatgtcctcaaattcttcctaataatgtgtgtgtgtatatatatatatgtatatatatatatatatatatatgtatatatattcatatatatatacatatatatacatatacatatatatatatatatacacacacacataacattaattcatattatttagttataagtaccaagcatggtaaggaaaaaatgtaaaaagatgaaacaagaaaatggtactgtgggttcgaacctttatcctttgaccttagattaaatcacctccaccactgagctaccgtaccatgaagctgtgaatgggagattcgtctttttagccagtacagaggtcagcgccaattggcgctgacatatgatgatgtggctagtttgtgccacctcagatgagaggttagcgccaaaattaatggcgctgagatgttggacctcagcgccattgggtgacggctcacttttaaaataagtttttggcacggactatttttagaataagtttttgtaaacggtcaaattgtcaaaattacggtatctaccaactgatggatgacaaacaacccgcaaaaattatagattgtacattatattgtagtacatatgcaaaccagcttggtcacaccgatatcttggattcatctccacatgtatagagctcacatcaatatgttttactctttgtagatctatccttgtgcacagcatcaatactaacggcaattagtttctctccctaattaactttcttttacagttttacctttgatgtacagtatctagcaacgcaaatctgatgatactagaagggtgctttacgtacacatcgcacatcaccttaggtccttaaactcccccatcatgtctttacctaaacttaattgctcttgatccgctgcaattcattattatctctcaaaaattcctcaagtcaaaacaaataaacaaaccataatctccactaaggctacatctcaaatttaggttgaaataataagaggtagacacttgatcatttgcacagatgtcagttgacttcaaatttaccatacactacatattatgagggcctgtttggggaaagcttttggcagatgcagtttctagcagaatcaaaaaaacttcccccaaatattctagcttttagattctgagaagctacttttcccagtttctccatattctcacgagctgaatttctaccaggtgttcctcaaacagacccttagtaagtgacgtagaagaaaagagaatgctaatttagctaagtttattaataaaatattaatatatggtcttttatatacaaatgtacaccctttacttctagagcaacaacatatagtttggaggagagagactactatagcacaccgatttcaaagtagtacataaaggctgtgtttagttggatccaaagtttggattttggttgaaattagagatgatgtgactgaaaaattgtgtatgtatgacaggttgatgtgatgaaaaaggactgaagtttggatccaaactttgtatctaaacacaaccaaagcatcaaatgacgtagagtaaaaaaatgtttgcccatttgtcaggtgaaggtagagaatttgatgtgagagataaagaaatattttcttatcttttgtggtctccactacaagatgtttatacacacaaacacattctaaaagtctcataaaaggaacctccaccttgatacctcttttccatattacacgatactaagagcatcaccaagcgttttcaacaagactttctcgagcattttggcttgtctagtttttgcaagtgaggaagctcatctttggagttcaaccaacgccaaggtgttctcattgattatgaatcccggttaagtaggcttgtgaattacgttgttgggagggtcttgttgaggtgctttattcttctcttttgctctagttctgtttttttctctttttgtgttttgtgctgggagaggggaggggccggtggctcatctccaagatggggagaggtggagaggtgagatgggttggggctggaggaaatttatattattttttagattttgaggcgtccaatttaaaattttataactgcacataaattgaaaaaaataagactaaaatataaactatctaagggctaatattaaaaattgaaaccatctccaaaaccattttgcattgtgagaaaaacccatctcaaatgtatagcctcaacctatgtggatgccacatggcatcggatatcactcctggataaattgcacaaaccacccaattgtcactctaattttgagattccaccccataagcccatcaccaacacacatgagtagttgattcggcccattccttctgacatggattcgtagcagatcatatcagctaggccaggctcgtctagtgtggctatgagttgggttcaactcgagctcattcttaggctagttagaagtatgaagatgaccgtaaatgacgtgagggctgagcgtctaggctatcgatgatagtgatcaacaacaagcttgcattggaagaaatgagacaaatcaactactcattacacaaagggggcaatttcaacctggtagtgttgggtgtgtaggcatttacatcaaaaataggttatgtagtagaatctcaaacctatagtgacaattacggtggtttatgtaattttgcctcaacacctattcatgccttaagagcaagtattgtgagcccctacacacttgcccccaaatgtcacatagcagcggcagaccctggaggggtgccaggtatgcaccggcatacctacaaaaatctataattttttactagtagtatgtagtatgcatcaggtgggccaaaacattttatgtgtgccttgccaaacgaaagcccaagatgtacaagcccagaagttgcacggctagaagatgcccatgtgcatctatgccctgttggctggcagcatggcactcacgcgtagggtttggcacttcgtcggactagcaggcgttggcggcggcgcggcgcggtagcgcggccctcagcatcagcagcctcacggcgagtttaggcgtcgtgggtctcgtggctttgtgactgcacagcaagctggagacggaggttgccagccaccggctagacactagctagcgcctcggcgcatagcggcagcgacagcggtgactgcacgaggaaggcaacgaccaccggccaggccaccaaggtccgagatatttaactatttgtcatttttagatgtggcaattaactatttgccactagacctatatgctatagacacatatagatctatatgtatttgagataggggtggcaaatagttaaatgtcaaacctaaaagtggcaaatatttaaatgccccgcagggtccagctctgggcatcatccgtccatatttaagtatactcgttcactattattagcttttttgtttctctgatacttttcttctcttaacagaaagagagaaagggagagagattgattgaagaattgaaaacttgaatgaatgagtgagaaatgtgaaatcgatgagttcgaacttctaaaattgaatccgcgtttatgggatttttacactgagatcaagttgaatcattggaaatatgaagaggaattgtggcatttctttctatagcaaggaaccatcagcttcacctaggccatacccgatgcttctttcttataactgaatgactgatggtgttgggaaattttagaagagtgattatccccttatgggaaacttaaggacagggatgaagactaaaaatgagttgtaatcggtgttgttctctgttccaccttgggagtgttaatacaacaccagttgaataattatattgtacttcccaaaaactatattgttggcattaagcattcaatttacctcttcaaagggggacacacccaggaaaaaaaaatcctacggtgaggtggagaagagaacagaagagagagaaggggagaaatgagagaaaaggaagaggaaattgaacaaacaaaaataaatgaaaattttagggccagttcattagagttagtttagatgtgatgtatataccacccctttaataatggctatcatatggataacataagaggtgacatctttctcttctataaaaaaaaactaggctctaaggtagaggtgtcgtttggtcttagtgcaccacgtccccttcacgtagacaatgttgtgctctaatgagccgctcgtcccctgctagctagaacccggtggccttgttagagagaagcagaaagatttcctgagaagcagaaagcaagagagaggtagaaagctagagagaatgagagagggaatgcgctgatgacctaggaagtgtcgttgacgaagagactaccaccgccaagttccatgtccaccacccagcaccgctgcgctttgatctcactgaccaaagctgcctccggtagggaggggtcacgacgactagatccaaacgtggagaagttcctaggcccaatccgccttccatccatgacgccaaagagattgctgtgtcgatttgcattggagggactcgccggcacagcgcagcctcagtctcctcgcacccgcaaccgctacagtacacgaattaaaacctaattgcttgctagtcgtccaaagctagttacagcaacttctctcccacgctttctcatcccacacaagagaattaattgggtgtgaattgaaatgagacagaaaaaattaattaataaaactaaaaggtaatttatgggaggacgtgtgttgtagttatatccgtcccataaaaaataaacatagtgccaatgtgacacatcttagtactattaatctggacatacatatatttagattgagtaaagtacattggcggtccttaaacttgtagggttgtgtcatataggtccctaaactctcagaacgcatattcaggttctaaaacttgtcaaagtgtatcatttagatcccaaatcgacacatcccctctaggatcctacgtggcgttgatgtggca

SEQ ID NO: 2047 - DNA, 8991 bp, Oryza sativa
agagaaggataaaatatattttcttagcacaagagcaattattcacaatatttgtaataatattattcttgtaccgaagaggaaatcaagccacatgaattaaagtggcggctagatcaaaaggaggattttagatatttggcgataaataagaataggtttggaatcaaaggattggtttaagatcaaaggatgggtttaacaattaattctaataaaattggaattgctttagtttaggttctagcacaaaatggaaaggttgcttggaccataattcataaaaataaaaagagttttcaaactaaatttaaataaaggaaatcatgatcagaggaaagtatcaaatcgagaaataacccgagatggttttaaatgaaaaccacaaaaagaaattaaataaaaggagaggttttgaattagttttaggaggtctctctaattataatattctaggtttaaggtgttaataagaatataagaattggcatgatgcataattagaaaatagcaaattttcagcatgttacaaccgctgccgctacctgtcgccgtcgatgctaccgttgccgccgctgcccgccaatgccgccacactagctcgggattgggaggaagattgggggaggagagaacgggaggaaagaaggggtgaaggggtagttgagtggcattttcatgtaaatacactaaaatattatagggtagtgggtcttttaaagtggagtggagctatggagcagcaaaaacctagctccacccccgtagtttattttatagaagtagctctgccaactccactcaaaaaaaggtaaatcttgaccgtttggcacagctcctgctctaggtaagttggagttgggagctaaagttgtgccaaacccttaacaggctgtctcgcccaaaatagaagaccctatatatgacttactagtcaatgtggctccggtatatagtacagacaagggatcgggccgacggttaaaccaggaaaaaccggatttatcagtaccctgagtagctcggtttatttaaaagaccgcctccgcaattgacccgggctgtaatcggccggtttttggcatgaaacggtgaaccgaagcaaaccgagccagccgggtcaacaagtgtagcaacagaacttgggccatctagaggcccatgtagcatggcaagcccattcattcgaaatggactctaaaataagagtctgtgttgagaattggtccctggctggtgggattttggcactccatggtgaccaactgagcagctgaacctggtttgctatctaaacatgtcaagtgtccctatggtttcaaaacgcagtttaaccagtgaacagttcactggtcagacaagtggaccgatgaaacaacagctggtttaacctccgatccggttttttctactatgctccggtagagtagttagcaaggtcgcttcttacatatataggattagctattaaacctacaaacaccattaagtttcaaattcaaatcaaaatattttttcccacatatacaagtatagtcaaatgtgcctcacaatttatccggatactaaaaattgaaaccaaacaactcatgtgcaactttactctttttttattagagtaaatttcacacgaaccatcatttttctttaccaagataggttatatgcaaacttaatgacatggagtaaattctctcttttttatttgcaattatatttcgatttgagcatttaccagttaccccccccccctcccgggttgatattatctctgtcaagtaataaaaccatagtattctaaaatgataagtagattgcatcaaagtcagactaatacggataaaataattgttatctaaaaacgtactctttaatttaccaatttgcaccatttccaaattagaagtgtttcatgtccgtgtaatgattcatattcatctctcccaaaaccaaatttgtaactaactattcttttgtcattatttaatactccctccgtccaataatataagggattttaagtttttgcttgcactgtttgaccactcatcttattcaaaaaatttgtgcaaatataaaaaagacaagttgggcttaaagtactttggataataaagtaagtcaaaaaaaaataattccaaaatttgttgaataagacgagtggccaaacagtgcaaataaaaactcaaaatctcttatattatgggacggagggagtacaagattagttttgagttttgacaaatgtttttataatcatgtactcctactactaagtgaagataatgaaacttatgaagtgtgatatcattttctttacacaaaatatattctttcaacattatttatttggcaaagctatacatacttttaatatatcaaatattaaaacattttactgttcaagtccctatcacctactccttcccgttcatagttcttcacattttagacaacgacatggctttcaaaacatatatttgactacgattttctattaatatatacaataaataaataaatatttacttttattatagtaccttttaatactaatctataatatgttattttagtgcctttaaattaaatacttaagttatgccaaagttcttaaagtttaaccataaattatccacaacgttaaaaaatatgaaaccgaagagagtatatattactccctccatccctaaatgtttgacgccgttgatttttctaaacatgtttaaccattcgtcttattcaaaaaaaattaagtaattattaattcttttcttatcatttgattcattgttaaatatacttttatgtatacatatagttttacatatttcacaaaggtttttgaataagatgaacggtcacacatatttagaaaaatcaacgatgttaaacatttagaaaatgagagagtatatatataccttgtgcagaatgaagcttagccacccagtgtacaaacacccaccagaaaatcaacaaagctttaagctgacataagacacaaaacacaccccttcttaatctaattatttgacgcgtactaaaagagagaaaggttggagcccgtcgttttccaggatggacaaatggtgtactgcgacgtggcgtcggccgattgggctgtcggcgcctccacgtcttgggtgcttcgcactatccttcctgacgtcggttttaaaaatctgcagtttctcaacaaccaagagggcattgcccatgatttaagggaaaaaatgaagagccgatgcccatcacaagtcactgaaatgtgggccatatgtatagctggggcccacatttcagaatcaattcagttgacttgggctttgctttttcctctctctatatatttttgtgatgagggtggcagatgcataattcctccgtcccaaaaaaaaaagataaactctgatttccgtatcctatttgaaaaaattatgaaaaaaaattaaaaagacaagtcacgcataaaatattaatcatgttttatcatctaacaacaatgaaaatacaaattataaaaaaatttcatataagacggacagtcaaagttggacacggaaactcagagtttgccttttttttttttttgggacggagggagtatgcttgtggctttgtgggaattgaatggttctttgcacatatatataaagatgaagtaaatttattaacataatatgaagccttaaatatgtggagtatatattaagccaatggatggttgccactccttggcactacaactttcctctaggcaatgagagagagtacaaagttttaatcatgggtagctttccttactcctaaagttgccaattatttggacttaatagtaccccctctatgaaaattagaggtttgttttggcaagcagttggaagtgtgttcttgatgcttttcatcttctcctttctttgctttcacatctggataactcttgttaatctgctgtgatgacttgtcatcttccactctgtcttgtcttttctctgccttgatccagtccatttcttacaaaaccaacaaacaattcgttttgtttcggttgctacaattttaaatctttccatttcttttggtttcttcaaagatttgtttcccctttttttagacgtgtgcaaatagtgtgcataactgttcattttgcaagaattaatggccggagttggggaagaatgcggcgaggtggcggcgctgcgggaggctctgcggcagcaggcggcggccgcggaggagctgaggggcgagctggaggaggagcggcaggcggcggcgtcgggcgccgacgaggcgctggcgatgatcgtgcggctgcaggcggagaaggcggcggagcggatggaggcggagcaattccggcgggtggcggaggagaggatccagcacgacggtgactcgctggccttcctcaaggccgtcgtcttccaccaggagatggagatcagctccctcaaccgccgcctcctcgccgccggtgacggccgcgccgccgccgccctgagatccaccaggagagcttcgccggagatcatctccgaagaagaagaagacgacgacgaccacctcatctcccgccacggcgagaaggcgcgaaaaccatgcaactgcagcgaccgcaccgccattgctgaattgggcgcagacatggcgcagatcaagctcaacctacaaagtcttcacaccgaattcatcaaagcgaaggaagccaccatctccagaggcgattcgcaggcgcgattgctcgccgagatctgcgcgaaactcgacgcgatctccaaaacgcgtcaggattcatcatcagatgatcctgtgcaggtgagagtgagcagggaagaaggcagctcatccaaagggagaagctacacaaatagtgagctgctgatgaaccatttcattgaggtgagtgcgatcatcttctctactctgcttgttaggcccttgctcaaggttgctgcatccatgtcattctttaggtgcttcttgatattggtactagctctggtgttcagaaaagttttgatgaactagtgatgtgtactaagcactaagcagtggcattcagtgctcaggagaatagtttttttttcatttaattttgattccttcaaatttagtcactgattgtaataaggcatatcttgggtgggaaatgctcaaacaaaacttatcttcatcagcattttggttgtgaggaaacgttgcagaatgattacttgaccaagtcattttggaagtgacagtgtaacttgtcactaatccctgtggtgaaatgcatgcttgtctattaccccaaagcatcattatattattgtactaaattattattatggtactatttaggcgtttactgtttttcaataagaatttcttctgggttttcttaacaggcaatgatgtacataccgtgagatgtgtgaaggcctagacagcatttttattggtttttgaagattgttgacttgagtacaaagattgctgatttacgattcctttttctaccatattttctctgggcgatgatgtctactgtgtacatacacatatggtgatatgttgatagcttatgtaaattgtgacgtgttatacttcttttttttggtacttttgacagaaaaggcactgttgatgtaatgtggagtaaccaacaattgtaaggaaaaaaagattagataatggattttgctgagcgattgagatctaatcaaacgtcattttcatctgtaggtctgtaccatgtaagtagccgtaggttggcagaatacgcaatgaaagctactggtaacgttgcttcatccatctccaaacgcctactttgctgcttctagtcatctagagtctaccgcaaacaatgaattgtaaagttcggcaccaaacatttgaactccatgaaatttgacatgtatacatgacttagcaacaacaaactaaacagttttcaaaagtagaacacaatcatttcagagaaaaacaattgacgggtgttccagaaaatatactcctatttgctaagtcgtaatatggcagctctgcaaattgcccccttgattaggagggcagaaggaacttggattggatacacattcccaattaacactaacaaaatatcattctaacaacggcagcaggcatccattctgcaactacatgtcacatgcagtctcaacgttaagccttctgacggtatatagttcccagggaacgaaaatctggaaacatgcagtcaatgctaaccattcctggagtctggcctagatgttgtgaacttgcaataaacctaaatctcagatgcttatgtactgatttccgtaactctgaagaacttcaaaaactgttggaataaacaaaataaaggagtaaatcgcttattagattggcaataataacaaatgaaattttataataaggtcaataggtggtaacagaactcacgagtgagctgacaaacacagtgattaaaacgattccctaaaagctatagtaaatatttctgttttgaatcatcattgaccaatcaacagaaattcagctcaaaatagtcaatagaaaaactaacctagcatctaccagcaaatggcacctgataatagagggaggacgtttagatgtaacggtcatcaattttgacagagatggtcacttgataaggtaaataggtaatgtaattcctccatttcatttttcatatatgctgcttttctctaagaactaaattctcctcaatatataaaagaaaagtcaaagcatacctgtaatttcaaggaatgggaaacactttgagcatttacaaggttcatcatcgtagcaagtgtcagggttcatcaccatttttcaacaccaagtgtccatcttcagtcaagatgcagacctcagtgacagcctaataaaaaaacaatgtccctactttagaaagaatggatttccaccacataaacaaattcaaatgtatggcttaaatatcagggtaccatgaaattacagccagaataaagatagaaaatgaatcctcgaggtagccactgcaatcttaacagaacttgaacaatctcttacggttacaggtttacttaggtatcgtaaaagattgtctacatgagaattgctcgtatagttacaaaacatcggacatgacttgtctttgctagaattttcacttaaccccaagaaatgaaaggaaattgctgttatttgaagatatggtgacagctcacaggcaaattttagttttttgtgcaattactcaaagaaagaatgaaaagtcctcaaaaggtactagaattgccatgtaggagtgagggagctgtgtcttcatcattaagcacacagacaagctctagttgtatgatataatggattctatgcaacaaaatattttttcctgtagttgggtaacttcttttcttctttttatttttttgcaaaagctgggtttttcacagtatctatactactttaaaagagtcaagtggtggtggtgaatggtgaatctgccaccacccactgacatgtgggaccatgaagttggtgaatttgctaccacctactaccatgaggtgccatttaggagccactaatcaatagaccacccattcccaaagctatggaggatgggagaaatcatattcaacctgctccttgcaaaacacttcaactaagaatagttctctctcaaaatttcaagcgtgtaaactatacacaatattccagtgggttttgtgcctaagattgtaaacatcatccccactcgtaaaaagatagaattggcaattctttcttcgtacctaacataagacaccaataagaatgaagaaaaaacgattttaagaactaaatagagtgagcacctgtacattcacttttgacctcccacacagaaccactaagaaaccttaagcaaacaaatgcgtaatcctaacaaaatcctcaagaaaaccccaagaagacagtttaaaaaaaaacttaactgacaactggcatgacagacccctcccaagaaaagcaatgcaccaaaataattgaatgaggccagctaggcagaattatgcagtaacaggacaaaacttaaagacaataactgattccctccacacctgatggtagtctttttcatttagacctttctttagatgattcgctgcacaatcaaggatttcttgcttggttaatttcgaatctggatctttatcacggaagagcttaataagaatatttctgcaggggaccaagttaaccaataagtatggacttctctgtcaacatcaagatggtattcggagtattttcaaattctgcataccgtggactattcggcttcgcaggctttgcaacgtacacaccatgaacaggaacagcaacttggtttagtgacttttggagatctacaagaggaaatgaagcacaatttgttgcagcgtttgacagagcttgcagttttggtccatcctttctgtcagaagcatatttagctgccaactgcctcaagtctctacgaattgcttgaatactacatcaacatatatccaatgcaatcagcaataaaaagaatacggaaataagaaaaccaaatacaacgagttactgcagtacttggcactataaacagcactttatgcaacacaagtattggaaaattctgtacttgttcgaaacatgcaaatagaacgtaaaaggctaaaagctatcatcaacaagatacaaatgaaagcttttatattggtctgttgtcttgcaaaaagtgcctccatgcaaccatgaatcatctaatactaagccaggtaaagtttgtagaacaaactaacacaaaaataatatttaatgcaggtgaaacattggtattattctattcatactgccagtcctacaccctgaaggtgaatatctacaacccactgttaactgtagtttctatacaaataccacaataactaataacaatagactgcttatattggtattactgaaatactgaatgttactaggtaggcatga

SEQ ID NO: 2048 - DNA, 831 bp, Oryza sativa
gtcatcgacaatggctcgtagaatgtctcggtggcggcgcttcacctcagatgaatggcgatggctcgatttcttcaaaggactgccatgcatgcatgtctttcgtgttagagaggtccatgcaattggattgggactcactagagagggagaaatcaaagatggagctcggcggccggttgtagaagatgatgctgatctccaagatcattgcgccattggatggggtacttgggggtatatggagagaggtcaacatgaagctgatggcgtggtggtttggcttgcaacagtccactgcagccaaaacgacaacgatgtcaaggcggcgacgcgcagagtgcgctccaaggccggcgatgacacgtggcgttcccgtcgatccgctacacgagaggatggaatcaaaaggaaaatcttcggcatgataaggtgagtatggaacggtggtgaggcagagatggagatagttctacggtgatggcgggtgttgtcttcttcatggcctgcgacagatttgagggcgacgaagaggttgagggcatcctctctcggttcacggtggggcggcggcgggggcgcatcgccggggttcacctccaacgcggacgacgcacgacggcttggccacggcggagctcggtggcggcgcaatgagaaagagatgaatgaagaagaagaacagagaaagaaagattgacaagtgggcccatgggcaaacttgtctttaaccaaactttctctctccgtttccaccggaaataataaaataatgcggctggtgtccactagctcattaccactttttacagtgtccacgagaaaatacac

SEQ ID NO: 2049 - DNA, 22489 bp, Oryza sativa
gcatgccacattaacgctatgtaggatgctaaaggggttgtggcgatttgggacctaaatgatacactatgacaagttctaagacttggatatgtattttgagagtttagggacctaaatgacataccactacaagtttaataaccgtctgtacactttactcatttagattcatatcctagattcttttttatgggacgcagagagtaatttttgggaggacgttttgaacaaacttttataactttaattgtcaataactttaaaaacactagatttatcttacaaattactataataaaagtaaaaaatatttattacatacattataaaataataataataataataataataataataataataataataatatatttttgtcaataatgtctaaaacatgaaaaattatagaatatgactacaatgcaacgaagctttggcacgtggcgcgtcgtcttctcccgaatggaagaaagggccaacgaatttttttagagtgaattacactttgggctacattttattatttaattttcactttggaccacccttaaacacatctgttcactttggatcaaataaatttactattgttgcgatttggatcaccacgaacgattttttttcagcacaatcaacgacattaatcacatcagctctagtatacggccgaactcctctgtgtatggctcatatgtttaccgaaagggaagttagacatgacgagaaaaagttgttcatggtagttcaaatcgcaaccatgataaatttatccagtccaaattgaaaaagatagaaaacatggataataaaaggtggaccaaagtactatgagaaaatctacacaacagtatcccgtcacaatgggataaggtctcatcaaccttatctccttcgatcccttcccctccacaatctctctctctctcactcaggagttaggagaagtcctcaggagtcaggagaagtccaagagcatggagatgaagccagctaggaggaaggggtcgtcgtcgtcgtctccggcggccgaggtggacgacgacggcacggcgtcggcgaggtcggggcggcatcgagggtgatctcgtcgcgcctcctcgacgccgtcctccgcccgctgcggcgccgcttcttctactggcgccccccatcgctgccggcgtcgaggcctctcccctcctccctcacactcctcaccaaggtctccatcaccctcgcgatccaccagtgccatcgtccttgcccgctgctcccgccgcctccttgctagtgagtgcaggtggctcctcctccgccaccgcagaagaagaagaagccggcggtctcggtgcctctgtcaccgcaacgccaacgacaatctgctctagaacctctacctcctctctttcaccatcaacttcaaaatgaagttgctgaagcgcatgtttttggagatggtcgtcgccgacttccagccggacctcaccatcttttgcgtccgtgccatggccttctctattaggtattaatcgcgatacctcagtatcaagcctggtactcacaagtattaggcctggtacccaggtaccaaagtctatgatacctaggtaccagccggtaccaagttaccaggtacccaggtaccaagtctgtgatacctaggtaccagccggtaccaagttaccaggtacccaggtaccaagtctatgatacctaggtactagccggtaccaaataccagttggtacccagtcggtaccaaatataccaggtaccaggtatcaggtaccagctgatactcaagataccaggtgtcgggggaaacacacatagaagctaacggaaagaaagggaagaagtcacttaaaatatcccgttctaacgggacccgttatgtagtctctctctaaaaaaagtatttttattttttgagacaaaaggggaaacgaattggggccagggaatttaagagcagaaaaccctagcctagcctagccactcgatatggcgacgggcgatgtgcccgccggcgaatcggcggcggtggcggaggagcgggactggtcggagatgaccccggtgtgcctggcggaggcgttctcgcggctgggcctggagcacgtgtggcgcggcgccatggcgtgctgccgcgcgtggcgggacgccgccgcctcccgcccggcgctcttcgccgcgctcgacctcgagcccgccttcgcgtccgtcggcgccgacgccgccgagtggtggacgcccgccttccagcgccgcgtcgacgccatgctccggtccgcctcctcgctcgccgcgggggagctcagggaggtccgcgtccggcactgctccgacgacgccctcgccttcgccgccgaaaggtacaaacgtgtaaaattttatatgttttcttcttttttttttctggaagtgatgttttgttcgaagttattagagacgcatgaagctttttgttgattaattagaagttcaaatttcgtgtgatatgatacctaattgcatatgtagtttctcacaatttccccgtcacagaggcctcctggaaatgttttttttctctaatttctctttgctgaccaagaaatatgcacataccaagcaatggtcttcatcttcttagacggtggctgagctagaaagatttttgagtccgggaaaacttcaatataactagtatttgttatagaaatttcatcatcaatattaaaatttaatggagtttttgccggcgagcccgaggccgcctgggcaagccgggtggtgtctctgcccctgttcttagaccttcgagatcgaatataatgatgcgcatatttgcgttctgtataatggttgtatgcgcaatttaccactgttcctttctcaattacgatgcagttttatttgtgcgccttaatgccttgaatttatacaagttactgatagtttttttttatgtagtatgcattcattcataattcttcttggtccttagatctatattctctgggctttcaggttgtaaaatgtgttcatgacactggagggtgttggtgacttttttttctctatttagcatttattcccaactctgcagaatataatatattttaaactacatattccgttcttaatgataagttatggttttcttatttgaactaatatattgactgatgcttgatttttcattgatatattttatagtgtgtaggaatagatatatggggcctatagtctaactatggagccacaaatatgtgggaatctgtactaaaggtcataattccattcttaagtcgaatgttggtgatgttattttattcaggaagacaaagtcttagaaaaacctctcaaatttctatattcctccagggaaccaacagctctatttgttgtaggttttgccgtgttggtgatctagattttattttttttattaaactgactgcatcacaatcaaggaaaactaggtgctgttttgtactcatgaatttgcaagaaaagattttcatgtattacattttgagtgtagtagcctgaaactttgcttcttttcagcaatgaagttctctagaaactcatactcttgtacttatttaaacacaactatttcaagaagtaaaatacgtctgttcctgtcttcctgctaatatattaccaaaattcataatacatggagaaccaaccatccatatagtttttacaggttcatcttgaacgtttgtctgcttctacaccattctaagtaaaatagctttctcaattcaactattctgtaatttttttttcaattttttgtattgctgtttgtataattttaatgtttttattgcatatgtatccatcattcagcctcttatgtaaatgtatattggtgtttctgtgcatgttaacccagtaaattatttgccaacactacagtaatagatacactaaactgaaattgagttggtggttggtgtattgctcttatttgtcaagcttctgtggaaaattattttgtgaaatatagtagtattatgaaaattatatttaaattgctcgtgtcacatgcccgctcacgttttctgttatttggaaaattgtagtgttattgcctttggtgaacatatgagtggacaacagtggaggaaatgtgtttgagtgcaaggggtgataaagagtagtctcacacttactctcacttacccccttatgtgtcgtgggagctattcccagccaatagcaatgagactctgacctgacatagagttagggatatcttttaacatagtcgctaacctgagctcaatcagctttttaagttggagacttgatgagtcatgttgaatgtgatccccagggataagttgtttggtatgaacaaaccaacccgatatgagaaaacaagtaacacaacttatctcctaacacctttctttatgttattatccagaaatgtaccaaacctgtgtcaggtacctactctactttgcacctacatacatgtggcttcacaacacatacaaatgatccaaaaacaagcttataacaaagaacatatttgcttgcaacttcgtttaaaggaaaaaaaacatcatatagccaaacagttttgtttccaccacaatactagacagaaccttacagcaatacagaggctcggtgccatcatcattgagttggagctcttgcagctcagcgtcacccattttagcaactgagctgcagccgaattgacagtgctggtgacatactgacatgtcacaaaattcatcaccagtgatcttggcgtgagttgtacaacctcattgcaaagtagtataaaagagcattccatttctgcagatagttttaggttgggtccatttctataagttatttagagcaaaagctacatgctattttgctttctcttcagctacatttgacatgtcaatgagattgtaggtgccactattgacttgctttattcatatgcaggtctccaaagctcagcattctttccattagaagcagcccaagtgtaagtgatcgatcaatgtttattgttgcatcgagctgtcatatgcttactgaattggacatcagctactgccatgaggtttcatacaagtcactggagatgatcggtcagaactgccgaaacctcaatgttctcaagcggaacatattcaattggctcgattcatcggagcatgttggcatagttcctgatgattatctaagagattgcccccaagatggtgacagggaagccattgcaatttcgaagttcatgcaaaatttgaagcatctcgtaattaggttctcaaagctatctgttgttggcctcaacgcaatatcaggaggatgcaaggaattggaggttcttgacttgtatggctgcgcaaatttgacactcaggggtatacaacaggctacttctaatatgaagaacctgaaggaactagagaatcccaacttttacattcccaggtcctccttccacatgggtaggtatgggcactggcagttatacgatgaaaggtttcagacaaatgtattccagatataaaaacagcctcaagttcaacgatcacctcaggtgtttgttctctgacatatggcttgtatttattagtactgtgaatgttgtatttgtgttgtgttgtggaaaaataatgacaataataccctgtatagtgctgctttactcatcttttccatgtacccataagaaaattgtcatgcttcagtaataatttgtaaggtcacctacaatgattcttcaaaatttcttagtatcaaatttcttaatatctggtgctcttgtcatctgtgtttgagaagatagctgatgctatgtgtttgtgtaaacatttgaaagcaaagacatcatatgtgtatgcagaacttcgtgcatacatgtataaaaaatgtggataatcagtagttgtgttatgttcagacccttgttctttgttggtcctggaataatggcataacttatgctcacgtaacatggttggtttatttgatgctgattcagagcacctctcgatcatggctgtcaaccctgttgcactttgcttcattttgattgcttgtcatgttcatgtgcaaacagatacgatatgctctcttttatggacagataacacatcacctttcattctgttgtgaacttgggatctcaaatctggtatgtttgttaggtttatcaatcatccacatctcatatgcagcagaaacaacaaatcgatcgcattgtgaaaatgattggcatccttgtatagagacactagagaaggtaaattaactgcctttctctgtctcaatataatgagaggcctttctttttcagaattctgtcatgtaaaaggacccccatttgttttctccttcaattcgtactgacatcaccttatccttttcaggacgaccatggtcgtaaaaacagaatatccttcataatctataatgaacaccgaccaggtagtgagataattttcttgcatattttgtacgaaatttgtttaatatgtcgctatcctttccatgatatcctttgtgctgcattttagtggcacgaaagaataatggggctaaagggagccttcagtatttactagtaaacaatatatatctcaaaggtacaggccattttttttcttcagtcactgacaaaagatgaaaactaatttctggatccacagatttacaggctgccacaatcttgtggatgagatatggcaaagttccctggtccatggagaaccatgaaaaatctgaacaaaccacatgcaagaaagcaaccatatctgctccttgtaatgctttgtgtccctctctatccccctgcagaaggcacaagcttggaaacagaaaaacatatgataatcctgtctgagtgctaaattagcaatctttttgggtgacaggtcccattagacctgaactaagccaggaatcctgatttataaagctcaacagtgagcgacaagggcacaaagcacctccacttcataatgttccctaaacctttctccagagttttcccaaacaaagcagataggaatatgtgttttatgttactagaggaggtaccatcattttcattgtttgtgttactttccggcgtcctaagacattataaaataggactagctatattaatgaagccatattttcagtaaattccatatatttatattgcaattacactgtagtttttagtacttacattgtaatttttatagtgcacactatataagagaattaggataaaagcaattgattacctacatggaagaggacataggagggattggaacatacatatgtaaaagagatgtagcaatcacatatggaaaaaagtgactgacattaagtaaaaaatgtggcgtcattttttttagcaaaagtgttacaaaatttacactaaaatggtgtacccctcgttactcgtcaagcacagtaaaaattctccatcttagtagctacagtgctacactatagaagttataagaaaaaaaaaacgctggatatgagaagaagggctcttataacagaaattattaagaggagcgaggctcaagatagcacaccaccttgtggtgttagcgggaagactcccaggcctttctctacagaagttataagaggaaagagcctccacacacactccacataatagcttcttgttgatcagtccatctcaagatgaagaaaagctctcttgctgtcttcctcctcctactcacccttgcttcccagggcacatggtgtgctgctgagagaagccacaggattaatggagctcatctgagacctcatgtccaggtggaagaatcgcatagtcagtactctctctctctctctctctctctctctctctctgttgcttccttgccatggcactaatcttgtcaagaaatgaatttgtgatactaatcaatcttatggagaatcaaataactttttgctgaaaacctttggtttgttcagtcactgaaggcaagaagctcctggagattcaggtccccaggaagcttggccatgaggtgaagtttcccaagagaatggccatagctcacaagggtggcagcacgggcggcggctcgacaggcggcaccacaggcggcgccagcaatgtcaacagtggaccggccgacacgcggccgaggaaaaacgcggcggcgatgccagctccggcgacgacgacgtccatcctggcactggccttctccttcgccattgctgtctcagctttcagcttctgaagctgtgtgagtggtggtgttcttgcaagaaaggtattagtatgtgtgttagtggtgtggtaatctctgaatgactgaatttgtgtatccagtttatcagtagtgcacactgaaattgtttcatcttcctgtatcttatattcaatattcttgatttatcgtctgcacaatgatgtcccagacattgttcttgcagttccaggttcttgtggttctcattctaactgttcttatcttggattctgtccaattggaaaaccacatgctgaaacagtctgttaaaaaattgaagctttttcttcagtcactgacagaagatgaaaaccaatttctcaattcatatatctcaatccagacattacaggctgccacaatattatgggtgagatctggcaagggccctggtccatggtgcaccaaaaaatctgcaccaaccacatgcaaaatagctatcagttctgctcctttcagtgccttgtgtccctctttcttcctgaagaacatcattagattcagaagcttggaagtaacaaaaagaacatagcataattttgtctgtttaagagtgccaaatcagcaatcttattgggtgacagatcccattagacctgaactaagccaggaatcctaaattataaattacagagagtgacaagaccacaaagcacctccacttcacaatgtccccttaacctttcttcggaattttccacaaaagaagcagacaggaatagctgccatcctgtcataacttgtactctatccattctttaaatacaaggatttctaggttgtctagtactccctctaatgttttagggtaagtctgtccaaattcgtagtactagaatgtgtcacatccaaacaaaaaaaccatacatttagacaaggagtacagatttaaggttttagaagaaaagagcatctcattaaacggttggatggttggaacttgggagtaggaggctgggtggttgtgggtaagatgaaaagaaatttgaatgggaggtgattagtgagataagtattactctagaaatacttatattacgtacaaaatttaaatcctagaaatacttatatttggtaacagaagaagtagcgcatatcttagcgaataactttacgatacacgataggtaccgtcaattcaatgttagttttgctgtacctctcctaatatcttttaacactagggaggtatcaaaatttatactgaaaaatatttaacctctcctcggttaacttatcaagttccatgaaatgtctcaatcttagtagctactcctacatgagttatactccctccatttcaaaatgtttgacaccgttgactttttagtacgtgtttgaccattcgtcttattaaaaaaatttaagtaattatttattcttttcatatcatttgattcattgttaaatatactttcatgtacacatatatttttacatatttcacaaaattttttaaataagatgaacagtcaaacatgtgctaaaaagtcaacggtgtcaaacattttgaaacggaggaagtaattacatacaggagttacatataagaggaagagcctccacacacacacacagttcacataatagttttcttgttggtgatcagtctccatctcaacatgaagaaaggctttcttgctctctccctcttcctcctactcacccttgcctcacaggccacatggtgtgatgccgagagaagccacgcgatcaatggagctcgtctgagacctcatctccagtttgaagaattgcatggtcagtcgtcgatctctcacttgctttcttctttcctgatgctttcgtttcttcctttgccatccatggtgcttctaatcttctagacaaactgaaaactttcggagaattttaacgttttctttattttctgaaatttgttggcgttttcagtcactgatggcaagaagcttgggcaagcagctgacactgacactgacactgacactgagagccacaagcaccatgacgaggtgaaggttccgatgagaatggccatagcacacaagggcggcggcaggggcggcggcgttggcggcggagtaggcggcccgggcggcggcacgggcgtcggcgggaggaacgtcaacggtgctgccgacacacggccggtgcacaacgggaggagcaacgcggcggcgatgccggctccggcgaaggcgacggcgtccgtcctggcactggccttcgcatgtgccattgttctctcggctttcagcttctgatcgaagctgtgtgtgtgtggtggtattcttgcaagaaaggtaggagtattatattagtatatgtgtgtttagttgtgtggtaattaatctctctgaattatgtgtatccagtttgtcagaaatgcagtgaaagagtttcatggccaattctcaaccagtatcttatgttcttgatttatcatgtctcatggtgtccgaaatattgttcttggattctgtccagttggaaaatcacatgctcaacaatttgccatctgttcaaatcttgcaggctcacttagtcacttccttgtgctgaattttgggtttgcaaaagataaaaaaattgatctgtagtggaattgtcctgtataagatgatagagtgaccaataatttacttttctcatgaaaaatatataataatcttctttgaaaagggaatacttggctcaaagcattgtggggccaaggattagagatgtgtcaccacgtgaaatcattcagtttgccacttcttctgaaaaggaaatgatattatatggatatccacttgttctgttccctgctgcctgcgcacagtttcgttcgttgcctgcaccgtgccttaacatgaatagatttggcgcactcctgaggaaagttttcttcttgtactggagtaaggctgtgtttgaggaggagatagagaagatttgaaagatacgcaaaacgaggtgagctattagcgcatgattaattgagttttaactattttaaacttcaaaaatggattaatatgattttttaagcaactttcctataaatttttttaaaaaaaacgcaccgtttagtagtttgggaaaaaacgtgcgcgcggaaaacgaaacaaacaatctcacaatcacccagggccgaacgcagccttaagatgggataagattattgaccaataattattctgttaaaatatattttatgacaaaaaatgatgttactagtttcatatttaaaagtatgtttttattattatacttttgtatcgtataaataatataatggtaaagtagttattagtcaaattcttatcctaacaaaataaaatacaccttacacttttatatagaggtaggatttaaaatttggatatctgtcactctaaaaattgaagtcctaaaaaataccacagaatatattgtattgtaaagatgccaccataaagacattattatcggatattcgcaatattggtcgctttggccacgatttagatcacaacaaagacattttacacccttcttttatcatattctttttctctcttctcaccatccatgacagcaagcagctcaagatctagctcactgtagcaatgctcgaaaatgctaataggaaaacagggatttcggttggtattttttttctttcttttttttttgtgtgtattcaggggatcggaacttggagcatgtgtggtcctcaatcagcacagacaaaaacgttgctgtcttggagagattgttgtcgctccttgtcgcctcgggcatgtgcagtggaattgcagaggatggttgcaagatacttccttcgtccgctaaaaatatagtaacctaggataggtcatcctctatcctaggacaatgtatctggacatgtctggatgggtcttatcctattctagattgttatattctgggacggagggagtagaagactgacatgatggcaaaattctaaacaagggaaggagataggtcacagacatgagtagatgaaattacaatctagagagcaaccggaatcttcaaattaatgagcaatggcgagtactccctccgtccaaaaaaaactcaattcctagatttccgtgtcttacgtttgaccgttcgtcttatttgaaaaaattatgaaaaaaaatttaaaaagataagtcatgcataaaccattattcatgttttatcatctaacaataatgaaaatactaatcattaaaaaaatttatataagacggacggtcaaacgttggacataaaaaaccgaagaattcggtctttttgggatggagggagtagcccttaaggctgtttgtcttttgtctttgcttttgtgtgcccagcttgttttgattgcaaccctactttcgacatcctaatgtatttcggtcttccttgtatttttttctccgggaagactaaatggctgtcgaatgatttttgatagctaaatcattcatgtttcaatatatttagaaccgttgtttaatatgttgtagcaaaatatttcatgaggtgatttgattgtgtttcagttttttaaaagattgaaacttttttatctacttggtgaaacattttcgatctacttgtgaaacaaagctcggttggcttcaaaatctatacgatggaagcctaaaaaatcatgtaaatcccatatagactttttctcgatgtgcatggatttgtttcatgtttcaatatattcggaaccgttgtttcatacattgtagcaaaatattttatttggtgatttgattgtgttccaacttttttaaaagattaaaatatttttgatttacttgggaaaacactgcatgatggaagcctaaaaaatcatgcgaatcccatatcgatagcccttttttctctcccaaaatataaaaggatagatcatagacaagttgcttgcttgctatgtttttttagtaattacttatttacctcgttttaaagcttgactactaatttagcctgattttttaaagtttgcacatttgaccatttttcctaaaaatgaatatcaggtctaaacctgtttcgggaagacaacctaacggtgttaacacagggaaaaaccatttatgtccttcttaatttgacccttttttttaaaacgagtatcaggtctgaccctattttgtaaagacaacctaacggtgtttactcagggaaaactaccgtttatgcccatctcatttgaccctaattttccaatattttaatttattagacctagtatttttttcacttcatccctataaactatgtgatgaaatttgactaaaaatatgtacaaaattgatgtaggtttgacatatttgatttaggtttatcaaaatttgttccgtgctgtgcccagtactaggatttggctaaaatatcgactctctaaatatattttctaataacacttataactgtgtggttagaagagagtcagagggcatgtttgtttttgaaaaatagggtcaaatgagtagagttgaaaaaggagagtcaaattgatagtagcctttacaatagtgtcaaaagcacaattatctttttttttcagactgggactcttagaaaggaaagtgggtattgcatgtgtactttattaatacttgcataatttgactcagaccctctttaatttttgttgcgcgaaatgatgtacactaacagcacatcttgataaccgtagattgtattggtttcaaagattggacggccaagattgttttttctttttctcaattagtcagacaatttatagctgattttgattaatgtgaaaaaattttagcttgcatttctcatataattaaggagagcctccaattagcataaagataataaaaaaagattttaacggctcgtagtgtcattattggtgttgctccctccgtatttaattatatcgcactattgactgcactcggtttaaatttaaactttgaccatcgatagctctcaaaattaaaaaaatataaaaatcatattagaagtgttaaatatattagaaaaacagtgaccaaagttacccatcaaaatcaaataaatttaatagtaatttcttgtctctcccaatatcttagcacttggaaggtactccctgtgtttcatattataagatattttgactttgatcaaagtcaaactacttcaagttgaccaagtttataggaaaaaatagtaatattttctacccaagataaatttatatgaaaaatatttaattattaatttgataaaactaatttgataatgcaaatattactatatttgtctataaatttagttaaacttgaatcagtttaattttaaccaaaatcaaaacatcttataacctgaaatgaagggagtatcgaaattctcaataaaaaacattgtacctcttgctaacgtgtcaagtagcttattttagtagctactccctccgtttcataatgtaagtgattctagcatttcctatattcataatgattttaataaattttgatatatatatatatatatgtctagatttattaatatcaatatgaatgtgaaaaatgctagaatgacttacattgtgaaacggatggagtagtagctacggtactggtgctataagaagaagagcctccacacacgctccaacataattctgtcttgctggtgattagtccatctcaagatgatgaaaagctttcttgctctcttcctcctcctactcacctttgcctcccatggcacatggtgtgctgctgctgctgacagaagccacaggattactacagctcatctgaggcctcatctccatgtagaagaattgcatggtcagtgatctctctgctcctttcatgattcttcttcctttgcaatgatactaatatttagtgttccgaattttttgctactaatctcctggagagtttaatttaacaagttttctgaatttgttttggattgttcggccactgaaggcaagaagctcatggagattcaggtccccaggaagcttggccatgaggtgaaggttcccaagagaatggccatagctcacaagggtggcagcgcgggcgccgccgcggccgccggcgcaggcggcggaggagtgtccgagtcgcggccgcgcaacgggaagaacggcgcggcgacgctgccggctccggcgacgacgtccatcctggcactggctatcacctgtgccgctgttctctcatctttcagcttctgatcagatgtgtcggtggtgttcttgcaagaaaggtactagtagagtgtgtgtgtgtgttttcttttgagatgatagtatgatgtgtgtcggtggtgtgctgatgatcactgaattcgtgtgctgtgtgtccagttcgtcagaagtacactgaaattgttttcatggctaattatcagcatgcatcttattgttgattcgtcatctgtctcatggtgtcacagaggttgttcttggtagtactggtacttgtagttctaactgctctcatatctttgattcgatctgtacaattggaaaaccacatgctgagcacaagttgctacagattgaagcatgacttcattgtgctgaattttgggttgacagaatttcaatctttgattatgcagtcaaattgccatgtctttgatgatagagtgatcaataattcacttccgtcgcaaaaaaaaatgataatcttttggaaaaggagacactgggcttgaagcactgttggggccaatgattagggctctgtcaccacgtgaaatcactcacttcagattgccacttcttctgaaaacaaacgctattttatggatatccatttattatgtttcctaaggacagctttttagatttaacatagggatgaaaaatggttggaaacgatatcatttctatacatttatatagaaatggtctcagtatggtcgcaaattttctatatttatcaatttaactatttaataacgagttccatgtagcattaacggaaattagaaaaaataaattttatccgtagctagaattataaatggttgggaacaatatcacttttattgaaacggtctccggacggtcggaaattcctgccaccatattcacccctaatttggcgcactaaagagtaaagttttctcgtggtaccagagtaattaagataggtgacaatactatagctctttttacttttgaaaattagatgtgtcttccttattgacattctaagaaatgccaccgaatagattgtaactactctgaacacatagtagtcggatattcgccggtttggccacaatttctagctagcactacaaagacttctatgcctgctttctcatgttcattttctctcttctcaccacccatgacaatttgatagccagcagctcaaggatctagctcactgcagggaagctcgaaatattactactagggagtgatggatttgggttggtgatcgaaaatttttagttcagatggccgtttcttggagcatgtggccctcagtttagacaaaaatcgggtgttgtcttggagcttgtcattgttccttgcctcctcaggcagtcaggcatgtgcagtggaattacagaggttgattgcaacgtagaccaagaatatttactccgtccaaaaaaaacttaatctaaaaagagatatgacttctattattacaattacatccccttttaaattgagtttttatgggacggagagagtatgtcacgtacaagttgctggctggactgtgtgcaactgactagtcgtggtcacagaagttagtacagtgtgcctttgacagctgttgctgctgtcgatgggaaagagaaatgggtagcaatgcactgggtgattgtgtcatacccatggcaaaatttgctacaggacactcaaagattgtggtctttgctgtaagacacccgaagatcgtgtatttgctcgtggacactgtaaaaaagtggtaattagctgctggacactcttcccattattttattatttccggtcaagatggagagagaaagagttatgtaagtaccaaaatacccctggacactgttcttcctctctctctatcttttttccccttcttcttccttgcagcagagcagaggtgcgagtgtgcgacggcggctggcccgagcctggacggctcagccatggcgaggcggcggcggggcggtgtaggccccacatcctttctttttctcttctttctctcctctctcgagcaggcgtggtggcagacttgcgtgaggcggccggcggcggagcagggggcggcggcgctggagagagggagagagacggccgacgcgatggcgagctcgacggcggagagtagcggcgcgcggcacggcagcgggggagagggggcgcgcgcaccgcccgtcctccatcgcgatggcgtgcagcacgttcttgtcctccagcgacgccggcgtgccgacgtcggaccacgaccaggccacgttcttcttgtcccggaagtccagcaggatgatgaaggaggtgtctgtccgtgggaacatggtcgctgccatgagcgtgctcgtgccgtcgagccactggagcttgtcggcgtcgccgagtgcacagcccggcggctcgtagaagaagtcggcctgctcgccggtggtgcagtcccagacaccgatgccacctatagctgactgaggtcttatgatcattgtgacaggatgcaccctgcatccttaaaccgtgacagcctctgcaaagccaacctcatacacactttgctgctcattgctgatcgatcacatgatgcatgatatggccattcatgtagagaagaatccggacaagaataactactagtggatcatggtgcagttgcagagattggggaggaagaagaacactcaatgaatgccccttgttgcccgagacgcggccgattcgcgcctgccatctccagttgtacacgcgcgatgcggaagaggtggcgcaggtcgccgggaaggcagttatacacgcgcaggtcgccgccgctcctccatcgctcatttgtacacgcgcacagcgctgccgtgcgcgacgcagcagccgccgtcgggcgcggcgcggacagccgtcccgtcgcccgcggcgttccctgccatggacgccgccagctgcagctggtccccgtcgaacggcccccaccgtgcctcgcggaagcggtcgaggaggccgtaatagagcgaggtagagcgcctcgcgccccccggcaaaaccttcgcgttgctgtcgaagaagaacagagaaagagagattgataagtgggcccatggacaaacttgtctttaacctaagtttctctctccgttttcatcgaaaataataaaatagtgggaggagtgtccagtagctaattaccacttttttaccgtatccacgagcaaatacacgatcttcgggtgtctcacagcaaagaccacaatttttgagtgtcctttactcctttacatatgaccgtgtcatatgtaaaggagtaaagggcgatgggagaaattagagaatgacgaagctagggagaatacttcctgtggttataaatatttcatacactttaactacaaaatctaaccattcatcttagtcaaaattttagtgtcaacataaaaaatttaagtcatgcttaaagtatttttaacaaatagaataagttacaacaaaatatgtaataattacattatttttttaatatcatgaatggccaaatttaatgatcaaagtcaactatgtcaaatatttatgactggatggaggagtatcatttttagaaggaaccaagcttctaaacttattcaaaaatagcaaaggtggcaaaatatgaaattgccacatctttggagtggtatcacaacgattacaatcttttgaatagcattttgaaaagcatcaatctttagagcaacaaatatccaaattaagcaccaatctttagagtgataaatatccaattttctcctttttaacgtgtagtctactttggtgtgtcatgtgggcggagctttaatttgatatggacttttcggtttgatgccaagtttatgccaatgtatagtatgtatcagcgaggaactaaactataatctgggattctaggtgctataaaaatcttgcgagatgctatcaactttgtgttcccctctacctgccatgtccctacaactcattgcagatctctctgtcttgggctcatcatctagccccatatagaggaccacttgctttccaatcctacactgctgcttgattatgcaatcttatgttgctcctatgtccaactttaagtactaaaccaacctacacatgacgaaaaggaccgaattcaaattcatggaggaaagcttttgagtcatcaaaaaaactcgaatattagggaaggacctaatatcaaataatgagaaggggtggggctttgaacccaggtcatctagcctaccatcttatggagctagccggaagacccctgagcatttctcacttttgagttatcacgatgatagtttcatgttttgaattggaggtgttgggaatgctattaaaatttaaaaaaatattttgcaaaagttttgtttatcttttttttttgtcaagaagccagtagtttcatggggaaagtttgaaattactaactgaaatggtgttgcctcacttgcctggtaaagaaggatgccacagaccttggcaagttatgggttgttgggtacctgtgaattagcatcccctctttttatcctttccagaaagagtgatgctttaagctatctcaaagggaacataaatgtcatgtgccaattcagccttgattagagggggttttgggaaaagaaacattttggagtaatggatatgcaggaatttaactgttgatcattatccattatgcgatggaaaaataaatggtagggaacacatgagatgctcctttgttacaggtgtgataggttatcttgatgcttgatatggtcctcttgaacagtgaaagttgctgtgattcgttagaagataatatagcctaaatggagcctgtaaagcacttcttttacagaacaacaaatggggaaaactgtgtaaggatcagatactctgcatcgtacttttgtgtcatgtggtctctatgatcatcacagaataattgcaggcagagtagggttccaaaatccggagtaaccggccggttaattgcccgttctacaagccagggccggttaggagatgaattcaaattaagaactattccgaatgctagttataggtctggattacaaggttggtattttgggcaaaacaaggtttttgaatcctgccatggcccatggggtatcagaaattatttagaatcacgaattgaaatgatgcgtctatgcagatgggcagctgatactgctttgagctgaatcaggcagctggcaatataccaggaacagtaacaactagatagaccaccacatggtgaaagccttttgatcctgtaattactgactttgatgtatactagcaacatgcccatgcgttgcattgggtgaagcatgaaaaaacaatagtaatggatgtgcaggagtaaaatgccaccaaattaattgaggtccttgtagtcaaatcgaatctttccggtgtatgtaagacgctaacatgacataattatttgttactctaaatccattgacatgaatgatcataggaaaactattaataccactttaaaattaaattatgtattatagagtaaagtttgaaacgcaaaaagtatttacttttgtcatgtattattatgagttggttctaatgcatggttattttttgtacttgatattgatagactttttttacatattgtaaagagtagcaatagtataagaaatgtttttcgctatctatcatatcaacctcactgcactccaatcgcataatcattttcactcaaaaaattagaaggaaatcatacaatgaatagaaaaaaattggatgtaaacacgatttattttgttggtgattacaatttttttgaaaaaaagacatgcgattgttttctattttctaaaaataatttattttgtcgtaaatactttattttgttggtggtcacatgttttttttaaaaaaaagacatgtgatttttattttttaaattaataaaattgctccttatttttatctgcttcctggtagatgtggatccaacctattttcagtgtagtagcctcgggcaagccttctatttaagctagtgctgcctaagctaggcaaaaggtggtattatttgtgcactgacaattgacccgtgtggggcccacttgccacgtaagttaaaactggccacgacactgccgagggatctaaattgacatagcattgtaagttagaggatgatgtatacctggtattttgatttagggatggattttatattcagcgacaaatgaagggacctaatgtgaacttatttccggttgctacaggatcacacagtactgtactgggctgctgctttgctatgtgggctgactgctaggctgcgtttgcttttttgttgggtcggcctgctgctgctttggttgggctgcttgctagctttctcttcttttttttctgtttctcttttatttgtggagcgtcaaaaaattgccgtcacgcatcctgattcgcggattactggcgaaaatcgcgtgggcccacccttgaatgacggacgaaaaaattaaccggaagctttacctattttttatattatatagcaaaagtgtccgtgcgttgtaacgtgaagtgtacagaccagaaaattgaggaaaagttaaagaaaaatttacattatgtagaaaggttatattccctcccttgtgtaaaaaatcaatttacaagtaaagcaagtatgataaataaaacgacatgttaaatttaattttattaaattttccatgttaagttaagctatttggaattttattggaattttcatagcttaattgctaattttaataatataaacctcatttaacaattatttaattggaaaaagaatcaaaatcctccctttcaggtttgggccgaatatagaaagtttatagtctctccgttaagtctattctatttatctggcttgtttcctttctctgttgaagtccattttgcatcctcctgatatcgaccacacggtccatttggcagcccaataggccggcggcccgacgcgggagcagttggagccgtctgatcaaatggacggtctagattaatcctaacctaaataactacacccaaaacctaaccctaggactcattcccaccccct

SEQ ID NO: 2050 - DNA, 4670 bp, Oryza sativa
tctccccccgagcggctgcggcagcgagcagcggcgacggtgtcggcgtcctcccccgcgagcggcgacggtggatctcccaccaccggcggcgtggctgcgtcctcccccaccaccggcagcgcggcgacgccctcccccaccactggcggcggcggcggcgccctcccccatcaccagctagcggcagcggtggcggcgcccaacccaatcccgagcgacggcgacggactcgatgtatttggtgtttttgggtgttgaagtttgggtttctcttttttttttcaattttttcgatcattcaaaaaatcgaaatctgattgggatttgagggagggacgaaaatatagagggggtgacgaatggaagaatacgaatcttttaattagttaagatagataagagatatttacggactattaaagcgaatagaaatcgaacttttttgccgcgcttttttccgccctttttatttttttctcgttcgttttttattttttactaaccgtttttttttgccacggaatcgaacagaccagatatgaattttttagggacgggagtagagacacatatgtatacaaagtttatataaaaaacatataaaaaatataaatgtatacaaagtttgtatatatacatagtattaagaaataaaaaaaccgaaaaaacaaaaaaaaggaaagaaaaaaactgaaaagaaacgaaaaaaaggaagaaaaacaaaataaccgtgcgtgggccggaataggattttttttttccttttttacgggatcggatctatttttttcgccactttttctgtttttcgaatctgacttttttttcccgtttcctggggaatcggactacggttttttttcgctatttttttgtccgtttctttttttttcttttttaggaatcggacttctcttttttttttagtttttttcgctattttttattatttatgacggacgatggaaataaaaaaaccgaaaaaacaaaaaaaggaaagaaaaaactgaaaagaaacgaaaaaaggaagaaaaacagaataaccgtgcgtgggccggaataggatattttttccttttttagggatcggatctatttttttcgccactttttctgtttttcgaatctgactttttttttcccgtttcttggggaatcggactacggctttttttcgctatttttttgtccgtttttttttgtttttcttttttaggaatcggacttctctttttttttagttttttttgctattgtttattatttatgacggacgatggaagcacctcttattttttttattttttaagtagtagtagaattaggtatatagatgaaagacaaggtgcttcaggaattattgttgttggtgacaaaactagaagctacaggttagcaagatcaaaatggtactacatgtgttcttactcaactcctatagtcctatgtagtgggaggcctgaccaaaatggtacatggatgattaggggaacagtgcttgatatatgtaaatctagccttatccagcccaagtaatgccctagttaggctaaacccccaaaaaaaaaatggcccaagaggtgctgttgagcctggcttgagaagggaattttggcatgaaataaaagcctggccagaaacatatttggaattgtttagtgcaaatttaggccccgtttggtagagcttctaactccaactcccaactccaaactccaactccagtgagagctgactcctctaggagctgaggtaggtaaaaaagtgtttggctaaattattcagctccaaatttctacatcctttgtcgccatttcatcgaacaccttataggcatcgccttgacgttgccgccgcagccggtcaacccgcgagccaccgccaccggcaggcccacgcatctccgccgcctcacaagccgccgcacaagtgccgccgcacaggccgccgccgtcacctaggctatctcctgccgacgcccccgcacgcgagtcgcctgccgacgccgccgcccgtgagccgatgccgacgccgaccgcaacaccgcccacagccgctgccaccggccacctgccgccaccgatgcgccgcggcccgcgcttgctgcccccgtatgctgccgacgcagacgccgccacaaccggttgtggccgtcgtcggaggatggggaagaagatgggccgccgccacctactggccccgccgccgacgctgccgtagcccaccgccaccagcctccggccacgcgtgcgcgccacgcgcgctgcctgtcgtcatcccggccatgccgcccgtcgtcgtcccgcagccgccgccgcccaccgctgtcgggtctcaaaactaatgattcggaaaccgacatgtttagattgtatcaagccctggaccagtagattgatacaggttcaataatctggatcgtctttgcatacgtttagacatagctttgaaggagatattattacataaagtaatagggtatttacaagattgtggctaactaatacaacagatgctatagaatgacttaactctaatgtttggctatagacttaaaccatctatctaatctagacttgagaattaggttgaaatgaaactaacttatatgattaaactcccagcttcggcacaaactccaaatggactctgaaaaagggggttgaagcaagggtgagtacaacatactcagcaagctattatatttaatcaacgatgaatgtatgaaatgataatatctgtgtaaagctaggtttatacttgcaaaaagcagagaatgtagaagtagaaaacctgtaatgttttaaatgcagcagtatttaataaaatttccaattaggtttctatccaagatgccatagtgagtcccaatgcccgataaccgcgagcacggctattcgaatagttttaagaatattcatactgcagtagatgtacgctttacccgcaatccatgacgtgccaagcaaattagccttgtcatggcaaagtttttcagttactaatatcagtggtacctgttccatgaactctagtccccatgcgctctgaacgtaacgttatcagcagcgagaggagttctggcgttcccgaggtctttagagagaactgattatatgacaccatgtcatcgcaatcagggttcacaaacagattatagtacagattatagtcatcataatttatctcaaatatttacctgtgcctcggtaaatattacaatattgcccttcgcggcataaatttgcctcctgcgcgaggacttaagaagaaccactatacagaggtaccacctttgctagataacttaatcagctaggtctatgcccatacgagaattgcggtcgtactcgtatgttcttcacatgtactaggcagtcttatgtcggttggaacagtactagccacccggaaatcaaccatttctaccgtactgtcccaatctaagtttattaaattttatgcataatctaactaggcagggctaagcaaaagctagcatatctggtttgctatatgttcaggttatgcattcaaaatcatgaatggctaatgcacaagatactggagatatagaatataggactattatgctcaaaggggaggaataataacttgccttgctccaacgcaaataaatccaagataggcaacctgattatccagtcctcgaaacaccacaggttgcccttcaaaagataatagactctactaagaaagacgaagacaaagaaccaaattcaatacaaatcatgaaatagcaagaaagtgataaagcgcaagaagggctaggcttggggtataaatatctctgttaaaggggtatagggttctaaagggttggaggctaaggtggagaggggattaggcaactaaggttgcttatattttatgtgaatgcttggttgctgaaaggataggatgtatattggataattgaactgattcagttggtatatggctagtattggctagtggtaggtttgggtagtataatacctagggtttggttatatttaaaccgactgcggaatagggaagcatatcggctaggctctgtataggttctaggagagtaggtggctgagtatagtggataggcgatattggtaggtggggtatttggatgacggttgggttttaactagcaaggtgttagctagggtttagttgtttaggccgatattgaggtaggataaatatcggttagggttttgggtgtttgctagtcatcgctagagttggacagtatagcgactagatttggtatcatttctagccggtgtcgatagacatcatatcggctagaacaataggaggtgggtgcaggtttagtggggtggaagtgttactccgataaccgtgggcggcggagcgattaggatcacacagagctcgagagctaattgtgtggtgtgctatggaggtcgatggaatagtgaagctctgaccgctatcgaggcgtggggtgccaggagcagcacttcgaccttgggtgtggtttatgccgggctttacaaccaacggttcaacgttgggatctgtagaccacgcgaacgtccccatggaaggcgtaaagttccaaccggcgactttttagtggctaaagggtattttgaaataaaaggagatatttgaaaagcaaatgacatttatataacttaagg

SEQ ID NO: 2051 - DNA, 598 bp, Oryza sativa
ccgcctgcacgaaggccagcacctctttcttttgcaccagccagcgttgcacccggcccttgagcaccggtgtgcggcccggcgaccccagccccttgccatgcaccacgcgcacgcagcgcaggcccgtgcggtgcgccaggcggatgaactcgcccagcgcctcgcgcgcctcgtcggtgcgcaggccgtgcaggtccaactggcgctggatgctccaatgccctccgcgcagcttgcgcgtcacgtccagcccgatgcccgggcggcgaaagctgagctggtcgtccacgtccagcagcgtggtcacgtcgaactcgtcgctcagcgactcgcgcagcacgcgctcttcgtccagcgcgcgctgcacgggcaggggctcgggtggctcgggcgtggaccagcgccgctcgtgtccccgcttgagcggctgcacggggcccaccgcatcggcgaacaggtggcgctcggcgcgggcgcgccgctcggcctcgcggcgcaggcgctcgcgctcggcccgctgctgcgcggcctcctgcaacgcacggcgcaggggcttgaggtcggcgaaggaacgggcggtgagggcagcgttcat

SEQ ID NO: 2052 - DNA, 618 bp, Oryza sativa
ggcacggacttaagtttgtacgttgagaaaaaccggacaagcttgcaaggtgtgcttgctagtcctgtggatgggacaccaagcttttgtcccccggaagttgtccttgtcggctcgtacttcttgtggaaaggataagatttgaccacattaggatctttctcaggcttggatgttgtcgattctccgttctccacttctgcgggaggatcttttgacatggagtcaaccggggtcgtaaccacgccgttctcgctcccgataattgctgggccagtcgagattggcattgtggtgtagagcgggaagacgatttcgccgacttgagtccacaccagcatcgtcgaagttgaagctccttggttgatgccagtgttgacgctatcgtcgagaaggcttgaaatcataatagtagaaccttgagcaccaagttcccctacctgatgcgccactgtcgacaagggatacccgtagaccggatataaagggtattggggtccgttggtacgaggatcgacgtagtacgacatcaagcaaataaaagataaggattatactggttcaggctccttggtaggtaatagccctaatccatttgatatgagattatatgatgga

SEQ ID NO: 2053 - DNA, 557 bp, Oryza sativa
ggtgtctcctaattggatgttgtcggtgtggtacgcacggcccatagaacagagggatgttgtttgacccacttcttgtcgtgtaacatgagtctgtcgtaaacgcgggtcttgatcccttgtagcactatgccgtttgcccttttgacttgcccattgctctaggggtgagaaatcgaggcaaagcaaatcttgactcccaatccaatgcagtaatcctggaagtcggcactgatgaactgggagccgttatttgttatgatgcggtgaggcaatccgtatctgtagaatatccctttcataaacttgatggcattatcggccttgatttcccccgtgggcgtcgcttcaatccacttggtgaacttgtcgatggccacgaacaggaacttgtagccgccctgtcctcgtgggaatggtccgagtatatcgagcccccaacacgagaacggccaagtaagagggatagtctggagcacttgcgatggcagtcttgtgtgtttgctatgaaattgataggcttcacaccgctgcaccatgtcgcaggcgtttttgag

SEQ ID NO: 2054 - DNA, 6275 bp, Oryza sativa
agatggcgcgtgcgaaagcggcgcatagtggggctgatgctgcttctagtgcgtcccctgcggcgacctcgacggaagtcgtggccgttactaggaccaggaggcggcgccacgtagtcctatcgcccgcctcatgcccgtccggcctccgtcccccgacgccctcacttggggggagctccaggctgagatggagagcatccttcaagcgggcgcccacggcgtgggccgcgagatcgaggaggccagggcggcggcgtcgtcggcaaaccagcgtgccgatcagctggcgcgtgatctggcggaggcccgcgaggacctccaaaagattaaggggctggtagctggaaacgagacgcagcggcgcggactcgagcactggatgtcagagctcgagggccatctgacagctatccgaggttcgctgcggacatcgttcaccggcctgcaccaactcgccggggagtgcggcgtcacgacttcgatcctggcgcatcctaacgagtggtcgttgatgtcgtcgctcgtggagctggctaaggcaatggaggtgatcccctccagccacgcggccaggattggtgaggagacgtctaacggcatctacatcggggcgtgccatgttcttgcgtgtatgaggctggcgcatcccgacttagaccttaaagagactttggatcggggggccactgatgacgcgcgtaaggacacgatggaggaagtcggtgacttgggggagtccgtcctccccctttttgaagagtaggattttcattttcctctatactccttaatcaacatgctgtaatgtcacgcccggaaattcactagtaatttccgaacttatttgtgcataaaatcctcgtccaggaatcagccgaggtacacaaactgacaatttaatatacagattcatcaaattaactaaaacgataaatacttacttatgaggcacttagtcctcatcatgaagaaaactgcagcggaaaataaaatctagcgaagctccggctccactcccacaggcagctcaactggggtataagccaaacgtcttctccttctggattctttttcttcaactgaggttgattgattattgcaaggtgagcatatgacatactcagcaagccacacagcaaatatgcaagtgcacaaggataccaaaggatggcataatattggctcatttgcaaaagcagcatttagcaaaacatttaagagaagtaaaacagtggagtaattaatcaggaattttaatcaacactgaacagcacacccatgctgcacaggcccaaccatcctgaacaaccatacccggctgtacagatctaactccaaaccaggagctaagcaaattattaccagttataacatctatagttatggtgagaggtgtgggactaatcacgaaaaacattgctcaactcgcccataaccgcgggcacggctattcgaatagttttactctggccagaggtgtaccactgtacccacaagacacagcctcaacatcatgtctaccatgcgtcgcggtactggtaagtacccgaatagaggctgtgacaataccctctgcataacacaactcaccacagtgcaccattcctggatcataatcacccccttataaaacaaggcatggactccccagcgacccccgtgggcttatttccgccacttctcagtctggtgctccgcaatgaatcatgttatacaaaaggtaaagccgttgcccacgctggcttgtggttggcacggttaatgtttcacaacagtagctcgcgaaccggtccttaattgccatgagcacgactctcaaaaccatgtgctcacaacccaccattatcaagttttagttggcaagaaattaattaaccaatcacgattgaccatcgtgaactatcattaagccatcattaaataatagtgagtcataagttatcccaatagtatgctaatgtttctaagcatggctaagcaatcatatctaatatctagctgaaccaatatataaagctcaactagtcaaattataataacccaaggtatcaaggaatagagtaatcaatgcgaataggccataacaaaggaataggttcacaccacccggtgacattcgaaaataaatgcacagttgaaataaatagagaatttaaatataggatcaacatgctcaaaggattgtgtttaggatctgtgtgacttgccttgcaataatcggtcttcaattaatcttcttgaatacttccggcgcactcgcgaaccttcgcaacgacggaaacgacaagctatcacgcaaaatgaggaaaaagactaataaaaaccaaataaacaatacataaaaagtaaacaaacatgtagatcataattttagatgaattatgagacttgaacggcctcattctgatttcatatgaatttattatgaattttacaagatttaattccaattaaacctattaaacggagactattccaaattaattaaatcatttacaaatgatttataacggagataaaggattaaagcaacctccggaaaagattggatcttatttggtagatgacatatattaaaaagaaataatatgccactgaaaagaggagaggatttatattgattttggacagctgagattaaccttgaccgagtcgactaagatcggatggcttggattgatttggcaagcgggcctcacgagataccgactcaacgagtcaactccacgtgacacgggatcacccaaatgatcaaccgaaaccggcgaacggaaccggcggctctgaactaaaggacgactcaacacggacgaacgaacgaagcacggggaacacctcattcgaacgaacgagcgaacgactcaacaacggctgcggctaaaccggtggactagaaacgattcacggtaaagccccggtacgacaaacgataggccggtgggaaactagggttgcacctacggctacacaactcgactaaaagcagcggctaggtttaagcggcacacagctgcgacacggcggcactaagacaacttgactcagctaggcggcggctcagcggacaacagcgggtacggtgcacggcaatgaccggctcgacgctaggaccaaacaatattagattgaattaagaccctagggataaagtacaccggtgaacgacaaaggagcggcggttgccggcgaaccacgatacgacctcgccggagatagagcggccggctgcggatttggagggcatgcacacgtagaggacgacgaggcgaacccaacggtactcaccacaacgacaatcgacgtccgacgacggccggcaacgacggggaacgggcggcggctcggttgaccggcggcggcgaagaaggacgggcggccgggcttcctcactcctcggcgcacctcttggcggcggcggtaagcggcggcgacggcaggggcggcgctgcggcgcggctgcaacccggccggcggcggcgacgaactaaacgcgcgcggcgacgaggctacggggcactagagagctcgggagagggggcaaacgaaagaggaggactagggggtcctttatatagccataggaggccgggatcgagcccacatcgacgggaaaaactcgggaaagtttatcttcgccggaaaaaggaaaggatttgatccgcgaaattggaaaggatttccatataaaattttggggatttcttggggaaaaggaagaggagattgagaggattccattcccgcaaccaatttggaaataggagcaacggggaggtcggatttggtggaggaagcggcggctgcacaggtacaggacggcagctcgggctctgtccaggcttgaagatgaacagtgccagggaggcaaattagacttttggctgggcttctacttcttggcccgattgaaagagggacacaaagcagactttggaggagggataaggccagccgaaaggaagggagaatgggccgaggacagaagctgaacttttcctatttcggcccgaaaaggagaaggggattttaaatacttttccaattaaattaatcactgaaatgatctttgaattgttaaaaatacttccaatgctcaaataatttcaagaaaaatcctgaaaatacttggacacccaaagtatttaacaatattaaaaccagaccatttaatgattaatttaatatgtgggtaattactgaaatgctctttgtatgattaaaattaggaattgagctccgaaaaatccgagaaaatttcagagagttgacttaaccatggagaatttaacaaaaattaaatccatccatgctttatattagggaaattttatttcccacatttaacttcacttgtaaattaatgaacatttaatataaattctataaataatttattaaataatttataaatcctgaaacaaaaatcaggatgtgacaaactaccccccttacaaagaatctcgtcccgagattcggaacggctagaaagaaaaagggaataggtaaactgcagtctatcttattccataactccgataattattctaaggctttaaagaaaactactgctgctttgaaactggtggctgagttgtaacacttgaagacacaactctagaagacgcaactggcactgcattggctcctgtgacaacaatgttgttgacctgaccttgcggctgctgatgcttcggcttcggacactctcttgcaaagtggcctggcttgtaacagttgaaacatacctgctgcttccttccactactgttattctcctgagactgatcctgctgaactggcaccggctgattagcttgctcgatgttaacttcattgctttcattagtctctgatttgatctcaccaccgatgtttaactgttgcgactgtccttgaccagcgaaagaagattcaccaatttggagtggcttgatacgctgcctctggctactaccttgtgcctcctggaatacagtcattttccttttacggttgtccatcctgttcttcttgtcttcaagtcgaattgctttgtcaaccagctgctgaaaatcagcatagtcatgagagatcaacataactgatagctcatcctttaagccttccaaaaacttctcctgcctttcctcgtcagtacgcacatcttctggagcatagcgagctagacgattgaactcatgaagatattccgtcacggtacgatccttttgcttaagtgcccggaactcacgctttttcaaagcaacaacacctgcaggtatgtgtgtcttcttgaatgcttccgtgaactccgcccaagtgattggttgtccttctgctctgttcatccggaaatgatcccaccattctgatgcaggtccttgcaactgatgtgaagcgaaaacaactttctcctgatccgtgcactggagcagttccaacttcttctcaatagtgtgcaaccaatcacctgcttccactgggttggtagtgctagaaaaggtaggcggcctcacacgaagaaaatcagctaacttgttttgcggcggtggagcattattgttcccttggttgagctggttctgcatctgttgtatcatcatgttcattaactgagtctgttgagccagaacttgagcaagagttgggttcccttcattgttattgtttccacttccattagcacgagtgttcaccatctattgcatattagagaagatagaaggagagaggttacactaaagacaagaccttaaccaggttaacactgatctggtgtgtgtagaccattatattgttcaagttgattaagcaagcaacctagtataattacacactcatcattgaaccactccaatgacgggaatgcaaccatacctacacacaagcaagcaacaaacgttctaccctactaactattcttcaaggatagtttggcggcataggttctaaggtaggatccaaacttcattccatgttgacatctgggcacttcagttcttcctcgatccacttgactgacctccataagttgaccacatcagcattttctagtttcaacaactagtttcagaactactcaagttgaaagagagaggggagtagacaatgaaacaatttgcaaagaattctagataaggaagaaaggagaaattttcacaaatcatgttttcggaaaatttgtccttaaggtttgaccatttggcttatcctacagtcgagatggctctgataccaacttgtcacgcccggaaattcactagtaatttccgaacttatttgtgcataaaatc

SEQ ID NO: 2055 - DNA, 592 bp, Oryza sativa
ctatagggcgaattcgagctcggtacccttcttgttggctttgcgcaccatgactgggttggctaaccactctgggtggagaacttatctgatgaagccagctttgagaagcttgtcgagttcttctcatatggcttgtttccgatccggtgcaaatcaccgcagtttttgttttactggtttggcatcgggtcgcaccatgagtttgtgctcgatcacctccctagggactcccggcatgtcggacggctgctaagcaaacacgtctgcattgtcgcagaggaaggtgatgagcgcgagttcctatttctcatccagtgacgccccgatcttgacggtcttgtcggggttggcactggagagcgggacgatcttgattgcaccgtctggcttcggcgtcttgttggttttgctcactttcttgggcggctcagctatggcaggtgggttgggagtgtgctcgaccatgtcgaggctccgcttgtcgcactgcaccgccagtttcgcgtttccctgaatagtgattgttcccttcggtctaggcatcttgagcacttgatacgcgtagtgagatacggccatgaacttcaca

SEQ ID NO: 2056 - DNA, 855 bp, Oryza sativa
cttcagttcttcctcgatccacttgactgacctccataagttgaccacatcagcattttctagtttcaacaactagtttcagaactactcaagttgaaagagagaggggagtagacaatgaaacaatttgcaaagaattctagataaggaagaaaggagaaattttcacaaatcatgttttcggaaaatttgtccttaaggtttgaccatttggcttatcctacagtcgagatggctctgataccaacttgtcacgcccggaaattcactagtaatttccgaacttatttgtgcataaaatcctcgtccaggaatcagccgaggtacacaaactgacaatttaatatacagattcatcaaattaactaaaacgataaatacttacttatgaggcacttagtcctcatcatgaagaaaactgcagcggaaaataaaatctagcgaagctccggctccactcccacaggcagctcaactggggtataagccaaacgtcttctccttctggattctttttcttcaactgaggttgattgattattgcaaggtgagcatatgacatactcagcaagccacacagcaaatatgcaagtgcacaaggataccaaaggatggcataatattggctcatttgcaaaagcagcatttagcaaaacatttaagagaagtaaaacagtggagtaattaatcaggaattttaatcaacactgaacagcacacccatgctgcacaggcccaaccatcctgaacaaccatacccggctgtacagatctaactccaaaccaggagctaagcaaattattaccagttatacatctatagttatggtgagaggtgtgggactaatcacgaaa

SEQ ID NO: 2057 - DNA, 806 bp, Oryza sativa
aatttcccgcttcatgctaacccaccagtatttctccttcaagtctaagtacatctttgtactgcccgggtgaatgaataaggactttcatgagcttcctgaagtatcagctgtttaagttctctgttatctggaacgcatacccgctttccgttccatagggttccgtgttcatcctccgtgaaaccagcggctttaccctgtttcatattcttgaggagtccatgcatgttcggatcattcttctgagcctcgcggatttgatcgagcaaggtaggcttggcttccaacgcagccaagaatccacgaccaactatgcttaggttcagggcttccatctgttggttaagctcgggcggaatgccacggacgttaagattgttgcaatggctctttcgacttagagcgtcggcaatgtcgcgaccgggaaaattgccttttcccgaacgctagtgtattaatccccgtcccaggaaaagccggggtacaccatacaaacatgatataaaagacacatctttattacatcgataatatttacattattacaaaggcacttaaggcctgacaatcaaaaataaacagcagcggactagcgggcctacggctccatcttcacaggcgctcaactggggtataagccaagactccacctaagacttcttctccaaagcttctcttactgaaggggggagaaagatagagcaagaatgagtacaaccacagtactcagcaagccacaccggcagatgcatgattaatgcaaggggggtacaaggagtaataatataggggttaagttttgc

SEQ ID NO: 2058 - DNA, 558 bp, Oryza sativa
cttttgtactcagattatgtcgcaaggaatcaagataaatattatgaaaattgtttaaaaaatacgatataacatctatagcccccgactcactagtcaacggcgaaccagttgatgtagtgaggcaaaggaaaagacaaaatatcatataaagaataaaataaatgatgacttagctttgtaatattccccttggtgatggcatggacgcccatgaacggtggtgtgaccgaccaaccgtataggcgatgacaccagtcggcggcgacgaaggcaggccggcggtgaagtcgtagacgcccaacagcggcggcataataggccagccgtgtaggcggaggcaccactcggcggcgacggaggtaggccggcggtgaagtcgtagacgcccaacagcggcggcataatagaccagccgtgtaggcggaggcaccactcggcggcggcggaggcaggccggcggtgaagtcgtagacgcccaacagcggcggcataataggccagccgtgtaggcagaggcaccactcggcggcgacggaggcaagccggcggtgaagt

SEQ ID NO: 2059 - DNA, 778 bp, Oryza sativa
acggctggcctattatgccgccgttgttgggcgtatacgtcttcaccgaccggccgcctcgaccgccgccaattggtgcttccgcctgcacggctgacttattatgccgccgttgttgggcgtctacgacttcaccgaccggcttgccttcgccgccgccgactggtgtttccgcctgcacggctggcctttatgccgccgttgttgggcgtctacgtcttcaccgaccggccgcctcgtccgccgccgactggtgtttccgcctgcacggctggcctattatgctgccgttgttgggcgcctatgtcttcaccgaccggcttgccttcgccgccgccgactggtgtttccgcctgcgcggctggcctttatgccgccgttgttgggcgtctacgtcttcaccgaccggccgcctcgtccgccgccgactggtgcttccgcctgcacggctgacttattatgccgccgttgttgggtgtctacgtcttcaccgaccggctgcctcgaccgccgccgactggtgtttccgcctgcacggctggcctattatgctgccgttgttgggcgtctacgtcttcactgtcacgtcctgataaattcatcccgaattaaaattcattctctaaaaggaataatagaattaattaaaattcgaaaagaaattggcaaacactaaaatacgtacaagaaaaattcaaaagtggcccggagaatttttgtcaaattctccttggtctaaaaggagccctcaaattttagtggaattttcagagcacaa

SEQ ID NO: 2060 - DNA, 678 bp, Oryza sativa
tccccgcctatacggtcggttggtcacaccaccgttgatgggcatcgtcatctacaccgccggcctgcctccgtcgccgccgagtggtgcctccgcctacacggctggcctattatgccgccgctgttgggcgtctacgacttcaccgccggcctgcctccgtcgccgccgagtggtgcctccgcctacacggctggcctattatgccgccgctgttgggcgtctacgacttcaccgccggcctgcctccgtcgccgccgagtggtgcctccgcctacacggctggcctattatgccgccgctgttgggcgtctacgacttcaccgccggcctgcctccgtcgccgccgactggtgtcctcgcctacacggctggtctattatgccgccgctgttgggcgtctacgacttcaccgccggcctacctccgtcgccgccgagtggtgcctctgcctacacggctggcctattatgccgccgctgttgggcgtctacgacttcaccgccggcccgctttcgtcgccgccgagtggtgccatcgcctacacgctggtctattatgccgccgctgtcgggcatctgcgacttcaccgccggcatgcctccgtcgccgtcgagtggtgcctccgcctacacggctggcctattatgccgccgctgtagggcgtatacgacttca

SEQ ID NO: 2061 - DNA, 862 bp, Oryza sativa
cctggttctgctggttctggagttgctgcatcatcatgttcatcaactgtgcctgttgggccaagacttgagcgagtgtgggattctcggcgctgttgttattgttgttattgttgctgttggggccgttcccgttgctgcgagtgagcaccatctgacatagacaggagcacaagaagagaaacaggggagaactacttaggacagataattaaattaattaacttaacttttattgatcttaactgagtttcattattacaaagctgaagactctctcaccatctaactcaccaacttcctaacactcaaaagcaaataaagacatgcatttacatcccaccaatgatgtaaacgcacgcagaacccacacacacaaccaaacttaaacaagcaaactaacacaacgttctaaggcaacgactagcaaaacggtctaggtcttctgggcatcggagttgattgaaggctcgttcggcacgtccccatcatcttgagttggcccccactcgatcttggaatgggtacgtttggattcctcttcatcatcacttacattgacaaccggaggatccgctggggtagcttctttttccaccacacgaacctttggtgccaactgatagcgagggacgaatagagctctcttccttgcggtaagacggactctggccttctgcggtggtgcttctcccttcaacgcggctagctccttctccaaatgatccaccttgtcttctagcttgcagatcttccccctattccggtctcacgatcttgagcggctattacaatctcagcgcgggtttcatccatagcccatagcatctcaaccaaatgccttgtggtagcgtcgttctcg

SEQ ID NO: 2062 - DNA, 1900 bp, Oryza sativa
  unsure (1)..(1900): unsure at all n locations
gcgacgactggagcgacggcggcgcacggctggagcggcggcgacgacggcggcgcgagctacagggtgctagggcgctacggacgacgagaggcgaaggcgagggtggcggcgggtagaggaggacctgggggtgcttttaaaggggttgaaaggcggcggcgaaggcccacggcggctggcgacggcgatggaaaggttagggttcggggagagagacgaatccgattcgagatcgaatccacggatttccaaaccgaaatagatgatgattccaaaagagaaaaggtagaggggatcccgaagatcatttcccctctattgatttcaccggaaacggaaaggcgcggccgaatttggaaggagacggcggcggcgcggcgctagggtttcgggcggcggccagccagaggaagacgacgagtccgacaggtgggacccacctgtcagcgagcgggagcgcgcgcgcggncggcggctcggctgcgggccgacttgggccgaggagagagagagagtggttttgggctgactttcggcccaaaccaaaagagaatttaaaaaacctttttcaatttaaattattcattaaatgcaattccatttattaaaaatacttccttagctcaaataaatcccagaaaaatctaggaattatacaattaagcaaagtatttaatgaaattttgtctggcccacttttatattggaatttatttattaaaattagatcttctcttctaggctttttttaaaataaattctaataattccaattaaacaacgatttatatatttaggatttttagggtgtgacattcggcttcccaggccgaagccgccatggatggccgttcccgcccacgtcccgccgagtccggcgccctcccgctcgcaccctcgctctcaaaccaagtaaaatcggttccccactaccttctccaccttttcccccactctccccgcgaaaatcggcgccggttaactcctccaccaccccacgtcagcatcccacttcgccagccgttgccgttccgctcggctcgattctccctccccgagcctataaaaacaaacctagagctctctctctcattttccctcctcccccgagcttcccgttgcctccctcgctctccccaccagtgctcctctcgccgggactccagctggccgctattactgctcctgccgccgcgactccgcgcgaccgccatcagcggcttcccgtgtcgtgccgtaccccggcatctcctcatcttccctattttgtcgccggaaccacctcctcacggcgctcccactccccaccactcaccggcgtgctccagtcgctgcctcccgtcgcactagccaccaccgagccgcgccgacaccaccatcggcatcgccatgtcgatcttcaccctagcccctactccattttccccttgagcatgttgaaaaagcaaggcaagattgtttgatcgcgaggaaaagagttcggaagattgtttgaagaagcaaggcaagtcacacattccccttgagcatgttgagcctaatttataaatgtttttaccgtttgcaaataaagatgcatgttttgctaattacatgggatcagggtttacctatctgcttgcttgtgccatattatttgatatctgtcctttgtcaaccttgggtaataaatcgactagcttgtgttactttgttgatctagctagaactatatgcttagccatgtttaattaccactagctcagttgatgggataattgcagtattagacctgttagtatcatgatgagctgcggctcgagacatccggccatgtttcatggtcgtaattatccaactaaaactcgactgaatggtgggctgtgggtgcatggttttgctggtcgcacccatggca

SEQ ID NO: 2063 - DNA, 934 bp, Oryza sativa
tcgggggaaatcaggaggagggcagacacctcaccctcgggcccgacgtccccgaaggtgccaggccgcgtgggcgattgtgtctgcctcaagcctctggtcacgatacccccggtcccatatcaccgacaaggtggttttataactttagactttgggaattctcatatcatttggatagtatggaatgattggcttatgttggaattggacacacacctccccctctattcaaaaccccccaaacggttttacgctgggctcgaggtgcgtggttttgttttgttagtcatacctcaggtactataaggattaagctcgcgcctctgttccaaagcactaccgtactaaccacatgtctaatgggtaaggcttaactcggtgctcagtctagtcctgaacaaaaggacacggatagagatagatgaagtcgttgcgacgatggatatctctaaggcaaatgaaggctacgcgagctgcggctcggtaatcgagatgtctaggcaaatgaaggctacaagggccggtgtccgttagtcgagatgccatggcactcgactagtacgcgggtggtctcacccctatgtgtgtggcgcacccggtctagatcctattgctaggggctcaatcctggcctgcttgtcccgggaaaccggccgtaggcagggttggatcggtacttttgttcactgctaggatgggtgaagggttatgtcacatgtttacgacgggttccaaggccttggaatgcggagtaaagatgtgtcttgtgggtacagatgtacacctctgattagagtataattgtcacgaccggaaataacccaacgggcgttcctgacgtgcgtgcattaatccttatcccaggaggcaaggacaccaaaagttgatacaattcagagtttaacaagcggaagcgtaaatagaattatta

SEQ ID NO: 2064 - DNA, 5139 bp, Oryza sativa
caggatcttaaggaaagattttggtgggcaagtatgaagcgtgaaatcgcagaatatgtagcagtatgtgatgtttgtcagcgagtcaaagcagaacatcagaaacccgcaggtttgctgcagcctttgaagataccagaatggaagtgggaggaaatcggtatggattttatcactggactatccagaacgtcgtcaggtcatgactctatttgggtgatagtcgacagactaaccaaagtggctcatttcattctggtgaggaccacttattctgggagtcgtttggaggaattgtacatggcaaggattgtgtgtttgcatggcgtccctaagaagatcgtatctaatcgaggaagccagtttacttcaaagttttggaagaaacttcaagaagagatgggttccaagttgaatttcagtactgcataacatccgcagacagatggacagaccgaaagggtaaatcagatactggaagacatgttgagagcttgtgctttagatttcggtggaagttgggataagaatttgccttacgcggaattctcgtacaacaacagttatcaagctagtcttcagatggctccgtacgaagcactgtatggtcggaaatgccgcactccacttttgtgggatcagacaggagatcgtcaggttttcgggactgatatcctgagggaagcggatcggactcgtcgtcttcctctggctggccgccgcccgaaaccctagcgccgcgccgccgccgtctccttccaaatttggccgcgcctttccgtttccggtgaaatcaatagaggggaaatgatcttcgggatcccctctaccttttctcttttggaatcatcatctatttcggtttggaaatccgtggattcgatctcgaatcggattcgtctctctccccgaaccctaaccattccatcgccgtcgccagccgccgtgggccttcgccgccgcctttcaacccctttaaaagcacccccaggtcctcctctacccgccgccaccctcgccttcgcctctcgtcgtccgtagcgccctagcaccgtgtagctcgcgccgccgtcgtcgccgccgctccagccgtgcgccgccgtcgcttcagtcgtcgccgtcgctcggggaggtcgccatcgtggtcgccaagtcgtcgccgtcctcgtccacccctccgtcgtcgccgtaggtcaccgtagcaccgtcgccgtcgtcaagccgaaggtcgccgccgccttttcctcgacgccgtcgccgtccgttgatcttccgccgccgttttggtcaccggtgagttcgccgcgtcgctctctacgtgctgaggttctccgttcgcgtcgtcgcgccgtcgttcgccggcgagcatgcaagcccgagccgccgccggtggtgacgtcaccgctgacgtcatcgtcgtcgtctcccgtggcccggccgtggaccggtcgatctcggccgtccgttgtagatagcatcgatctcggccgtccaaacccgtgaaccgccgccgtgcacccggtccaccgcaaaccctagtcgctgacgcaataaaccccttttccttttcaaaaataattcattattgcgtcataattcaattaaaatctatataaatgctttaatccggtttaatctttgaaaattcataactaattcatcttagctcggatttagttggttcaagtctctaaaaatatccacatgtactgttcatgcttgtttatgtgctgttttggtgtttttgctcttttctgtttagattccgacgtttccggagagtccgttttcgctggagaagaatttgaagagttccaaggccagtaaggcaagtcacacagatctcagacaaccctttgagcatgttgatcctatttaaagctattgtttctattcaactattgcatctattttcgaatgtcattgggtggaattaacctattctttgttatggccctttttgtacttgattactttattctttgataccttgggttagtataatttgactagttgagctttatacaatggttcagctagatgttaggtataattgcttagccatgcttagaaacattagctcactaatgggataatttatgattcactattatttaatgatggcttaatgatagctcatgatggttaatcatgattggttaattaattaatttgacaactaaaatatgataatggtgggttgtgagcatatggttttgatggttgtgctcatgacaattaaggaccggttcacgattttcggttgtgaaacatttatcgtaccaaccacaagccagcgtgggcaacggctttactttctgtatagtatggttcatagtagagcaccagactgtgaagtggaggagataagcccacgggggtcactggggagtccataccttgtttataagggggtgattatgatccgggaacggtgcactgctttgaattctattatatagagggtattgtcacaatctctattcgggtacttgtcaagtatcgcgacgcatggttgacatgatgttgagattgtgtcttgtgggtacagtggtacacctctgatcagagtaaaactattcgaatagccgagcccgcggttatgggcgggtctaacaatgtctttcgtgattagtttcacacttctcaccataataaaagatgctataactggcaataatttgtttagctcctggtttggaatggtgtattcctggtttggagatagaactgtgcagccgggatggttgttcagaacgattgggcctatgcaacagggtatgttgtatagcgttggattaatattgtttaattactacttaactattttattaaattctgaaatgtttgtaaatgccatttatgcaaatgaaaccatactatgtcatcctttgttatcctgtgcacttgcatatttgctgcgtggcttgctgagtatgtcatatactcaccttgcaatcattcatcagaggaggagttctacagtgatgctgatggtatggaggattaggtgtagccctggtcaagctgcctgtggagtagagtcgtttgtgccgtttattttaattttccgctgcttagatttttattgattgagaggaactatctacctctgtaacgacattttattcgcttattaattagagtaataattgtactctattatcaatttgttattgtgtgcctcggctgattcctggacgagggttcacacacatgtaagcgtttggaattttggatagaaattccaggcgtgacaccgaaggtagcaggagggcctgacaaatgggcctcgggcccacctgtcggctggagggaggaggaatgaacttgagggagggaggggagccgagcgggccgagcggcccaaaaggagaggggagaagggcggccgggccggaggagagaaggggaagggagggagttgggccgaacacggcccaaagacaaagaggggattttaatttgttttctatttatttaaattgagttaatgaactttgtattattataattacttattgagctccaaaaattcacgggaaaattcagagaatatattaaggtgcaaagaatattacaaaatattctcggccatgatttttaatggaaatttttaatttactcattatttcacttgattaaattgctttaattttatttaatttccagaaaatgcattatttaatgatttttaatcccgaacgaaaatcggggcgttacattagccgcgtggtttccacgtgtgcagcccgcgtggtgtctagtggagtccgtttgtcggccactcgcctcggttgacacacggggtccgcttccgtcgacccgtggaccatctctgtgtactcggtctaccgtggtcctttaggttgacatgtggggtctgcatgtcaacaagcgcagccttcctgtcttttctaggctagcgcttacacatattttatagttataaaacctaattacaataatccgtaaatctccatgtaacagcattaaacttcggatgatcatatcttggtcatacgaactccgaatcgagccgttcaaatctcttaatttttgttataacctaaagaaccctgtgcttttctttttatgtatcgttattgcttctttttaggcttgtagctttgcttgtgtgcttcgcgtagcttctgttgttccggaggttcccgaagcgtggttcgcggtcgtcgccgaaggtttggaagaccgttctctctgagcaaggcaagtcgcatcatcattgagcatattgaatcccagtttataaaattattttgatttaaattattgcattaccgctttatttaaattcccgcgttatcactgttttatttagcacttcctattaatccttgttatagccttatcattgctattgtttattatcaccatgttcaccctaggaaaataaaaccccaactagtacatactctattcatggttccactagtatgaatttaggtatatgcttcgctgattaattaggcaacattaggtgtgacggagctcgtggctcctcaccgggagaccgcgcaggcccccctttgccggttcggccgggggcttagggtgaaatcccaagctctctctgtatgtggaaagatcgctcgccagcaagaaacgcgagacacggcgacgtatacaggttcgggccgctgggaagcgtaataccctactcctgtgtttttgtggatctgtgtatgaacaagttaccaagtatcaatcagccaaaagtcccccttctaggtgggcaaggtcctccttttatatctcaaggggataccacatgcacctttccctttttaaactggactgttcttctcttcataaatggacggagatcggtacggttgctgtccgagtgcccttctgacgggacgacccgtacctacccccacttccgccggaaacaggtgcgacgtgggattatggctgtctgtggatgacgcgaccagcgtcagaccggtcacagatcagtcatccttgtctaccatgcgtcagcttagcaacgtgcatgtttgcccttcttcatgtaacatcttgcatgtaatggttgggatgaagcctggtataaatctaaccagggctaacgtgccatctctaagagataacacgctagctccggcttgagac

SEQ ID NO: 2065 - DNA, 3108 bp, Oryza sativa
tgttgttgcactttgtaaacacagagagaagtaataaagttgtcatctactttgagagttcttcgatttgtgtttcatcgggttcggcggtctaccagtgacataccaacggttcaacaggcgacaagacagcggttcgaccggcggcgtgcaagcggttcgactggcggcgtgcgagcggtccgaccggcggcggcgacaggattacgtcgagatttccatcgattcgagggtaacttttatttccgttaaaagtttttgggtttttggttttccctaccattcaccccccctcttgtaggcttggtttcttgtgttcgatcctacaattttaacttcctctagctaacactaggccctaatggtttagttgtttatctagatcttagttaatattcatgagacctattatgaaatgcaaataaaaaattcaaatgcacatgatggacaagtcaaaacatgttttatgcaagtatgcatgcttttactcgtgtttgcatttatgtcctaggttataaatgaaaaagttttaatttattctcaaattgtacttaggttcaagttagattgaccacacttaggttaaaaatggaaatttttagctctcaaaaatggaaaagttagcttccaactattttgataggaaatttttaaggtctagaatttgggtatgttacagtgttacccttgagcgttcgctcggagatctatttgtatctaacaatctgttatgagtattgatttcaagaaagtcatatttcagggctttgtcgcagattctacaattactcgattactcgagaacgattggacgactactcaattactcgagaacgattggtggagttcgacgaaaattatggaatgaagagatggtgaacctaccgagatgaaaattcttgacttcaacccaaattctcgattacggcaggtcagtaaacttagtcgtatactccgcaccttctcgctcgtccgagaatggtcaagcgagaacaacattgttattccaaggtctttggtcgagaacatcaactcgttcgtttacgttgatttcatgcttgtttatggcagttatttagactttaattcaaattcacttgtagaacgttgatcttttttcgatgatgttgagtactccatgtcttctcgaatgttatcaagaatgaccaagtgagcatgaaatgttggtagggaatgtcttctcgaatggtagacttttcacgcgatattaattaattataaccctcttgaaaccacaatttagagggtacacaggttagttaagtctagagaataaatgagaaccctgcaaagtaattaactacaaccatctacaggccgatggatcacacagatacacaaaggagagatcaaacagtatatccatctgagactctgtagttatctctcagttcagtagggagagagacatgcatgaatgcctatactgcgtcgtagctagctggtttcttttctgttttgatgcgaagtatgcgagcatgttcagcaaggatccacacaacggtcgtgagctcaccaccacgggcaagctgcttggcatgagaatcccttgtacatcggatggacacgttaatcagctgacgtgcccactccccgatgatggcatccgtcgtcattgcgattgatggaaaagagacattcttagcgaattccatcaaatccggaaactgccggtgaaatttctttagtattgggggctcgccgtcgccgtgttctccaactttttcaatgatattctttctaaaattaggacctcttatcctaggtagcagaaacatggctagtatagctccctctgatagaacattactcgtgtcgtaaagaacactcagaaagccgctttggggcctcgaatcgtccacctggaagtaatttccctcctcatcttcgttggcaatcaggatctcggcaagacgtttctctctcatcattgagctagtacgcaaggaaggatcactaccttctttctccttccatattccggcaagagcctcactgacagcttcatatcggctactgaggacgaggcccggtagcatcccgggccgcaccgcgacgaggaacatcatgtaatctgacaacgccttgatcacctccacatcctttttggacttgggcgatgcttcaatttctgattccgctgagaagaggaatatgtccgtggcgatgtgcaagataagaatggtctcttgtaaatcaggagtgaacttcagggcaaggtctgcttcctgatgagcatgtgtaaatggaggagccgccggtgcaggcctccaggcctccgtcactattatttgtcgtggtggtcgtcgttgtgggaagggtttcttcaagacttgccagatagagttgaacaactcgtccctgaaatctcttgaatcaatatgattgcccctcatgcgctggtattcgtactccatccagttctcctccggtgctaaccgcttgaacatgccgctcttccagttcttggtccttgcctcgctctcgtagcgagtgcactcgtgcaacaagttgtactgtccaatggtttgtgaccacatcctgtatctagttggcttcttattattgtcaaggatccgaaacagattcagatcagacacgatgaggcgacggatcagtcgccatttccctgagcacagaagtgcatgatgaagccacgatcgtggcctctcatcaaggaacgagtagaaccatgtcgacgccaccgctcggagaagccatttgatgtccaggacgaccatgccggccagcaggacataggtgatcacgacgtcggccgtcgcctgaccttccttgctgtggagccaaaacagcacgaatgccgccgtcgcggcgatcggagaggcgaaacggaggatgtagcctttccatgagtgcaccacggccgccttggtgtagatgaggtcgtacatgagggagagctccatgttgaccaccctgtacagcttctcatcccatgtagcagagagtgcttcttgttcatccgcattattttggtccagaaaatcgatgaaggcgtccttggtgatgtctagcatgtcatgagcagccagaaggatttgctcatcattcggctccctgcctcca

SEQ ID NO: 2066 - DNA, 2389 bp, Oryza sativa
tcagctcaattcgagcccagcgatgcttcaaagacaaaaaaaaaacaaaaaatctaacaaaaaagagactagtacaaataagaggaacaagttcatacataagagaatcaaacattcacatcagagaatcaacaagtttgaggaggaggaggagccccagacggtccaccgtggcaacgtcatagaggagcaggagcagctcaatgagcagcggcggcatgggggcgaggacggcgatggcgccgtggcgcaggagacgtggttgacgttgaccgacgccagcattcctcccgctcccctacccgatgaggtcgacggcgccgcagggtgcccctgcgtcggaccaaccttgtcggtgccacgcttctccttccaagagcacggcggcagtggtagagaagcgaggatggcaatgtctccgtggtgcgggaggcgtgattgacagtgacaagcgccggcactccccccgctcccccacccaatgaggatgatgacgtcacgaggtgcccctacgctggctcggccccatcagtgccgcgctaccccttctgactccgttagccctgaaggcagaggggaggtggtggcatggtgagtcacggctggttatttggggaggagacaagatgagaagggaggagaggtaagggaggtggtggcttggggaagaggaaggaaagggagaggagcacgaattggatgagaaaggataagaaggaagcataaagagaataagaaggaagcgaagagaccgaggagataaggatgagaggacgggagataggtgttggttgtattgaaaaccgacacttctacctcgtatgaaagtgccattttttaataggaatcgacacctatttgaatagcaatgtcctagcttttgccgctggcacccccgcgggagcccgtgtgggtgagaaaagcattataaatgtcagttttagctattctaacacctatatatagtgttgtctcctttttttagcagtgaacatttgcttcggtgcatatcaatagccggaggcgaagaagtggtgaaggaaatccaccaaggattgtgtggagcccatcaggcagcaaggaccgtagcatccgaagagtttcggcaagtgtatattggtcaaccgtactcaaagtatgcattgaccagatcaaaaggtgcgaaagctgtcagcgacatggctgaagccagtcagcccctcagtatgaattatggcccattgcacctgtctagtcgtttgcaaggtgggggcatgacatcattggcccgttccctatggcgcgaaatggctaccggttcgccattgttgctattgagtacttctctcggtggttagaagctgaaccactccatactatcacttcggcagcagtccagaaattcttgcgaaaaaccattgtctgtcggtttagtgtgctgaaagagttcatcaccgacaatggcaagtagttcaactctaatgaattcagagagatgtgcgaggggctaaatttggagatcaggttcgcctcggttgtgttggtatttcttacgatcacagatgaaatccacaagcgcatagatataccgctgtagcacttcccctatagagtattccaagtttggtcagatctttctccggttcatcctaacacgatacttcaggcactggcaaccacactaaagcaaccactataaataaatggactatagtgaacaatgatcccgtatgctatttaggaactaaccaagagataactctcactagacaaatctaaattactaaggaagaatattatattgaattcagagtaataaacagaataacagaaatgagagaagattaacgacaactccagaattcttccgacttcttctactctactctcttcctattctagtatacaatatagtacaacagagcctcttataattcatctcaagcttggaagtgtgcattgaagtgagtaaagtgaggtctttatatagaggtaggtatgacggttagcgaagaggaaatgtccgaactaccccgcaaccgccatcaaggagtgatctggagcgtccacgccaaaacctgggatcaacagtgggggttcggccgaacctgggctgggcccccctagcctggcctttggcctggctcctatcctggtcctcccctatccaatcctcagtgttttaggctgattttctagtattttgatgaagttcacaacccatccttgtatggatacatatttgtcctcactttagtctagatttcctcccaacctcagtgtttatcacctgcatacaaatatacaccaacacttgtagaatatgtgagattaagcacctatcactatgttggatgttttattatctgaaatttatgcagatgttggcagtatagaattggtatttaac

SEQ ID NO: 2067 - DNA, 8523 bp, Oryza sativa
attaaaatgtgattattactaatgttaacaatactatatgaaaacaattttgtgttaaaggaaacataccattaaatatacaatggggttatttcattttggtaaacttaattttttttgtttttcaaaaattcagtaatcctaaattcgtaactgataggaactaataaacatgaactttgtatccatagtggctatccattatgtaattaatttaatactgaaattaataattagcaggttacaaaaataaaatttggaatcaagaaattataaagaaataccacatattcagcatgggaaaaaatatttatgaaaggtattaacaaatttacgccgtgcgttgcacgggttggtggctagtctagctagtgatgtataaaatgagtattttagttaactaatctaaccttagttcataggcttaaggtctttattatcatggttcatattttataaactaggggagctctagtccatgctagcaatttattatatcaacctagaaattattatataagataagtgccttaagttttggtggatgaggatggaactatgcattcactggtctaacaagttttatttgggtttcattatagctagagcgtatttctatatacatttatatatatacatattgctcaatcgatactatgtgattagcacctatcctataaatttaaactttagagctataacctgtacagaaggttccatattttattttactatgttgaagcccactgtttgctggttctatagatatttggttcacttcatttagactaaagatgaattttctacaaattttacaatttaaggttgctctatgatggttattacttacataagtatttagaggcttttatcatacagtaagtatataattttattttataacttggaagtatatgttttggtgattctacagaacttgggtttactcaaaaaggatctaagatgaattttatatgaacttctaaaattcagctcatctaaaactagtcatttaaaggtaatagttttagaggcatttgatgtatagtatgtatactatttcattttgctttataggagaacataagttggtggatctgtagaaactgagtttgctccaaaatgagttgagatgtactttatatgcattttataagtttgtgtatgctttatgtatgatttatcttagacccattttagagacaaggtctgtgctgagggtgccaagcttaatgttaccacattaaagttcatagttttgtgaacctacagaaatttgaatcatctcaaaataagttatatttgattttatatggattttacaagtttaggtgttttgctgttaaaaagtaaaggcttttagtattatcttttacattttcagattttaaactcatggggtccacctgtcggtctcaggccaatatgcgaaaaggcccctaggatttcaggaaatcaaaccgcagtcctatgactgttctgtgtgtcttgagcttttgcagaaaggaccctatattaatctaaattctcgtgaggaggtccctcgttcgagctgaagcagatcaagccatggctgagctcgatctcaagcttgccagcggcaaacggtggctcgtttgagggtgcgaccaaaagacaaaatgaagatcatgctattccgattccattcctctacttttctcggtcagtggacatcggagtgacgccggcggcgagtccgagcggcggctgtgcttaggctgctactgcatgttgagttggtgctcgattctaagtgaatgaaatgcatgaatgcaatcctatgggctcaagggtgctcaccgaaccttgaacgaggcgcgggaaagtctggacagcggcagcggtgaagaagatggtccggcgatggtgtagagctccgggaagacggcaacggctcgatccactcatcgaattgacatgcatgtgttttcatggggttagtgaggtcccagggatggtgtatacgcgaagaatcggacaatggctcaccggaggaggcggaatcgacaatggcgacggcgaccggaggtgaagaagacggtagccgatctccgcacttgctgcgccattgcctaggatttttgagggtttttgaggaagacttcaaggagaagacgttggcgcgacggctcggcttggtttggtctacagtggtcggaacgacgacgatgtcggctgcggcggcgcttggagcgcgctccggagtgccgggggcacgacggcgttcccgtcgatccgctgcacgatagaggatgaaattaaaaggataaatcctcggcatggtgaggagagtagagtacaatagtcgtcttcttcgcggccggcggcaaggatgagggcgacggagaagttgagagcctcctccctcggtttcttcggcttagaggtggagaatgatgtgtggagatgcagctgggaggaggagaaggctagaataggagtttgatggcgtcgacacgttgtggctacgcgtcgtacacagccggcaccaatctctctctctcggctgtctctggtcggctggaagatttgcacagggtgaggacgagccagagtggctgccaagtgggtccaggtcgtggcaaactaagctagggtgagagggttgggcagaaacgtgggtgaagaaaacgtttgaatgattttcaggattatttctctctcccactttagtaattcaattatttaatttgtgggtagaataatttagtgtggatttttctgaaggtatatgaagatacctagattccgtattctttagttgcactcaaaaattatggatagattactcacagaaattagaggaatatgggttctttggaaaatatttcgaatttttaggagacctaaacagagaagataaattctggaaaaattatttttattcatgataaattacctagtattttaataaattattttacttatacacttttatgcagttaaatgcaattttagacaaagtatggttttagccgattaagaactacaggtaatctagtttttattagtttgactgatttatttgaggtaccaaatttagttattaaattataccaaaattacagtgagttgtatgtgttgagtagagcctacatgaattttctcatgattttatcttgcacgaattattttagataattcgcaagacttatgtcttatatgtgtttccctttcctaaatgcatgtaaatgtttataaaagttatatttggactcttattaacctgaggtgatattgatatgttagaattacaatttaccttacacatgtcataagctccttacctatttatgcataaatttactttagcattaaattaagagaatgcttatagagatgattaagatagaatataccctatatgatataatttatttgttcactttcatgttcatgacatgtcttcagatggatgtccaaattagttttgtgaggcttgacattagccatgttgatatatttcaaggtgtatggtttctatttttgtgaaatcattatcatgattaatatttgtgatgaacaattggctatgcaaatgatttagttaaagaattggtttgagagtttgtgtgaatgttggtgtgagtacgtgtgactaatgtgggtcaggttgtgatatctgtgtccagaaacggttgttttgtctgattgtgtgcaggtgacttgagatcagccttggtcaatggtgaggaccgggactatgttcagggaggaacagaggtctattgcggtcgggataccacgtgagaaggtgactagagtctggattcttgaaggtcaacttcggtcaacggtggggatcgggacgagactcagggaggagttgaggtccagacggtcaaggataccgggtgacgaagttggatacgaaatggcatacggtggatggacaccgtgtgggagagatcttcgcaacgggcttcacgaggtgtgcgtgcaagcgtcggtgttcgcgaagggaattggaagaggtttatgtatggtgctacagtacggtggtgtactgtagcgtgcatatgtgtatgcgtgcttgtgtacagcatgcatatatgtgtggtatacgtgcaggtatgcatgcatgtacggtgctgtacatgtatgtgtgtgatcgatacatgcatgtgaagcatgtatgtgtgcatgattggttggccgagcagcaggagagcggctcggtggctgtggcttgttggagccggcccaggccgtgcggcgcgaggagaccgagtgcgagctggcgaaggatcggtaaaggaatccgatccggagcaggattttccatggccggtgcggctgtggtttcggagaaaaaggaaattgagagattgagtcctactgtgaagaggagtcctacgtctactttgattaggagggtttttcatgtataaatagagggggagcgtgaggattcctggtatcgcttttcggtatcgcttttcagagcgtggagttgatagtttagttagggtttcgagtttagtcgagatttttgtaaggagtgctgttgttgcactttgtaaacacagagataagcaataaagttgtcatctactttgagagttcttcgatttgtgtttcatcgggttcggcggtctaccagtgacataccaacggttcaacaggcgacaagacagcggttcgaccggcggcgtgcaagcggttcgactggcggcgtgcgagcggtccgaccggcggcggcgacaggattacgtcgagatttccatcgatttgagggtaacttttatttccgttaaaggtttttgggttttttgttttccctaccattcacccccctcttgtaggcttggtttcttgtgttcgatcctaaaagtggtatcagagccttgttttcttctttggattttaaccgatctagagtttttgccatggctactcccgctaggttttcaactaagcctcatgttttcgatggaacggatttttctcattggtatagtaggatgcaatcttacattatggctgaagattatgatatttggagaaaagtttctcatgcttatgtgattcctgaaactattaatactgctgctgaaaaaactgcttttgaacaaaattgcaaagctcgcaaaattcttttgagtggtatttctcgttctgattatgatcatgttgctcatcttcaaactgctcatgagatttggattgctttgagtaattttcatcagggaacaaataacattaaagaacttcatcgtgatcttttcaaaatatattaaatttgagatgaaacctgaagaagctttggatgattatctttctcggtttaataaaatttttagtgatcttagatctgttgattcttcttatgatgcaaattatccacaatctgagatttctcgtcactttttgaatggtctcgatatgtctatttgggagatgaaagttacatctattcaggagtctgtgaacatgtcttctttgactttggattcgctttacacaaaactgaaaactcatgagatgaatattctttctcgtaaaggtgattctaagtctagtgctttggtttcgtcttcaacttttttggatgttggtgcttcttcatcgaagccttctgttcttgctttatttaatgccatatccgatgatcaactcgaacagttcgaggaggaggatttggttttgctatctaacagattttctcgagctatgaaaaatgttaggaacaggaaaagaggagaactgaatcgttgttttgagtgtggagcacttgatcatcttcgttcgcattgtcctaagcttgggagaggaaagaaggaagatgatggaagagtcaaagaggatgacgtgaacaagaagaagaacatgaaggagaaggagaagaagaagcattgtatgcagtggttagttcaggaactcataaaagttattgatggatctgaagatgaagatgagggcaaaggtaagcaagttgttgatctagcttttattgctcgtaatgcaagttctgatgttgatgaatctgatgatgataatgaagaaaagcttagttatgatcaattagaatatgctgcttataagtttgctaagaaacttcaaacatgttctattgagcttgatgagaaggatcacactattgatattctaaatgctgaaattgctagattaaaatctttgattcataatgatgataattgtcaatcttgtgaagttttattttctgaaattaatgctttgcgagatgtcaattctgttaattgcaagaaattggaatttgagattgaaaaatctaaaaagttggagtcttcttttgctcttggatttgctttacatgctcgtgttgttgatgagttgattttgacaaagaatgttttgaaaaaatacaaagttgctttttgtgcaagttctttagtcaatgcttcatgtgtaaataaggcaacacaaaacaatggtgttttgatttctcaagattgttcaaagtgtgttttgaatgagttgaagttgaaagatgctttagagcgtgttaaacacatggaagaaattgttaaacaagatgaggtgttttcttgttcaacttgtagaaaataaaaagatcttttggatgcttgcaaaaattgtgctattcttactcaggaggtttcttatttgaaaagttctttgcaaagattttccgatggtaaaaagactctcaacatgattcttgatcaatctaaaattagcacacacaatcgtggtttaggttttgattcttatgctcatcatactagacatcctcctactgttttgggtgcttctaggagaggtgaaattttgattgaaactgagcctaagaacactgtgtttaaatctgttggcatcatgtcttctttgaatgcatcttcttcgaaatcaaatggtgtgaatgcaaaaccttctgttgatgcaaaaccatcaatttcaaaatcatctacttcacaaacttgtcgtgagaagtatacttgctctttttgtgaaaaagatggacatttggttggtttttgtttttgacttgcccgcaaacagaaaaaggaaagagaaattgcttttgcgaaacaacggtggcaaaaatcgggtttttgttcaaggagcacggttagaccgcagctaaaccggctgccaggcccggttagaccgcagggacagcggcggtcagaccggccccggggcaattttgcacgtaattcaaatcggacttttgtgaagcgacaaggtaagttttcaggtaagtctggttctgattttgttagtgcatatagtgcatatgtacctactggttctagtggtcgtgtgactcagtgttggattccaaaatttcttatttctaaccccaacacggaggcctcgacatcttcgttcgtaggtattttggtggcatactccccatgtgcattcaacgttgagattgcttttcatggtaacatcaatttacttttggattgacatattttttggttctactctctcgattattagcttttcatatgctagtgtttgaggtagtagtttttcttaatacaagtggatatatgtcgattcatgataaccttggtgatatcattggcaattggatgtctttctcgaaatctttaatttcttcttgatttttcttcggggagaattggaggttaatttgagggggagtttgtgctttttcatgcattcatgtttatttttatgcatttgctctaattctgaaaattaataaaaataagaaaaagaagagctttgttttatacctctagtatattcttgtgcatgctagcaaaataattgaggtctatttgttgctatgttagcttgtatgcattttaatctttatatgaagcttagatattgcttttaagtgagatgatgcatgacactaaatcttttacttgaattacgaaaatatgcaatattgatgctagcatatggtttgatttataaatgctttatatatatgcattattgaattgttattactcaaatagctttaaatgctcattgtgaaaagagaataaaaaatatgaaaacaatgaataccgaatccttggaaacagtcttgacgacaaggacgtattcgatgtgagcaaaataatgggtgccgaatccctggaaacagtcttgacgacagggacgtacccggaataaaagagaaaattatgagcaaaaaggctcaagaaaaagtaaaaattctcttggttgctttgtgctaaagctaatttgagaaagagtgataaatgcaataggtatatatgtatagtgtttatttttcaatctatgtgcttgtgaatatattgcattataaatcatttgaaatcatgaatcattattgctgatttaagcttaattgtaatatctttgattcatgtttatactatggtgcatgcttactaactagttgatgaatttatctcccatatctccaaaacatgatcttgaattgcttttggtacatttcaaagctctcgaaaaaaaagagaaaatataaaataaaaaatggttattccaagtggcaatcatgacataactgcatttgtg

SEQ ID NO: 2068 - DNA, 1103 bp, Oryza sativa
aacacatcgggatactcccggactataggaatctcttccaaagtcaattggttcagacgtgaccttatagactcagaagataatgcatgaacagttacaactcgaccatcattactggtgagagttacttttctattagcacaatctatcacacctttatatctggctaaccagtccatccctaggatgacatcaaggtctttggattctaacagaataaggttggccaggaaaggtacaccttggatctctattctgacagaggggctacgttgtgaggagagtgcttggttactcggagtactaaccatcaaaggacgtctaagttcctttacctccatcccttgatttcccgcaaaactcatggataaaaatgaatgcatagcaccagaatcaaaaagcacggttgcaggaactgagttaacagggaatgtacccaaaatcacatctggagcaccttgagcttctgcagcagcaacatggttgacacgagccttggctgcgggtgcggaggggttgttctgggcagggacgaccttcacgcggcggggcttcggacacttgtcagcgtaatgtcctgggtctccacagttgaagcacaccccgggcttactgccttgctccctcttggcaggctgttgctgtgttggagatgcaacagggcgtggagcttgattgcggatgttgttgccagcattgttgttgaagaactatcgctgcggacgaacaacagacgaagaacctccctgtggcatggactggggtcccaaagtaaggcgtggcctttgactattcccctgctgtgccttgaaatgagcaatccggcgtttcttctgctccatgcggttgtatttgtcctcctggcgaatagctttatccactaacttctggaaatcatgataatctccagtcataagtgggtaggaaagttcatcattaagtccttttaagaacctctcctgacgctcttcatcagtgcgcacctcttccggagcataacgagccagacgattgaactcgtgcagatactcggtgacagtgcgggaaccttgtgtgagtgacctgaattccttcttcttgagagacaccactcccgagggtat

SEQ ID NO: 2069 - DNA, 726 bp, Oryza sativa
ggagttggctggaaccaaggcagcgatcatggtcttcgtctggttcaagatgttgacaacatgatcagcctgattgagtgcgtcttccttgaggagggtgtcgaggagagtgattgctgcaactgcgttctgctggagggtgcgaaaaaccgctgttccatcgacgtcttgttgcccgatgagttctctctctcgtcacccggattccaaggcgcgctgccgtcgatcttcagcctcctttgcaactcgctcgcgatcttgttgctcacgctgtagtcgttctcgctcttgtcgctgtcgttcttcctccagtcggcgacgttcagtctcttgtcgtgtacgctcttcatccgctttctcggcttttgcattgttcttccgttccgtggcaggcactaataaccccaaaaagaaaaggcggtaattattcttattacttgtctccaaagtggccaaatcaccggacttgtaacaattacccaaatcctcgtaatccaagaccttcggtgggtgaaaacctaccccaagggaactgaaggagccctcccactctttccgtgagaatggcccaagaaggtggagtattacgcccaccttccttgatctaaaatggatccgggcccaagcccgggctcgtctagatcttccagtgggagaaccttggctgtgaagacaccggcccaatcattacgaagtctcattaggattgagggatatggacccgtc

SEQ ID NO: 2070 - DNA, 720 bp, Oryza sativa
tcagatcaaccatcccggctgcatagttctatctccaaaccaggaatataccattccaaaccaggagctaataaaattattaccagttatagcatcatttactatggtgagaggtgtgagactaatcacgaaagacattgttagacccgcccattaccgcgggcacggctattcgaatagttttactctgatcagaggtgtaccactgtacccacaagacacaaccccacatcatgttaccatgtgcctcaataccaccacggtacctcggaaaggagttgtgacaataccccttgcataacacaatccactgcagcgcaccttcctggatcataatcaccgccttaaaaacatggcatggactccccagcgacccccgtgggcttatctccgccacttctcagtctggtgccccgcaatgaaccatgctatacaaaagataaagccgttgcccatgctggcttgtggttggcacggttaatgtttcacaaccgaaactcgtgaaccggtccttaattgtcatgagcacgaccatcaaaaccatgtgctcacaacccaccattaccaggttttagttggcacattaattaattaaccaatcacgattgaccatcgtgaactatcattaagccatcataaagcaatagtgagtcataagttatcccaaaagtgagctaatgtttctaagcagggctaagcaattaaatctaatatctagtt

SEQ ID NO: 2071 - DNA, 1774 bp, Oryza sativa
ctcggtgatggcagaggtggccaatgtgggaacaaagtcgtccatcaataacaatgaagacaccagtcggcggtgacgaaggcggtcgacggtgaaagcgaagatgcccactaatggcggcataataggccagccctgtaggcggagataccaatcggcggcggcaaaagcaagccggtcggtgaagacgtggacacccatgaacggtggtgtgaccaaccaaccgtataggcgaggacaccagccgtgcaggcggagacaccagtcggcggcgacgaaggcaagccggtcggtgaagatgtagacactcatgaacggtggtgtgaccaaccaaccgtataggcgaggacaccagccgtgcaggcggagacaccagtcggcggcgacgaaggcaagccggtcggtgaagatgtagacgcccaacaacggcggcataataggccagtcgtgcaggcagaggcactagtcggcggcggcgaaggcaagccggtcggtgaagacgtagatgcctaacaaacggcggcataataggccagccgtgcaggcgaagacatcagttggcagcgacgggggcaggccggcggtgaagtcgtagacgcccaacagtggcggcataataggccagccgtgtaggcggaggcaccaatcggcggcgacggaggcaggccggcggtgaagtcgtagacgcctaacagcggcggcataataggccagccgtgtaggcggaggcaccactcggcggcgacggaggcaagccggcggtgaagtcgtagacgcccaacagcggcggcataataggccagccgtgtaggcggaggcaccaatcggcggcgacggaggcaggccggcggtgaagacgtagacgcccaacactggtggtgtgaccaaccaaccatataggcgaagacaccagtcggcggcgacggaggcaggccggcggtgaagtcgtagacgcccaacagcggcggcataataggccagccgtgtaggcggaggcaccaatcggcgatggtgaaggcaagccagcagtgatgatgaagatgcccatcaacggtggaggtgacgtacccgacgacaaataaaacgggtcctctgcgtcgaactatggtaggtgcaggtcattgccgtggccgtgtatatcatccgcacggctcaacctcaatccaaccaatatatgcaaacacagaaacaccaggaagagttgattagcgatcaaaaatataaatgcttaatatctcatatgcatggcatgattagatgaattgtgcacgttgatccatgcacgtgttttgatggcatgattttgctagccacgggagctgataaggccgtgtcaattgcttgtcgatcaaatgctggtgctttttctttgcccgagtcacagcaaggctgaaagcttgacgatccatgatcggactcgccaacaatcgacattaaacagaagacaaaggaaagtcaggcattaacccgtgattagtcatcaagaataaaatattgataatcaatatagaccagaaggattaaattaaccagggaagggaaaaacagactcggactaatccggtcagtatatccatccggtggcttacgcggccttcaacatcagacacccggtgggtgaggttcgcacgacatctgcccagctagttggctcggtttcgccgactcgacctcccggtgacatgtctatgtgaattaaatcccggtcgccggcagtcccgagtgcaatcaacaacaattgatccgatgttctggttgctggtcgtctcgatct

SEQ ID NO: 2072 - DNA, 742 bp, Oryza sativa
tggtcacaccaccgttgttgggcgtctacgtattcaccgccggcctgcctccgtcgccgccgattggtgcctccgcctacacggctggactattatgccgccgctgttgggcgtctacgacttcaccgccggctagccttcgtcgccgccgagtggtgcctccgcctacacggctgacctattatgccgccgctgttgggcgtctacgacttcaccgccggcccgcctccgtcgccgccgagtggtgcctccgcctacacggctggcctattatgccgccgctgttgggcgtctacgacttcaccgccggcctgcctccgtcgccgccgagtggtgcctccgcctacacggctggcctattatgccgccgctgttgggcgtctatgacttcaccgccggcgtgccttcgtcgccgccgagtggtgcctccgcctacacggctggcctattatgccgccgctgttgggcgtctacgacttcaccaccggcccgcctccgtcgccgccgagtggtgcctccgcctacacggctggcctattatgccgccgctgttgggtgtctacgacgtcaccgccggcccgcctccgtcgccgccgactggtgtcctcgcctatgcggttggttggtcacaccaccgttcatgggcattcacgtcttcaccgaccggctggcctacgccgccgccgactgatgtttccgcctgcacggctggcatattatgccgccgctgttgggcgtctat

SEQ ID NO: 2073 - DNA, 5041 bp, Oryza sativa
tggcatcaacatggacctattcgttcctcaatgataggccacacttgtgggttcatcacgcgttattgtgctctggaaagtggcgccagctccatcgttccattgtctccctggatccgtcattgatcctcgccaaggaaccaagtagctacaggaagtggtctggaaaaattgggcagtataacttgttgcacgagtgcactcgtgacaaggaccaaaggaccagggaatacttgagctctgtggtgaagaaagtagcatcggagggcatgtggatggagtacgagtaccacaacttgaggggtattcatatttcacaggatttcaagaagaaattgttggattgtatttgggactatatgtatttagcatacccagttgaagacatggaggaggtggaggaggaggagaagaagaagaaagaggcggagaagaagccaaaactgctgatgatgcttcctgagcatcacaatgttgagaacattcggaaattggaagaagctctggattttcttcctgaatttcaggagtccattcttatcatgcacatcgctacggatattgtcttcatgtatactaaatttgaacaaaatgcagcatcgtccaagtccaaagacaatgtgaagatgatcaaggccttgtcggattacatgatgttcctcgtcgcggtgcgacccaccatgctacctggtcttaagctgcgcagcctgtacgaagctactaaggaagctcttgccaaaatatggtctaagaaagaatcttcccgctgtagctccagaacaagacaaaagtgtcttgctaacatcttgcgatgcatggagaacaaaaagagagggacaaggccggataaatccgacaactggaggctaggctacaggacccggaactgggaaccagactatacaaccgatctttacaacgttagtattgttctgtcagatgggattaaactagctgatcatttgctgcaatggctacatggtaattgctgggtcaaatttcccgaatgtgaatactcttacgaggcaaaatttgcacagatgtttccgaaattgagggaaatcctgaacgagcggccgatgtccgaccaccccgataaatggtcgcaactgttggaacacatcttcttggagtgggtgcgtctgctgattaacgcgtccgtcaagtgtacaagagattctcacgccaagcagctcagccgtggtggtgagctcaccaccatcgtttggatcctggttgaacacgctggcttattccgcgttgaccgtcaaaagagatgaaattaactgtttgttgcttcctactgaatcgaggggttcatatataagttgagacgtctgtcttctcttgtggtctgtacctgtaaaactcaatttgtagatcacagcgttctcaattatatatactagccgccaacccgtgtcttgcagaggctatatatcacttatattataaatactaaattctgcattttcattatattataaattttagaaaatgtaatcatatgttactaattgataactttgaatttcgttattaaataaataaaataaaatactaacttaagagttcaagatggatacaactgcttatttattaacgaaatatagatacatcgatttcgactaaagatagacctcataatatatataatgcattatggatgatcttccgtaaatgtattatggcaataaccatatatcctataggaaaaaatataaagaaacatggaatatattgccagataaaatcataagttatatcgttgaacattgttagcaggcgtggaatttacgtgaaacatatggctcgattagctgacacagatgccattgttttcctttgactactaactattatataatacgtacagaaaaaaaatgacatgagtatgttacccacatagctaatgacctaaatttagatcagtttgaaatttgattccagcggttattttggcaacctgaaaatgcatggcatcgaatttgagtaattattgatgctgtgtgtggccgctcgatccaagcaccatctattaaaaatcactgtggaccatagaaaaaagttacagattgcatctggtgctggatcagggggcattgaagagaaacggcaccatgcattaaactcagaagaatcattggaacaatatatataaattaatatgttgatgacctcgggatgctagggaacatggtgattaagcgcatctctgcggagtagtaaccagtgttcccactctggtgcatgacatggaggttgacgttgcttctatatatcatgccatacaaaaacctacaatgtgattatggggaggatatcaataatttagcgttaaagaggaaataagaagaataagcaaattatattgtgcattctttgaaaaaaaatatgttgtgaagtattaaacattttttcaatttttagtttttaatttttatgattgtatattgccgcaacatatcatgttctttgataaaaaaatcagtctgtacgaaataaagcaaggatattgacatgtcctgtattccaatatgtagcaattacctagagaaacgaaacattgtatgtcatgtgaaatcataagatgatccatatctcccggagcattatgaggaagagtgaagtttccactgagttgatgcagatgccattgtcttgcctgagagaagaaaaaccaggcgcacatgatgtaagttctagagcagcttcttgtgtcgtcaagagtcaagacgtacctataggatatatataaacggaaaaaagaagggtatagtgtttcctgcacttgcagttttcacatcatgatgctgatgatgctgcgtgatgatgggatcgatcgaattcgagcgtcgatgccgcataaccaaacaaagttgatatacgaatgaaaagaaaaatcaatgcaagtgccgtggaggagaaaataaatcaaaccatggatttaacaccggaggaacgtcgattacacactagcatgggataggtcatctcaattgggcagaaaccctcatctgtgtcgggaagggctcctgtcacgaaccaaaggtcacagatgtgagaattcatctatgttgggcatttggccgtcacggatgatagctatgtcaatcggacaaaaaaataaagcctgtcaccgatagttttgacccagcagatgagtcaaatcagggccaaactagggcccgccaccgatgagattatccgtgatgggctcatactttaatcacgggattggtatggcgcccatcacggatgactcactcaataaggcttgtttttaagcctgtcacggatgactcatatctatcgggcttaaatttgggtccgacacgaatgaaatcatctcaatcggtcttttatttaagcctgtcacgaatgaatattttaccaaaaaaataaaatttaattttttttgccagcctcaggcctttgctagccatgctggctgcaaagtgaaataagcatatttatatattctctttccaagcaacccattcacacatccattcacaaatcaaacacagtgattacatccacattcacatatccattcaaatatatgccattcacggcaattcacaaatcaatcataggctgtcccttcaaacttccaacttttccatcatatcaaatgtttggacacatgcatggagcattaaatatggacgaaaaaaatctattgcacagtttgcatgtaaattgcgagacgaatcttttgagcctaattacgccatgatttaacaatgtggtgctacaataaacatttgctaatgatggattaattaggcttaatagattcgtccggcagtttataggaggaatctctaatttgttttattattagtctacatttaatacttcaaatatgtgtccatatacgtcaaaatttttttgccaaaacaactaaacacggccttatatttactgatcacacatccattcagcgacatgcatcttcaagagtcaagcatcagaacacgcaaaaccgagttataaattaaacaaatttatatgtaattagtatcgcaagtacatatagaaacatcagaccggattggattacgtatatgtatatacatatatacatatacatatatataaatgtatatatgtatatatatgatatatatatatatatatgtatatatatatatatgtatatatatacatacatatatatacatatatatatatatacatgtatatatatatgtatatatttatacatgtatatatatgtacatatatatatatatacatgtacatacatatacatatatatatatatatatacatatacatatatatatatgtatatacatatacatatatatatatgtatatacatatacatatatatatgtatatacatatacatatatatatacatatacatatacatatatatatataggtaaattaactggtgctacatggtgtatgggctccaagatttaaattgagaatatacccaatttgaatgactatgaaatttttttaaatgtttagatatgaacattaacttctttactaacaagttcaaacaagtttgaactgagtttgaactttttttttgttagattttggttctaggtatataacttccaaacatataattcattaggtatgtaataataaattgtgaaataaagttgagtttgagttgttttgttgttaggtatttgtatgaatcaaattcatatacctaggtatatactcataatttgaaaatttttaaaaatttgagagaatttgtgtgttttataccttggagcccaggcaccatggagtcccatatgggtatcctatatatatatatatatatatatataggtaatcacaggtctttgataagcattgtaaaatgttcaaccatttaaagacgagcaagctatgaattcactctaaagcttccattgattcctaagatttcatctagtatgaaacatgttgtatcctctctaatgacttcgaagttgtctgtgcatccactacttgctttcagcttcactaggtccaaggtagctgacaattt

SEQ ID NO: 2074 - DNA, 17495 bp, Oryza sativa
cgctgacaagcttttagttatttcaatcgggcataatattgaggccatcactgatgacaaccatccgtgatgggcctgattgttatctttatcggaccttaattagagctcgtcaccgatggatgttatcagtgacgggcaaagtatatgggtccgattgagattacaaagataatctttgtcgggcctaaactaaagcccatcaccgataggatctcatcggcgacgggctcaaaatacatgcaccggtatatctttctacgcgtacatctttgtcggtgtttattttagcccgttagagataaggatattgtgacggtacgcaagccctaggcacgggaaaggccgttacaaataagaagtaatgtagtagtgacaacaataaatcgatcttagggcttgtttggtttggtgccaaattgtgccctaccaattcattggtaattttgaatagtacttctatatgtctggattggtgccaaattttaccaacaccagttcttaggtagtacaaaatttgtctatccaaatttggtagtgccaaaagttacctaaactttggtactatcaagattttagtagggcaccaaaccaaactggcccttagtgacctgaggcttgttccacactcttcacgttaaggttatacattagttcagaattaaggatgccaagatcaagagatgcgaggtacagagaatcggtgtgtcatgggggctggtggggccgacagaatctttcgagcgatgacctcaaacatgtttgcgttcccatctgctggatttctacaacgaacggagtttacggagagattgatacgtacgaatccgattgtaacctgagagaagatcgatacatgtacgtatacattggatgggctcatacggtacattggatcggctgagaagcggcccaatctattttaacacaggttctcaatacataacatctatggtgattacgatatgacacactagctcaatcaatggtcagatctctattagtattgtcgaaacaagatttcgacaatactaaaaggggtggctatcaagctaagaaagtggatgggtttggagacaaagaattttatataggttcaggccttcttattcaagaagtaacaccctactcctgtccggggatgattccgccgagtgtattattgattgtatgatctgggaaaaaaaatcgtcccgaaaggaacccggacacctccttatataggggaaggggtccgtattacaaaatacagtccatatccctaacggaatatgtgattacagatagaatacaattgtaaccgactaagacctcgggtatttccttgacatacaagttagaaaactaccccgagtcctcataaagatattctatctatatttggtaccatatacccaactaaattataactgtcgtgtagatatgggatatccataatctccacagtagcccccgagaccttcgcagatgacgaaatagccttctcaaaacaaaaatttataatccgagtgcttcaattcaagctgatccagcttgccgagtgctaaaatcaaagactgcgaagggcgaaaataaaacatggtgcatcgagtagatgcacctaattaagtgtagccccccgactatgtgattagttgaaaaactaaacatgtagtcaagaaccgagtggtttcatagcgaagcatgcatggtactcagtaaaatacccagccgactgcttctcaacttgaacatatcaagaataaaaaatacgaaaagggccgagtgataaacactcaaatggtccaaaaatagacatatttgataggaatccgagtaaaaaactcttaaaatgatccaccaaacatgataaaaatcatggtaatcaacgagtctaatagtctaagccatgactctcaccataaccaaattaagcatgtatcatgccaagagaatgactcttaataaattagtcatcccgaatcaacccaaacagcttttgcagcctaataaggcttacaaaaatagtataacaccttcctgtcgggcacctttttgtttgcatcgtgttaattccaaagaattatcaaaccgcattaaaaaggattttaacagcattgggccacatcattgcgagcacaaattgccaaagcaaaagcgtctaagtccctagggatcacaacgggccacgctgaaaataaaagtgggctgaagtactatgtttaggcccaagcccattagtactcccgataccctaataacaccgaagagaaataaaacgtctcttcgtcttccccgccgagactctcgccattttccccatttcctgctactgtacaaaactgcgccggcaaagctagggttcatcaatccgctccaacccatcctcaaaaactccacgaaatctctctacgcgcccacttctccgattcctcatccctttccagccatatctcggaccaaatcagaccatccagttcacattcatggcggaagagagagaaagctacgagagtcaatgggcgccctccgatgtgacggaagagaatctgaaggagatggtggcgcacggccttcttccagcgaaggagatcatcgggtggcgtccggcgtttggcgaagcattcccgacccccgatacgcacgaagtcgtggtatttgctcatttcttctatggcgggttttcccttccaacctcaagatttttccggggaattctaaatatctatggaatcagcctgcatcatctaaacccaaactccatagtccacattgccaactttattcatgcctgcgaagcttttctaggcattaggccacatttcgccttgttccgccgcatctttttcctcaagcctcagccaaacaagaacaaactatgtgttgttgggggggctaatttccaactcaggggaaccttgagccaaaaatatttctctatgcccttcaaaacctcaaacaaaggctggcacgcaaattggttttatgttcaaaatcctgagcctactcttcccgagtactcctgtcttcctccagtttatcaggacacttggaactcactgccaatgggagatgaagctgctcaggcagtggaactgatggagcggatgataaaactaaaagagcaaggtcttcaaggagaacagatcacccgacactttattaagagtcggttagctccaatcaaagaaagatctcgcacagccttcgagtttgacggcaagcatgacccaaaccgtgaagatccagattctctcgactttaaggtcatgaaagaaagcatgtataaaatcttttcaaatgccatcgttgtcagctattcgcacttgctaccagtcgtgccattcaatgctttcaatcctcctccaccggtatgtaatcaaacatttcaacctttcacaaaatatagttttgtctttttgttgaatcaattaacaatgaaggatattacacccaggaatttgctttgatgaagtcggatcccccagtcgttcaacgccgatcaccccaccaccaaaccggttgagggagcgggggtcccaagatccgttctgaagaccggccaaatacctccaatccagccggccagccagattcacgcaaaaggaagttggtgtcaagtgacgacgaaagcgatactgctagaaagcctggagaccgagaggcaaccaagaaactgccgaagcaggctactccaaggaaaaaaacatccagtcgtcctatgctgaagattaggaagtcttccaggtacaaatcatataacagtctcccttgcattgatgcgcacccagtgcggaaataatactgataaccaaacttgcaggaaaccatccgatatagatccttctggaaaagactctgacccgaccaacataggaacaaacttaaaagaaaccgagccaactgctgaggatcagccgagtgacaaccagccagtaaccgataatgtaggatctggtgatcaacccccgactggaaacgagtcggccgaagctggagccggaattaatcaggagcccctgattgaaaaccagtcggacactaggccaagccaagagattccagaagttggagctcgggcagacagcccttgtagacaagacgccagcaacgacccgatgccagggtcccccgttaaggcgcaagagtcgactcgtccccgtccggaaatcatcacaggtaaacaccttgcctaaaaccgtgttgatccaaatgactctgatcaattgtctaacctttgtcaatggatacgttaggaccaatgactggtgatgaagaagaaattccccatatacaagcagctgaagactcgcgccctcccatcctagtcaagtggtgggacgatgataggcaacctcaagaaatcgtaataaacaaacaaaaagaagatgaggaagtatgcttgctgaaaaaggcactcaacgaggctactcgcgttgtaaatgtaagtccattcatgcatagccttaattgtcccctttcatgttttgctgaaacgccagtaaattcatattacagagaatccatctcaggaatgaggcgaagaccgcaactcttgagaaattagtccctcatcttggaactcttgaagctactagaagccagctacatgaggttagagagttcgcgaggaaaactgagcatgatctgaggaatagaatctccgagcttcaagaatctaactatgaattaagtgattcatccaaaggtaaatgccatatctgtctgacgtattcgtgaagccttccttgccatatcgattaaccgaaaagcatttcagtgcaagccgccaggatttccgacctagagaagcaggtcgaggctctggagaaggacaaggccgaactagcaaagcagagggacttggccttaaaagatattgaaggtaatgataactgattccccatgttcttatagccacctggttatacgaatttattcgtgcagatcgcaaaatcaagtcccaggcacagtttcaataggcttaaaggggccagggataaagtcgctaatgccgctaccccactcatccaagccatgttcttcaataacgccggtccgagtacacttgacgcttccgagatcttcgacaagctgagagtcgctccggatacttacttcaagaatatcaaggaggctggaagtatgggagcaagcatggcattagctatgaccaaatctttataccccaaaatcgatattgacgccgttgatgggtttgcagacgggacaagcgaagaaatagccttcaacctcatcaatgatgcgcgaaaagccgctgacaagatcgctgctgacgtagttgagagattccaagatgttgaccttcggccgactgggtctgataattccgatgatgaagaaactgactctgattagtagcagtgattctgatgataatggaagatcaatttgtacaatactgatgaatttatgatgtgctagatatttcaaacttagcttctgatttcttaaaagcttttgtcaaaccttattgagcctaaaactcgcaaaagttattaaaaaactttcagtcctcattatctaagccaaaaaatcaagcagggcaatgataaatcaagtaagcaaattgaattgataaaaatcatgttccattattattatagtagccccccgactgaaaacttcaaggaaaaactagaagttagcagtcaaagaggaaagattcaaacgaaatgcctaagcataaaatcgatgaaggtgtttaatattccaagaattgttgacaagagtaccatcttcatgcttgagtcggtaagaacctggccgagtgactttagcgattatgaacggtccttcccacaagggagataacttatgccgatcctgtgtagtttgaattctcctcagaaccaggtcgccgactaaaaaggctcgcgatcgaacattccgattatgataacggcgcaacccttgtaaataccgagccgactggattagggctgcttcacgggcttcttccagtcggttgatatcatccactcgatcttcttcatagcgctcctcccggaagttacgaaatcggagggattcaaactctacctcacttggcagcattgcttccgcgccataaaccaagaagaacggcgactggccagtagcccgactgggagtggtgcgtagagaccaaagtacagacggcagctgttctacccacttgccagcataggggcgcagtcggtcgaaaactcgtgctttgatcccttgaagtaccatgccattggcgcgctcaacttgtccgttactcatggggtgtgccacagaggcataacaaattttaatgccaaagtcttcacaaaaatctttaaatactccgccggtaaattgagtgccgttatcagtaatgatacgattcggtaccccaaaccgatgtacaatattgatgaagaaatctctagctttgcctggagtgattgtgacgatcggtttggcttcaatccacttggaaaacttatccacagctacaaagagatgagtataacccccgactgcctttttgaatggaccgaccatatcaagcccccaaaccgcgaatggccaagacaacgggatggtttgcaactcctgagctggtaagtgagtttgttgggcaaagaattgacaaccctcgcatgttcgcacaattttgtcggcgtcggaaacagctgtgggccagaagaaaccctgccgataagccttgccaacaatggttcatgcagcagcgtggttaccacaaatgcctgaatgaatatcttttaacaattgtcttccctcttccaaagatacacagcgttgcaggattcctaatggactttttttgtacaattcggtctcgtggatgacatagagtctgctgcgcctggaaatctgctcggcttcatttttttctcgagggagttcttgtttggtcaaaaatcttatgaaaggttctctccagtcggcttcgatcatgcctacgccttgagtatccatggcttcaattgtttcttttctgggcacggttggtttataaagatactcaacgaacacatcagagggagctgcttcccgttttgaaccaaaattggccaatctgtctgctgcctcattattgtgtcgaaggacatgggtgagctcaagtccatcgaatttatcttccaacttgcgtacctcttgtcgataagcggtcatattatcatctagacaggaccattctttcatgacttgattaacaaccaactgagaatctccacgaacgattagttggcgaatgcctaaagagatggcaatccttaatccatggagcagcgcctcgtattccgccacgttatgggatgcaaaaaaatgtatctgcaatacgtagctcaatctttctccagtcggggaaattaagacaaccctagcttcagcgcccgtaagcctctttgacccatcaaaatgaatagtccaatattccatcttttcctttggcgtgtattcttggcactcggtccactcggcgaggaaatcagctaaagcttgtgacttgatcgaagttcatggcttgaaagatatgtccaaagacatcaattctcaggcccacttcgcaatccgtccatttgcgtcgcggttatgaagtatatccccgagtggaaacgatgtgaccaccgtgaccgagtgactttgaaaatagtgagataatttcctgacggtaattaagacaccatataataacttttgaacctgaggatatcttgtcttggagtcagccaaaacctcgctaacgaaataaattggtcgttgaacttttcgaatatggccttcctcttcacgctcgacaaccaggaccgtgctcacaacctgggaggtccccgacacatataatagtagcggctcttgcgaatgtggtgaggccaaaactggtggagtagtgagaagtttcttgaagtcttcaaaggctttttgtgcttcgggtccccactggaaattgtcagttttcttcaacaacttgaaaaaaggcatccctcgttcgccgagtcgcgaaacgaaccagctgagcgccgccatgcaaccagttagcttttggacatctttctgggagctcagcggtttcatgttgaggatggcgttgattttctccgggttggcctgtatgcctctttgagataccataaatctgagcagcttccctgacggtactccgaagatgcacttttcagggtttagcttcatcctgaaagcacgaatgcttgcaaaagtttcttctaaatccgcaatcaggtcatccttctgcttggtcttgacgactacatcatcaacataagcttcaacattgcggccgatctgagtcgaaaaacatctttgaatcatgcgttgataggttgctcctgcgttcttcaatccaaagggcatggtgatgtagcagtaggccccaaagggcgtaataaacgaggtcttcaagcagtcggattcttttagtctgatctaatgatatcccgaatagcagtccaagaaactgagtagctcgcagccggctgttgagtcaaccacctggtcaatgcgaggtaacccgaaaggatctttagggcaagacttgttgaggtcggtgtaatcgacacacatgcgccattgcccggtcttcttccgaactaggactgggttagccagccagtcgggatggaggacttctttgatgaagtctgctgctaacagctttgttaattcctctttgatcgcatccttcctatcttgtgcaaaacggcggagtcgttctttgatgggtttggcatcttccttgacatgtaaagagtgctcaatcacctctctgggaataccaggcatatcggatggtttccacgcaaaaatatctttattattctgaagaaaggtgatgagtgcgctttcctatttacaatctaactcagcgcctattacagcagttttggtaggatcggagggatctaatggaatcttcttagttttgtcgttgccttctttggtctttgacagcttggtcacaggcacttctccttcgcttgccgtggtcgcagccagtcggatctcttcgcgagcgagagtgatctcgcgggtttgggccatctcgcaactttctttgtcacatgtgatggcttgcttgatgtcgctccgtagtgatatgactcctcgaggaccaggcatcttcatcatcatgtaggtgtagtgtgggacggccatgaatttggctagagccggtcgtccgagtatagtatggtacgctgtctcgaaatcagcaactttgaaacaaatgttttctgtgcgaaaattctcccgagtgccgaaagtaaccggaagagtgatctggccgagtggtgtagctgataatcctggaataacaccgtggaagggtgaattactcggctttaattccgtgcgaggaatctgcatatcgaccagggtcttagcgaaaaggatgttgagtgcactgccaccatcgatgagagttcttcggagcttgacattgcgaaccactgggtctagtaccagggggtaccgccccgggtggaccactcggtcgggatgatccgagcggtcgaacttaattgctatctctaaccaccgaaggtattggggcgtgttaggctgaaccgcattgatctctcgttctgttagcttctgctttctcttagattcataagccaggggtccgccgaagatgtgattgagttctttgcgatgatcttgaaaaccagtcggggcatcgtcttcatcatctttcttctttgatgtgccttgatctccgtttgagggcttacgtgcgttcttgacgtattgctccgcaaactgtttgtagacgaagcaatctttggctgcgtggttggagttgggatgatgcggacattgggagttcattatcttgtcgaaggtgttgatgcgggaacgttgtcgggaagatggagaggttgttgccacaagttcttcgggcttacgcttgcgatccttatggttgttacttccactccctcctgcggtccgcgtatccttttttggcttccaagtggtgcccgactgcttggacgccgtaatagcatcttcggctttggcatactcattggctttttcaaacatctgcttgaccgtcttgggaggtttgtgtccgaacttgccgactaggtcctcgtcgcgaatgcctttagtaaaggcggcaatgatgacgtcgtcggtgatgtcggagattttgttgcgttgcttagagaagtgtcgaatgtaatcttgaagggattctctagacttctgaatgatgttatagagatcgaagtgtgtaccaggccgttcaaaagtgccttggaagttgacgatgaagtggtcgcgtagctctgcccatgatccgatcgtgccgcggggtagcccgtgaagccatgaccggtgtcacgtcccaaaacgactctaaaatacatcctctaaatgatgcctagaataattaaaatccgtgtgaaagcttccaaaaattaaaatgtgcaaagttaaaagtcaaataaggcttggaggatttttgtatatttcctaaaagcctaaaatgtgtaaataaattttagtgaaattttcagagcacaaataataattaagaagaaataaacaaagttaaaatgattttataaaaagaaaaaccctaaaatccctccttctctctaatgggccgaattcggcccatctccctccccctctctctcctctccccgcggcccattcggcctccctccccgcgcgcgcgccgctgacgggcgggcccgcccgccaccctcgctaacgggtggggcccacccatcatccccgacctcccgctgctcccgccgcctcgcccgtgccctagcgctgccgccgccgcgaatcccgccgcctcccgtcgtccccgcgtgcccgtgatcccctctccctttccccccatttttccctctctctctcgcattcaaacgggcggatttgcccccgcaaatctcaccggcgccattgatggcggccggacctcccgcgcctattccttcccctccggcccgcctctcccccttccaaccctatataaaccctccccgtgcctcctccgtccgtttccgcctcttgccaccctttctcctcgcctgattcgagctcgcgacgtcgccctctctctccgccatcgctgccgagcttcggtccgccgctgtcgccgccccggaccatctcccgccccagcgtcacctcctccagcttcgccgcaccgccagcgaccccgtccaccccctcgccgagtccgccgaccgctggaacgccgtcgaccccgtcgacccgagccgcgccgctgccttcctccgctccggccgcttttttcgtcgtcgccgtggtatgtggcatgtggttacacgtgaggaagatgtgtcttgtgggtaaagttgtacacctctgatcagagtataatctattcgaatagccgcgccctcggttatgggcaagccgagcaatgtacccaagttagtgttttaattcttaaaacttgctcaacaactaaaatgtggaatggttggcctgggttggcttgggacgagctgggacccagggtcgggttgccagttcggtctgaatcatcgtaggccttgggttaaggcaggttcgtgtgggttcacggccttgattaataatcttgcatagctctaggatcgtatttacaaaatagctttgagcaactaagtgtcttttaatgctgtttactgcaaaccctaacaccctataatatggctcccttgtactcccttgcatttattctgcactcgtgggtgtgtcttgttgagtacggtggttgtactcagtcttgttcaatttttcccaaacctagaagaggagcccctagatgatgaaggctttggtgtctagctcgtgcctgccgtcaagcgcctgtggtcgtcgccctagtcttccgctgtttcctgtttgtctttgtgtgtgctgggccttcgccgcccatgtaataaattaattaattacgcttccgcttgttaaactctgaattgtatcaacttttggtgtaccttgcctcctgggacaaggaataatgcacgcacgtaaggaacgcccgttgggttatttccggtcgtgacaaccggacagaatccgctagggccacaggtagataattcgccatggctttgctgtctcctcctgctgcgcggattgcgaggccatagacggtgagccaaaactcggggttggtggtgccgtcatatttctcgattccagtcggcttaaagccggctggccaatcaactcgacgcaggtcgcttgtgaaggcagcaactccgtccatatcgtcgtcatagcgatccggtgaatgatggcctcttgctacgcggtgctggttgatggtgtcacgaagatcgacggggcgccttcgatgtggggagtgtggtcgttcaactcgatgctccctatatcgttcgggaggcgaaagaacagatcattcatcatgtcccctgctcttgcgactagatccggcgccggcaatgctgaggcttggctggtgatagtcctgagatcgaaggtgagggactcagctaccggtcggggtgcgggtgcttgcgaagttggctggaaccaaggcagcgatcatggtcttcgtctggttcaagatgttgacaacatgatcagcctgattgagtgcgtcttccttgaggagggtgtcgaggagagtgattgctgcaactgcgttctgctggagggtgcgaaaaaccgctgttccatcgacgtcttgttgcccgatgagttctctctctcgtcacccggattccaaggcgcgctgccgtcgatcttcagcctcctttgcaactcgctcgcgatcttgttgctcacgctgtagtcgttctcgctcttgtcgctgtcgttcttcctccagtcggcgacgttcagtctcttgtcgtgtacgctcttcatccgcttctcgggctctgcattgttcctccgtttcgttgtcagccatgaatacgccgaaaaagagaggcgtgtaattatcctcatagctgtcgtcgaagttgtcgaagtcacggtactcgtagcagtagccgaagtcgtcgtagtcgaggacctcggttggttgagaactaacgccaggggagctgaggtagccgtccaactcttccgtcgagaatgtcccaagaggttggagtataacgccaacctccctggatctagattggatcggggccgaagccggggctcgtctagatcttcgagtgggagatgccttggctgtgaagacagcggccaaatcatcaggaagtctcatcaggattgagggataggacccgtcatcttgatctagtcgctgaagagtagatcggatctcgtccgagtggtttgaaaccaactcgggagagatgatcttggagtaggcctcggccgagttcggaataccgaacggcgcggggacctagtctctccccgactggttcgaatccgagtcaaggagagagatcttaccgaagtcgttggtgatgaagttgaggctgccaaaccggaacgcctgcccgggagggaaggcgaagtcgtcgatgccggagacagaacccatcgcacttagtcggcaaaaacttgatgctccccctacctgacgcgccaactgtcgaaacaagatttcggcaatactaaaaggggatggctatcaagctaggaaagtggatgggtttggagacaaagaattttatacaggttcaggccttcttattcaagaagtaacaccctactcctgtccagggatgattccccgagtgtattattgattgtatgatctgggaaaaaaaaatcgtcccgaaaggaacccggacccctccttatataggggaaggggtccgtattacaaaatacagtccatatccctaacggaatatatgattacagatagaatacaatcgtaaccaactaagaactcgggtatttccttgacatacaagttagaaaactaccccgagtcctcataaagatattctatctatatttggtaccatatatccaactaaactataactgtcatgtagatatgggatatccataatctccacaagtataggtatagatagatatattgatattacctatacaatcttttttctaatagttgtcatcgatatgatagagggggcagctaatgggcgggtgatcgctctaggcgatcaccccccatcccctataaggtgctctctcacttcctcctcccctcttctcttcctactacatcatatatttttaaaaaaataaaaaaacaaagttgtaaaaaattatgtatagaaataccatatataaaaaatatttgaattcaaattcaaatttgaaactgtatgtaaacttttgacttataaactttgggtctataaactaatatttgaatttaaattcaaatttgaatcgggtatgtaaacttttgactaacaaactttaggtctataaactttacgtgtataaactttagatgcatagaaatactatatataaaaaatatttaaattcaaattcaaatttgaatcggatataattcaaattcaaatttgaatcggatataattcaatgacttataaaccttggctctataaactttaggtgtataatttttagatgtatagaaatactatatatataaaatatttgaattcaaatttaaatttgaattggatatataaacttttgacttataaactttgggtctctaaactttagatgtgtaaacttgaggtgtataaactttagatgtataaatttactaaaataggaaagtaatgcggtgccaaaaaaggaaactatgtgaagagaggggggaccgcgctggggcgatcgctaggggcgatcaatcgccccttagcctttccgtatgatagatagatagataaatacagatagatagatagatcgatagatattacctgtacaatctttttttctaacaactaggaggatagcccgctcattcgcgcaggcatgcgtattagtttgttttgaaaatagttctaacaaaataaactgaaattagagtaaggtgttttctatttttaattgggtgttcattgtatctctttttttcaataaatctcgataaacttttattggcaataatttttttaccaccccgtcaaccctctttttaattgattcgtatatatgtaattcgttatgcttgtgtatctataaacataagttctttaaaaaatatttgttatattttgaatttagtgattgagtgattctaatttcgattttgtattcaaaacaaattattgttttattctaaattgtccttttaaggatttaaaaatgtacatgatctcgtatcgtgttgtacttggactcatcttttaatacttattttattattccaatttctggtatttataacttatacctttatatggacagttgatattttatattctacatggaatctatttatatatttttttatagttttagttttttttgtttttgaatatgtattttaaatcaaattgcttgttttattttttttctgaatttaaatacgaatacctcataattgatctgaatgtcaacatcggcctcgcggagtatcttatcgacctcctcattagtgggcctctcctgatgcattgcacgtgacatggcaaggctcggcgatagagatgaagctgttttctagtccttgttgaagacacggaacgtctccctctgcccctcctctcagtcctttgtccttcacctcattacctaacgtgctattaggctctagaagtcatggaaagtcgatgttggcgcttccatcagtgtccacctcgctaaggttgtgttgttccccctcctttcctaacttagctccttagttttctatgcgcatgctttccaaactactaaacggtgctttttctaaatgttgctttaaagcagcatattaatccattttataaaaaaaataactaatacttaatattctaatgtaatgcatgctttccaaactactaaacggtgctttttctaaaagttgctttaaagcagcatattaatccattttataaaaaattctaatgtaatgagtcgcttcattttacgtgcgtgggagattagatcctacacccatctaatgaacacaacctaataatatcttgcagctccgcctccgttgggtttaggccgagtatgcatcatggttccaagatccttgcctccttggtggtgattaaatatggactttatactcacccatttgaattcattaatcctttcacagtgcaaattttgcttaaatatttgtagtcagaacggctacattatctaaattttatatagtaaataaaggtaatatggatcttgaattatgatttaataataataaaagttcctttgtaacacaagattgaaaaaaaagaatagaaaaggttcaaatatgataggaatacatgtgtaaaatgagtattgaaaagaacggatgtttcaatgtattgcagaaaaacacaggaaatgaaaatttgcaaataaattgagaaaagtgcatgtaacttgagagtcatggtcatttaactctatgattattattattattattattattatttatatattatgtgttagctcgaaaataagaaaagttggctcgaaaatgggagaggagagtgggatccccgaggatagttggagggttgagggatacgtaagtacgtgtgtgcccacatatggtggggttgggtgtactggaatttattttgagatatctaacagttaaaattagtggggtcgacctatttaaaaagatatgaatggttggattttttttcctttttatcaaaatttttaggattttttcgtcccaacctggactaaagatcgtaactttagtcccggttggtattaccaactggggctaaagatcctggtgatctttagccccggttggtgctaccaaccgggactaaagtcccacccctatatatatgtcttcttcctcctccaactgcccgagcaagcttcaaaatttcttcaaaaaagaggggaggtcatgccaaaatttctattgaatttattttggtgattacatacaaatcggaggtgcctaaagggtttgcaacttcatcctccaatgtttttttttgtcatactacatttgcacctatgttttgcacactttttttgtctccaaaatttagttgtaagttgatcagagagaaaatgtgtgtggggaagaaaaaatatatagaaatttagttcatttgctaaacaaggttttataaaatagttgagaaggaaaactctagtgaaagttaatcttaaataatagaaaacaaactaaaatgaaaattaaaagaagtaaaatacagtaaaattagtttaaaactttacaaatagtttttaagaattatttggtgtaatattttatgatttttgtatgaataaagatatcttataattattgtatgactgtcattattgtaagaataattatttgtgtacggttttttttgactcatgtagatggatcggcaatggatgtacgctgaccggcggtccaaagagtttattgacggcgtgcactattttttgagagt

SEQ ID NO: 2075 - DNA, 1070 bp, Oryza sativa
aggcgcgcgccaagcacacgcgcggcgcacatgcgcggcagggaggcggctcgggcttggcgcggcttgggccgattggccggcccaagagaatagaagggtaggcggcctgggaaaaagaggaagaagaagggagtggcccgggagggaaagaggggcccaagagaaagagagggaaggaaaaagagagggaggaggaaagaacttcggccacgggccgagggagagagagaggactttgggccagacttggcccaaaggaggaagaggacattttttagatttttttctttttaataaactttgttaattgttgttgttgtttaataattatttccggcgctctgaaaattcaagtaaaatttgagggctccttttagaccaaggagaatttaacaaaaattctccgggccacatttgaatttttcttgcacgtattttagtgtttgccaatttctttccgaattttaattaattctattattccttttagaaaatgaattttatttcgggatgaatttatcaggacgtgacattgggcgtctacgtcttcaccgaccggcttgccttcgccgctgccgactggtgtttccgcctgcatggctggcctttatgccgccgttgttgggcgtctacgtcttcaccgaccggccgcctcgtccgccgccgactggtgttttcgcctgcacggctggcctttatgccgccgttgttgggcgtttacgtcttcaccgaccggccgcctcgtccgccgccgactggtgcttccgcctgcacggctggcctattatgccgccgttgttgggcgtctacgtcgtcaccgaccggccgcctcgtccgccgccgactggtgcttccgcctgtacggctggcctattatgccgccgttgttgggcgtctacgtcgtcaccgaccggcttgccttcgccgctgccgactggtgtttccgcctgcatggctggcctttatgccgccgttgttgggcgtctacgtcttcaccgaccggccgcctcgtccgccgccgactggtgttttcgcctgcacggctggcctttatgccgccgttgttg

SEQ ID NO: 2076 - DNA, 1009 bp, Oryza sativa
gatctttactcccggtagttctcaacaaccgggaccaaagatatctttagtcccggttgttgtcatcaaccgggagtaaagaccttttcccgctatttccaaattctttttaaacccagttagggttaagaaccgggactaaagattatagcactgcatattattttcgcttacatatgtgtttctaaaatagaagttaatgcattaacattatttaaagtacaaagattaatgaaaattactttgaaaaattatttttgtctgtaataaattaagtggataaatcataataagcaaatatatgacttaaaattaataaaaattccaataatcatatatacttagcatatgaatgatattattaaattggtaaaaactctaattaagataggtaatgtacatactgcatgatttagaattaataaaaattgtaatcatcatatatacttagcgtaggaattatattaaattaaatgttaaaaactctaattaacatatgtaaatgccacatgcatgatttaaaccttttaaaaattcaaatagtcatatataagtagcatatgaaagatagtaaattaaattgtgaaaaactctaattaacatctgtaaatgccacatgaatgatttaatacttttaaaaattctctagtcatttataattagcatatgaatgatagtaaattatgccatacatcaatagatttatatggataatcaatacatccaaaatagtttacattgtgtacacaataattacggcattacatcggcggtgacggttgaccgcatgtactttctcctcactattgttccctccttgtgatcgctgcgtgagtaaggggtgtcttcatttgataggaggatgctagggtcaatcgtcaccgtgaaagggggttgcccatccaactgattgtaatcctcgtcagtcttgtcctcaactccgacgatttttcttttgcctgggagaaccacttgacgattaggctcgtcaggccctctgcccttcttt

SEQ ID NO: 2077 - DNA, 8712 bp, Oryza sativa
tttttttttctcaaaaattttaagatttttctataatttataagatgtgaaatgtgtagatatagaggtgttgtaatggacatctaatacatgatgatatgatataggttatcaatttttatataacgttacattgctgtttagttgtcacataaaggatatggatttaggcctaataatatatttatcagatatcaagaaaggcctacatggatcaaagtaaaaactgaatatattaaaaatatatataatcatttagactatgtgacgatcggtcaccaactatgcatgtaatagaggaactcacatcctacagttatatctcaaacggcctatttttttaacccattagatacaagatcattgcagatgacacatcaaatgcctatttctatatcgaaaaacatagtgaatataggacttagctcgttgattaatttaattaaaaatacaattgttcaagcgtatcataaaatcaatgtacagatcatccataaaaatcgttgcacagccagctcattgctccatgcaagaaaatatataaccatttacaataatacattatggagtgtatctcgtaataactaccttaattagaaaaaagaaaaaaaaagagaaaatgaggggaggataggcgcagtggtgtagcccggaattttttcttgggtagtcctacttcataagttgacatcacacatgaaaatttttcaaacaccgcaaacaccatatataagtacaaatttggtcaaaagacgatgcaaatatagcaataatatcttatgacatcaataatcgactaatttaacaaacaagtccaaaatgtgcacaagcaagttcagaaagtgcaaatattacattatgccaataccaatccccattcctcttcatatttcacccaataaaacaataccaatctaacagaagcgatttattcacattcaatcattcacaaatcacaaatccgcatcctaagctatgagctaattaactagccatcaatatgatcaatgaggcaaactaatcaataatcaataatcacaaattgcatatttacatgttcactaatcacacattgacaatataacattatgatagcactctagtaacaatcacatattgcattacgaagctatgagcaagaggattagaactgtaaagcctagaagtagaggaacctcatcagcaaaagaaggttagaaggcggcaatgcgacgccggcacggacgcacggcagggaaacagagccaacgagccagccaaccacgggtcttggtatctccatctcgggctctcagctggcatctccggttcccgcgccgacggccggtggcggcatcatgacagcgagcgggagcggatttgtgcagcgtgagccatgggctatgacagcaggtggcggcgaccagcgatccaacgatgagaggtggagcggtggacagccagacaagcagagaggagccgcccgacgatctggcattgctggctctatggctcgccgttgaccaccgaggcgatgaaggaacggcgtcccacgttcgctcggcacggtgcggactcacgggtgccaggcgttggcggtgcacaggtgaatgccgaagggagttgcggctcctccccaatccctcaaccctagcgcctgctgcctactcacgccggagttttgggcttttcttgttgggcctgattttttaggggggtttggtctctgggccaaaattgggggtagtcccgagcccactgggactaccccctagctacgcctctggataggcgtacgtacagatgttgggaagtgcacgtgtggggcccaggagagaaaggtgaggagggattttattttgatatgatggttaaaatcactaggtccaccgttttaaattaaaatctatggtcatatatttttggtttttcttataatttctataatttattggagtgccacttggcggcttaagagcatttgtaggaagtttaatagacttttagtatataatagatagatagataatagataagttcactttaggtctctcatctttgatgttgagtttgaattacgtgctcaaaccatagtaccagatataacgcatgtctcaacttgcaaaaccagtgtacccaagattcaagatagtatagtgtccaatttagctgatgtggcaagtgagaccaatgtaagccccatatatcagggctatttcttcttcctccaacctcctctctccatcaccgactctactcacgctcctcctcatctgtgccgcagcagctgcaaccatggccttgccggagtaagggagtcttcctccatctccccacctcgggccaccccgtcaccacctagcagcttcctagctctggcaccgacggcctcatcccatccctagcacggttatagttggattagattaatcttaccgcatacaacggccccacctctcccgtaggtctgtacatatgaagtacatacttacgtacgaagccgctcacccgatcaagttcgtttttctctcctttcccttttatagtttctaacgataattgagataacattcattattagaaataaaaaattataactttgtgtagactgcatcatcctatacgtccataatgtttgaagaaagtttcactggtggagaaaccctttgtagtcccggtttgtaacccccctttagtcccggtttccaaaccgggagtaccaatccgggactaaagattgctatctttagtctcgggtgaaataaccgggactaaagacacccgggactaaagatcgagctgacctttttttttgcatggccctgtagctgcatggtttatatatatatatatatataaaccatgcatatatatgtttcaatacatatatatgcatacatatatatattatacatatatatatatattatattatattatattatatgtatatatggttcagtacatatgtacatgcataatatatatgtatttatacatatatatgttatgcaaatgcatatgtgtgtgtgtctatatatatatatatatatatatatatatatatatatatatatatatatatatatatatatatatatgaccaaaatatatttacgttatagaaaatgtgtacacatgcatatagaaacatatgtagtcatgtattaattacaatccattatatgtcctagctagctacgatttcgacgtagtagtactcgctgctagctcagaagctaaggaccggtgaattgtgtttccgtcgtagtagaattcacccttgggatcaaggatttcttcgttgatgaatcccatgagttgttcttgaaccgccgcgataaattccttgtgtgtggtcaggttatccctcatgcgaataaactatatgaatgtatgaaattgattagtaattaaacaagaaatcgttacgtaatgaaattttgaatttatttgtacgtacatcaagctctcttgtggtgatgatttggtctgcaaggcagtggcaatactcgcacacgtagtagccgcacaagttagttccctgcttttgctttgcgtactacaaataaatgacaaattaacggcgtgagatctaattaatatacacttgtatgtattaatttgaatcggagaaatataaatgtagagcatgtgtactcacaggaaatttgaacctccgcctaagtctttctctccagttgccgcggaccaaatgacggaaccgataccaagccctacatggagtttaaagatatgattcgtagtagaaataattaacataacaagaatttcttaattaacagaggaacttataccagtacctgtctataagttcgaaaaccttgtcaaacgtagactctattttatccattgagtcatatacattgacggtgcaggccgacaggtcaaagagtaaaagcacccagtggaatctgcaatgtgcgtgggatgcattacatatgaaacacttagcaagttcgtacgggaatgaaatttggtatgtgggaagacagtaaaattaaactaactctgtgttgtacggcaacagtatgaacatcttgtaatgctgcgccttcaggagatggacgagattgtcctctgtttcttgtggatattggtcgagcattgcgacgtttactctccgagggtcgatgaatccagtatcgaaaaccctccgccttcgggccctttgaatctctattctataacgataaaagggagtattttattttatatagtttacttatatagaagaacctaattaattaaaggagacgtagtaattaagaaatataactgaacgatatacttacaaaatccagcaactcataatagagacgtcgagggcgtccagctggtatacttcgtagattcccttgaaattgatccagagaatatcatctccttgcaagaagtccgggtgcctgatcctcgctccgatcatctctctaccggtggcgctcatctctatgtacagctgatggaacttgtacatttgtgtgggtaaggactgcaccagctcgggcttgacaagcggtttactgagttcgtacatgtatttcaattccgcctttactattggttcaactcctagcaattgatctgtagttagaccggtgtcaataataaattcttctatcgtcatgtcttccccggtcaccaatggctcgatctcctagtttggtttctctccaagctgagggactggtttggactttctagaagattctttcttcagcgttcgctcatagtccgatagcttgatggcctccttgacaggtgcagacatacccctgaagaagttcctgacactggggtctataggaatcttcttttctagacttcgaggtttgaattgtctcttgacttctgatgcaacgtaagtgtcaagctcctcttgcgtgcaatcgtaccccgggtccttgttcttggcggcgtcaactttcgccttcttcgttgcccttgtgtgggcaggcggtggagctgggggggcccttgactttgaaggtgccggaagaggagcttgcggaggagtaggtgtaggagcccgaggaggagtcggtgcaggatcctgaggaggagtcggtgctggagcctgaggtggagacggtgctggcggagcatgaggaggatacggtgcaggatcctgaggaggagatggcggagccggaggagatggtgcacgagacgtcgcttgtcgcccagggaggatgatgtaccgcctgcgccatagaataatggcatggcttgtgtctcgtagatgcgtctcactatctcctccagggtaatccagctcgaggtcctcgtatgcgccttcgaccaactcaacttcgaccttcgagtatcctgctggaatcggcctgcagtggtaagtacctgaagggtccgttgggatggccatgcccgacaccaccttcatgttgtgagagattatttattagtaatcaacatatataagcagcaactagcggaatggctaaatctaaaatatataaactacgagcttacctttattgataagttcttgtaaggaatatgcagctcacatggtgtttgctgagtgatgtcatcaacgggacaggtcgattcgtcctgtgtttgcatggcgtccatgctctgtgtcctacctaccccgttgtggcgcagttgctacggtttcctgacgggctcaccattgcaggaggaatggtcggctggggatcatgggaccgatgtgcggccatgtgttcatcaaccttccttgccacctcctcttgcattctgagttcgtggctcgatacccggaactctagatctgcaatcttcgtctcggtatctctcttgctcctcatccgactcctgtacgtgtggatgtcctccttgaaaccaatcttccaaggaatcacccctttccctcgtgttcgtcctggatgctctggagtctgcagggcgagtgtcagctcgtccctatctttgtccggtcggaacgtgccctgagaggaggcttccactgcatctgttagtcgtcgcgcagcctctcgtatctgatcgccgaagaccagtgagccatcagctgggttgagcgttccaccgtgagcatagtaccagaacttcgatcgttccgaccaattggtggttgccggttcgatacccctctcaatcaagctagcctccatctcctcccactttggcatcgcgacgctatagcctcctgaccccaagtggtgatggtacttcttcttggcggcattttctttgtttatttccatcatcgcttgcccttgttcacctgtcttatatgcaatgaactcgtcccagtgatcccttagctttgggaatgtgtcaaagttcggtgtctgcccctttaggatatacttctggtacagatctcccttgaagctctgaaactgttctgccattttcttcagagtccaccttttcactttgtcctctgtacccgtaggaagggtgaatgtctcgagcattgtggtccacagcatctctttctctgaatctgggacaaagctctcatgatctccgcgtgcccttgttcttcgccagtacaccgtactgacaggcacgttatcccgcacaacccaaccgctgtgacatacatagttcttggcggcttcggccggggcactaggatgtccatcttcttccacttccgttatgatgtgccgacccttaagcttcttcgctgcaccttgttgcccgcgtgccctcttctgtccaacggagggttgactaccactagcctcctcctcctggttcccctccacatccctttccacgtgcccctgctggttcccctccgcatccctctccatgttcccttcctcgttcaagtactggtttagatcctcgttcccctctttttcattccagtactggctgattccctccgcgattgtatcgtacaatatctgttccacatcgcggtcagccatctgttgatacaagaaacatttgctaagtcacgagacatttatgttttaacaatctaagtcatgtatgctaagtgtaaatgtcgtacattagaaccctacacaaccttacgtgctaagtctaattacaaatcgtgatataagctaagtctaggtgacgtatattatacaaccctagctagtaaataattatatactaagtctaattacaaataaaataatcttatattaaaactcaaataatattacatgctaagactaaaatagtcatgtatatgctaagtgtttcgtgcgtatatgctaagtctaattaagactacaatagtcaattgctaggagtcgcaccaattccgtagtcaataattacatactaagtctaattacaaataaagtaatcttatattaaaactcaaataatattacatgctaagactgaaagagtcatgtatgctaagtgtaactgtcgtatatgctaagtctaattaagactaaaattgtcaattgctaggagtcgcaccaattctgtagtcaataattatatagtaagtctaattacaaataaaataattttatattaaaactcaaataatattacatgctaagactaaaatagtcatgtatgctaagtgtttcgtgcgtatatgctaagtctaattaagactacaatagtcaattgctaggagttgcaccaatttcatagtcaataattacatactaagtctaatttgcaataaaataatcttatattaaaactcaaataatattagaacactacacaaccttatatgctaagtctaattacaagtctaatattcttaattgcattacaaatataacaatcatttatattattacgtcacttgcctgcacgaattccttctagggctagctcttccactccggcttgagggacgactccgacaacacgtcttttctgcaagatacaaaaaatatgtattaggataaatgcgaagtaacatatatatactgcatttcacgttcacgttcgttcgctctttcacgttccttagctcgttcacatttgttcgctcgttctcattcacgttcgttctcgttcacgttcgttgtcgttctcgttcacgttaattcgttcgatcgttctcgttctcgctctcgttcgttcgatcgttgtcgttcttgttcacgttctcgcggcaacgtacgttgacgtgttcgttctcgctcttgttcgttcgatcgttctcgttcacgttctcgcggcaacgtacgttgacgtgttcgttctcgttcacgtgttcgttaacggcggtgtggcggcatcgggccagcgcttggcgcggcggtgtggcggcggcggcgtggcgcggcggcgaatgcggcggcgtggcgtggcgtaggcggcgttgcgcgcgtggcggcgaaggcggcggcgtggcgcggtgtcggcgtggcgcggcgtctcgtggcgggcggcgcgacggagagagagatcgagatcagagatcgatgaagggagaggcggcggtggctctcaccccaaaaatgcggcggcggaggaggaggcggaggcggcggcgaggacgactgtcgaaacatgaattcggcaataataaaacggggtagcgcacgagacctaaaagtggatggatgtggagacaaaggatttagacaggttcaggccctctcaatgagaggtaataccctactcctgtttggggatttgaatccgccgagtatgtattgatctgacgatcaggttgtctcatatatatgccccctagagggcctcctgcccaccttatataggatggggggcaggatt

SEQ ID NO: 2078 - DNA, 2346 bp, Oryza sativa
gtaataacaaagaaaacgtaacacccaagtcatgatctgttacatattacatagatataagtaatcccctataactagtcggataaccatccggtgtgggtatggggtacccataatctccacagtagcccctgagaccttacagtcgaaaagataatcttctctcgaactagattactccaaagctgagtgcttcaatcatcttcgccatggtctccgaagtacttttaccaaatatgaagactgtggagggctgaaaaataaagtcaggtgcaccggctagatgcacctaataggtgtagcccccgacaatgtggttaattgaacaaaccaagcatatagtcaaggaataaataatccaaccaaccgagtggttttgataatcgtaatcaaccaagtgacttgatatcaatatatagcatatgcggtgtgaatcctccaaataacatgatccgagtgatataccaactgctttgtaaaatatgatgagtgatatagcaaaatagttataaagaagcttgtatattgtgaataaagaaatttccaaagtattgggcatacgccatgcgcacactgctttaacaaatgtgcttaagtccctagaagacacatggtttcaccacacctggaaatatatggcatatgtggtgtaaaatccgagtaaataaactcataaatgatttaccaaccgcctagaaaatgaccacaatatataatcagcctaagccataatattggtcaataaaaatgcacacttacgtggcgaaaagcaataatattgtatccaatcaattgcttaaaaacccaaacagcaccttgacttatatataaaaaagtcagcgggacagctatataaagctttactgtttgacaccttttaagatgcattgtaccaactcctaaaaagttaagtaactgcggtataaaaggattttaaggtattgggcacttgatcacgcgcactttggcctaagcaaaaagtgcctaagtccctaaaagaacgtgacaggccacacctgaaaatatgggttgcagacatattaggcctaggccaaaaaatatgccttcgacaccctttaaaggatgacgcatgtaacatgctcccgagtaataaatcttccaggtattatagaccaaatgtagctcatatgaatagcttctgatctgagtggttacgtaacaattgaatcccgactggcgcaagtattcagttgataacccttacggggaataataaatagtccagtctttgagcatagaaaatagacccatgatcacgaattcatattgcatatatccagagcaagtctaaattggagatataatcctcacgcttgagttgatgagcaaaccgacgatgaagacgtagacgcgcatcaacggtgatggcgaaatccaccgatcatgaagatgaagaaaataatcggcgacgacaaacgcaaccgacatgatgaagatgacgatgtcggtgatccagccaatagcagtgtagcaaccaatgataatgacaaaggcgctcatcagcatttgcatagtaggtcaaccgtgaaggtgaaatatttggaggagagttgatgctgttgttcaactcgtccaaaccgaaatatttgaagttgttgaagtagaatgtctgctccgaagcaaagatgaagataatgactcctggagctgactcattggctgattaattgatttcttcagcttttgagccttgtatttgtgtagcccccgactctttggttagttgggaaacaactgaacatagagtcgagaattatagcttcttgtcgtcgagtagtcattgcttgattgaagatatgtgttgaagatgtccaagtagaaatccatgatgacaaagttgcatcgccgtgatgaagtgaacacgagtcggcggcaacagaagcaaactggtagtgaagacgcgcagttgtgaagatgaaagcaccagtcggcggcggcataaccagtcggcgacggaagacgatgatgtccatcagtagtggtagcggtataaaccagacgtagaggcgagggcactagtcaacagcagacgagatgaccggcggtgaagaagataaggccaaccaacactggtagaatcatgcagccatggaagtgaagaaaccagtcggcagcagacgtaggcaacttgtgttgacgatgctgacgcctattagcggtgacggcgatgtagcagccgtgaagaagatagcatcagttggcgtcataacaggccagccgtgcaggcggtgacaccagtcggcggcggatgaggcggccggtcggtgaagacgtagacgcccaacaacagtggcataataggccagccgtgcaggcggaaacacc

SEQ ID NO: 2079 - DNA, 840 bp, Oryza sativa
gaaagccaaccggttggttaagacgtagacgcccaccacggcggcataaagaccagccgtgcaggcggaaaacaccagtcggcggcggcgaaggcaagccggtcggtgaagacatagacgcctaacaacggcggcataaaggccagccgtgcaggcggtgacaccagtcggcggcggcgaaggcaagccggtcggtgaagacgtagacgcctaacaacggcggcataaaggccagccgtgcaggcggtgacaccagtcggcggcggacgagacggccggtcggtgaagacgtagacgcccaacaacggtggcataataggccagccgtgcaggcggagacaccagtcggcggcggcgaaggcaagccggttggtgaagacgtagacgcctaacaacggcggcataaaggccagccgtgcaggcggaaacaccagtcggcggcggcgaaggcaagccggtgaagacgtagacgcccaacaacggcggcataaaggccagccgtgcaggcggaagcaccagtcggcgacggacgaaggcaagccggtcggtgaagacgtagacgcccaacaacggcggcataataggccagccgtgcaggcgaaaacaccagtcggcggctgcgaaggcaagccggtggtgatgttctgactgatccattcctggagcgtaagagataagcttaaagccatgaatcccttttgtgcatatctggatctggatcctgcagaacaaacatataggatgagtagtatctgatataaatacaatactcgagaaaaaatcaagtattttaaaatatttataaatatatatttctcctcttgtcaattttgatttccc

SEQ ID NO: 2080 - DNA, 718 bp, Oryza sativa
tcagctggcctacgccgccgccgactgatgtttccgcctgcacggctggcctattatgccgccgctgttgggcgtctatgacttcaccgccggcctacctccgtcgccgccgattggtgcctccgcctaaacggctggcctattatgccgccgctgttgggcgtctacgacttcaccgccggcctgcctccgtcgccgccgagtggtgcctccgcctacacggctggcctattatgccgccgctgttgggcgtctacgacttcaccgccggcctgcctccgtcgccgccgagtggtgcctccgcctacacggccggcctattatgccgccgctgttgggcgtctacgacttcaccggccgcctgccttcgtcgccggcgagtggggccctccgttacacggctgggctattaatgcggccgtggtggaaggctacaatcttaacggtggcttaacttcggtggcggcgactggtggtttcggttacaccggtgaactattatggcggccttagtgggcatttttggtttcaacggcgaacggcttcgtcggcggcgactggtggcttcaatggtatagatggaccaatttggtcccacaatggccacttctggcattaccaagggggatattacaaagcttaggcatcaattattttaatctttatatgagaattttccctttcctctgcctcactacactaattgggctttcattga

SEQ ID NO: 2081 - DNA, 2446 bp, Oryza sativa
ataaattggacaagatgttagaggaccacagaacttcgttgtacccaggttgcgagcacgggtacaaaaagttggataccactctggagttcttgcaatggaaggcaaaaaatggggttagtgacaaggcatttggcgatttattgacactagtcaagaacattcttccggggggaaaaaaattgcacgagacaacgtacgaggctaagaagatagtctgcccgttaggactggaagttcataagattcacgcatgtccgaacgattgtatcttatatcgcggtgaggagtatgagaacctagaagcatgccctgtttgcaaagcactaggatacaagattagacgagacgatccaggagaagttgacgggcagctaacaaagaagagaattcctgctaaggtgatgtggtatttccctataataccacggctaaggcgtttgtttaggaacaaggggaatgctagaatgttgcgatggcacgctgaagagcgtcaacaggacgggatgctgagacaccctgctgatggttcgcagtggcgaaacatcgacagaaaatttaaagaatttggaaaggacgcacgaaacatacggtttggtttgagtacggatgacatgaatccttttggagagatgagcagcggccatagcacttggcccgttacgatgtgtatctacaacctcccccctggctatgcatgaagaggaagtacataatgatgccaattattattcaaggccccaagcaacctggtaacgacatcgatgtgtacctaagaccactggtcgaagatcttaaacagttgtggaagaaggaaggtgtccccgtgtgggacgaggacaaacaggaggagtttaacctacgagcgctgctgttcgtaaccatcaacgattggcctgcacttagcaacctatccggacagtccaacaaggggtacaaggcttgcactcactgtatggatgaaacagaaagtacgtatcttaagcactgtaggaaggttgtatacatgggtcatcgtcgattccttgcagcaaaccaccccgtacggaagaaaggcaagcacttcgaacataaggccgaccactgtacgaagcctaaacatcgcagcgagaaaacagtgtttactatggttaaagatcttaaagtagtgttcagaaaggggcctggaagccagcctatagagagcgaagatggtcacgcggcgatgtggaaaaagaaccctatattttgggagttaccatattgggaattcttggacgtacgccacgcaatcgacgtgatgcacctcactaagaacctttgcataaaccttcttggcttcctaggtgtatacggaaagtcgaaagatacactggaagcacgtaatgatctgaagcatatggaacaacgcggcgaccttcacccggaaccaaaggagaaaggaagccattacttgagtccagcaagctacactcttagcaaggcagagaaggaaagtatgtttgaatgcttggagagcataaaggtaccgtctggatacttcacgaatatcaagcgaattataagcacgaaagagaagaagttcacaaacctaaagtctcatgattgtcacgtgttgatgacacaactgctaccagttgtaataagggctatcctttcagacaatgtccgggcaacaataacaaagctacgtgcattcatgaacgcaatttcgcagaaagtcatcgatccggatagattagaagcccttcagaatgaaatggtgcaatgtcttgtcagctttgagttgatatttccaccttcatttttcaatataatgacgcatctgctttgtcacctagtgaaagatatcggtattctcgggcctgtgttcctacgcaacatgtttcctttcgagaggtacatgggcgttctgaagaagtatgttcgtaaccgtactcgtccagaggcaagcatcgccaaggggtatggaacataggaggtcattgaattctgcgtagaatttattgaagaccttcgcccaatcggggtacctgaatcacgccatgaagggagactacggggaaaggggactctcggaaggaaagcaataatgacggtagacaacaatttattccgtaaatcccatttcacggttttacaacaatcttcattggtggctccttacatcgaggagcacttggctctagttcacgccagaaacatcgataagtccgatgcatggattacacggcatcacattgttactttccccgcatggctgcgacaacatctcatgggtaacgagacgattaaccagcaactagccttccttgcaaggggtccatttggctcgatcgtgacattccagggatatgggaaccagaacacattctacacaagagcccaagacatgaagagcacgaaccagaacagtgctgttcgtatcgatgccatggaacacgatggtacaacttgcacatattac

SEQ ID NO: 2082 - DNA, 2683 bp, Oryza sativa
accgaccggccgcctcgtacgccgccgactggtgttttcgcctgcacggctggcctttatgccacctgttgttttttttatacgtcttgaccgaccggcttgcctgcaccgccgacgactggtgtttccgcctgcacggctggcctttataccgccgttgttgggcgtctacgtcttcaccgaccggcttgccttcgccgccgccgactggtgtttccgcctgcacggctggcctttatgccgccgttgttgggcgtctacgtcttcaccgaccggcttgccttcgccgctgccgactggtgtttccgcctgcatggctggcctttatgccgccgttgttgggcgtatacgtcttcaccgaccggctcgcctcgtccgccgccgactggtgttttcgcctgcacggctggcctttatgccgccgttgttgggcgtctacgtcttcaccgaccggcttgccttcgccgccgccgactggtgtttccgcctgcacggctggcctttatgccgccgttgttgggcgtctacgtcttcaccgaccggctcgcctcgtccgccgccgactggtgcttccgcctgcacggctggcctattatgccgccgttgttgggcgtctacgtcgtcaccgaccggccgcctcgtccgccgccgactggtgcttccgcctgtacggctggcctattatgccgccgttgttgggcgtctacgtcgtcaccgaccggccacctcgaccgccgccgactggtgtttccgcctgcacggctggcctattatgctgccgttgttgggcgtctacgtcttcaccggccggccgccgcatccgccactgactgatgtcaccgctagcacggctggcctgttataacgccaactgatgctatcttcttcacggctggctacatcgctgtcactactaataggcatcagtatcttcaacacaagctgcctacgtttgccatggctgccgactggtttcttcacttccatggctgcatgattctgccagtgttgattggcctattatgccgctgttgttgggcatctacatcttcatcgccggtcgtctcgtctgctgctgactagtgccctcacctctacgtctggtttagacagctaccactactgatggacagcatcatcttccgtcgccgactgattatgctgccgtcgattggtgcttttatcttcacaactacgcgtcttcactaccggtttgcttctgttgccgccgacttgtgttcacttcattacggcaataccactttgtcatcatggtggagcgacttcatctttattatcttcggcaccggcaaactctattgctgctacttcgcaagttttactacttcaccaaccacgacgtctttgtgaacctcgacatctcggcatgcaatgccatgatattttactacaacaagtgattctccaatattcaggatttctacttggacgccttcaacacatatcttcaatcaagcaatgactactcgacgacaagaagctatagttctcgactctatgttcagttgtttctcaactaaccaaagagtcgggggctacacaaatataaggctcaaaatcaattaatcagccaatgagtcaactccaggagtcattatcttcatctttgcttcggagcagatgttctacttcagcaacttcaattatttcaccgacaattttggcttctcagcgctgccataatctactccaaaattctcaagtatcaagttcaagatttaatctacatgttcgggagtttggagttatcaaccaatcagctcggtttagacgagttggacaacaacatctactttcctccaagtgaagcatctacaacagctgtaacactaagttctacagtcatcttcgtaaatcaagaagcattgcatcagttttctttatgcacacgctcacatcaaggaaacttctcaagcttcgatagcctactctgctgccgttgatgggcaacttcgtcatcatagccggctatctctgttgccgctaatcatcattaccgtcggatgcgtttgccattgccgactattttcttcatcttcataattggtggatttcgccatcaccgttgatgcgcgtctacgtcttcatcatcggtttgcttttgtcaccaccgactgctctgtcgttgttgttgggggccttcattttcattgatggctgacctgactgctgccgactggtttcatcgcctccacggctgtgcaacttcatcacttttgattagtatcactatcttcactaccactaatatttttgtcacctctagtgggcaatattatctctatattggtcgtcttgtctctatgccaactgcgtcagctactatcaatggacaattgtgactacgacagaaggacaagctatatgctcaggggcttactagttcaaacacaagtatcataccttcaatttggacttgttccggatacatgcaacatgaattcatgatcatgggtctattttctatgctcaaagactggactatttattattcctcgtaagggttatcaaccgaatacttgcgccagtcgggatttaatttttatatttattttggagtatatcataagggataatcactgagatcagaagctattcatatgagctacacttggtatatatcacccagaagatctattactagggagcatgtcacatgcgt

SEQ ID NO: 2083 - DNA, 735 bp, Oryza sativa
gaatatgatcgttccatgtaggcggcggaaaggaccatatggaatgattattttcacatgcaactgattaagccgacatcttgcacaaagattatctttccatgcgaccacatgcgggtaccacatcaccatggaggaatatttttctacgcacgctcggatgaatctaggtcaacaacctcagtaccaaaggacatgtttctctctttgtaccgacttgtttcacatgttgggcaaccgtccaagtctgcaaattccttatggtacaatacatagtgatttagacaagcgtgaatcttttggacacctagagataatggaaatatgagtttcttcagttgatacgtgttggatgacaaaaagttaggcttaggaagcaaaactctcaagagactcatcaaatcattaaaactactatcggaccatccatgctttgccttccaagtaagtagtttaagcaccgaacgcaacactgtgatgtccttaccacatccattggattcatcgtaaagaagatcttttgatgacttctttaatgactcccaattctctaaacctcgtgctctacgtagtagtagctctggttcaatgtgccatagcatgtcctccagatcgaaaacggcctcaaaatcatcattaccggtggaaccatctacatccatcctttctcaggagacatatatatccatgattgcaaaattatgtctcatccatctggaaattgaactcttcacc

SEQ ID NO: 2084 - DNA, 697 bp, Oryza sativa
cgaaggtgaagatggacacgtggattccggcatgggatcacgagttcaggtttccgttgagcgtgccggagctggccctgctccgggtggaggtgcacgagtccgacaaccaccagaaggacgacttcggcgggcagacctgcctgccggtgtgggagctccggcgaggcatccgctccgtcaggctctgcgaccaccgcggcgagcccctccgctccgtcaagctcctcatgcgcttcgacttcacctgactactccatcttcttcttcatcatcgtcatcgtcttagtagtagtagttccatgtatgatatcatgagggatgaagcattgatcgtactttctccgtcccgaaatatagcaatgtaggattagatggaaacatcttaatactacgaatctggatatgtcctatctggttctggtttgctatgttttaggacgaatatagtacataaaattttagaagttttgttttaaaaaaaaataaattttgtgcgaaacggaaggtgtgattgtacattttgtacgtacattgtttggtgttgataataaacggttaataaaagagggaaggattcttttaatttcaaggtgttgccattgattacatgttggtgttgagccacaaatcattgttaggaatcactcacaaaggccaactaggtaggtgtttaattattttcatgtttatgtac

SEQ ID NO: 2085 - DNA, 559 bp, Oryza sativa
actgccctcgaggtgctcgaccttggtactcagcgacggcagggaggcgcccagatcttctaccctcttctccaccgccggaatacgagattccaccgacttcttcagatccaggtactccgccctggttcggacctccgcttcctctctcttcctttcattctctgcaatagttttgaacaagagatcgaacttggcgtctaaatccattggtgtgtgactctggatcctaacccgcgctagcgctccgaattcagccaaccagattgagggagccgaagcttttgtggatcacacgccaccaaggtagcaggatcccacctctctcccggaaattttacggctaaaccaagaggattttgcagcgcgaatggctctgataccagattgttagggactctcaagaacaactcagatatatgcgaaattgtggcaactatgtggtatttcctctcagatccgacaggatcgagccgccgccgcctacgcctccagttgccaattcatcgttcatacaagtgttcatcgtttgatttaatacatccctctccctcacgtg

SEQ ID NO: 2086 - DNA, 5343 bp, Oryza sativa
tggagctcagcaatggtggtggtgcaaggagaagggagaggtagtggctagcttatatacagtggcgacgaagaagacggctgctactgttcggattcgtgtccagggcgatcggctaaggtggggcccagcgggtggtgtcattgggaatgggtagtgtggggcccggggaatcacagcgcctccaaccatagaacatcggtggaacattccaagagaaggggagccttgggccatccgatcagcgagccgacggcgctggagatgccctcgtgtcagagaagaaaaaaaaagtcgaggatgatgagcttgacctttcgtctggtcagaaggaggggtgcaaaaaggtggctaaaagtggagcaattagctaattaattaattaactgttagttttaggtcactcctatctcatgtgattaagggaaattcactgtgtatgtacagcaaataggctgcagtttttttcagtgatattgtttactggccatagttcacaaaaatgttattttgaattgaagtttgaaattataaacgcctttttcaagtgattaggtacttttgtgcaatgtctgtataatccttgtaattattggtgtgatatatcagaactaattcctagaaattaagctatgcgtataagatcttgctttgtgttaacgatttttcattacttcttaatacgattaaaacggattagagagacaagcctagagctgttagggcttgagcatataggattgcactctatccctaactggtcatggtcctcttgatgccactttccctaaaccataaaaggatgaggtaccagttcagctgtggaggaggttgtggagatgaattctcataatccacaagtaattaaaattggtaaaaatttgcgtggggataggtaccatttcatctttttttaatgaacaccatttcattcttattattgtgttgttctatatatggatggttgggttgaagttacatttgcaattaatatattagtcaaatcacttcacaatccaactcaatttatttataatagtagtttgtttgggaggtgatacatatataggtcattcaatataatctaaggtattttaatttgtttgaagcaatctagagggccggcccattcagctctacttttcatatataggtcattcaatataatctaagatagtctaaataagttttccgaaagggcaaatatgtcaaaattttcatatcatttaacctctgaaatctacacacacaaagaaacagtaaaaaataaaattattaccttcattttttaatagataacacgattgacttttaaaattattaccttcataattaaagtttctttaatgataagacagttcaaaacaaaataaatcaaatttattttttttaatacgacatatggtcaaacgtcatgtccaaagtcaacggtatcatctattaaaaaccggagagagtatttaatgtcaggtgaatttgaatatttattttctaaaattggtggtccggtaccatgcatgatgccccttttcattgtcctcttgcaaaaccacatcaaactaacaatttgatgatggtgtggatgaattttaatttagcactttggttttgctaatttcactagtacggtaacctccatagttgccggttgggaactggccttaggtgtcggtttcccaaccgacaccgatatattggcacctatgtccggtatatgtgccagttttggaatcgacaccgatagagattatacgtgccggttcttaccccacaaccgaaacctgtagtattcaatgtataaaaaaaaggagaaaatctattctataccactgagtttgttcgagttcaacaatttaccattgacattgtccctttttataatataccggcgattttatcaattgttctataatacaacattgggttgagccttctttccaaaaatacccaaaataacctttatctcactagaagtttcaaaaaaacataaaaacttttatgtggcctccttacacaacatggaaatttgtatagaacttttatgtggccaacataggaagatgcgcgtctggatcctcaccgcgatggtcgccaccgtgttcgccatcttcatcacgctcgccgttgccctcatctcccgccgcggcagacggcggcggtggagtgggggcggcggcgaggggaagaggagctcgccgcctcctcatcccccaccgccgccgcagcctccgcgtcacccgccgccgccgccgacccgtgagagagagagaggaagagtgagagagaagagagaggaatagtggaaaagaagtatgacaggtgggtcccacatttttttataaatagaatgctgactggactgccacgcgtacgccacgtagaccaaaaccactgcggattgggtcgaggggggtaatttatccggtttgcatagttgggggtgaagaatgtctggttttgtggtttagaggggtaatttggtcgaccgcgattgttgggggggggggtaattcgtactttttcctttcttttaacatatctgtgttatctcattcgtgactaactacaccatcaattccttaccatgtagcaaccattacatatgtttcattatcaacccaaagcacggctccgtggcagtccttgacccccttgattataatcacaagacatacaaacaatttccaacaatctgttattctgatactattgcatgtctaattattaatgcattacaattaaatctcctccttaatacgaaacggtaaaaaatccatactgtgcatacaactactacaagaagggtggagagcggattcaaacaagggagaagctgctagtacatacatattggccggtaatagtctacacagtttatgtattccaattattttactaattagaaaatttaactttttccttctatgatatgtcatcaagtatcacaagcaacctagaggctcggtcctctgtgggtattactcatgtgaattcctcagggttaatgggagatacagggttaacgcagaggatgtaagtctctcgactcaacgtataagtgcattggagaactgcacatctataacctactaatatatatattgtgcttctttcatgcatgcagcttcctagaatagaacatcgaataagcattgacgatacaactattacaaatgtgcagcgcgatctctgttacttcatccaccgtgagtgttttcatgtcaaaggacggttcttcgacctagagagtatcctggatacaagcgaagaatacaagaatcttccggagtggaacaacacgatgcgataatgcaactagatagtgtattcgaagtgacaatgttataaatattgtaacatcttgacgacacttttcacttatacaatatatttatatttgtcagtatcaaatgtttttctagttactaatattttttatgcataaattaattaattaattggaacattatttatcacaaattattattgtaaaatttttttttcaaattcttgtacctaattaaataggcggctctgtcaaattttcttagacgcactggtcctatcttcgcaggcggacgcctttagctctagtccgcctgggaaaataatcttcccaggcggacctcccgaccgtgttgatcttcgcaggtgttggggtccaggtggagcgggcatctgcctgggaaggccattttcccccgcctgggaaaatggtttttctagtagtgatagttaaaaaaggtgcacatgctttggaaagtgacttgagtttggacttgcgaataatagaacaagataagttgataaatgggaccatatatgttccgctcacatcctgttgcagcttgtgcacactgataggcgactagctaattggcgccggtgtttttggcccacaactaaactgaaggattctatagctaggagtccaggactaatatgcatgcaagtggtgaatgggatagaggaatatatattgttctgccaagcatatgaacagatatcacctttgtttttcgaaaacaaaattaaagaactttgtttgaaattgtttaccatacataactaagaaataagtagtgtgcacgagagggatatgctagggactgtgcacgacgttgatttgtcctaaactcagtaggggcaagtaagatgtctctaacagtgtagaggcaagagacaacgagtaagacatgaatgaaaaatgataaataagagatagatgtaggggtaatagattaattttaacgatttatggatggttcaaacatttctggaacttcgttaattaaacagagcctaattaatgcatttcctattaggctgtgatgtattagactcgaaaaacccaggcctctaagcaagtaaacacgaaaatacctaaattgtgatcaaatgtctcactatttcgaattaatacctgcagtcagatagcagttaattgcccattctgacctctgaacacaccagcctttacacgaagactttaaccctttccaaattttcttcaaatttattccaaatctaaagtaaggccaaatttggtcgtcacactaactagcagaagttcaaatcaagctaccatatccagcagtatataattaaagaagttcatctctaggaaaataaaatataatgaaacccatccttaagttagttctaaaatcatcttttttgcaatgtcattttttttggtgtttttcgtgcattttcattctttctgccacaaatatcgtatagcgtgatacatataaaccagatatcatcaaataaaaagatttttgcagacaaggctccctagtcccaataggttgcaggcaggtattaactgctcctgcatgaaaaaattactcccctcgggattggttatagggccgcctgcgaaatgcactatcacggacggccgcttaagaccattgcaggcctctgcgaaaatcgccgttgtcatcacaggcctaaaaccacgaatagcaggttgacaacggcggcggtagactatggcaagcacgatgacactagtggtggtggtctagggtagccgatttggtgttttgaaattattttcacaagcggtcggtataggtgaccacatgtctcacatgtggttacgctagctgcatgcaaaaaaatgggattttcgcatacacgtacacctggtgtaggtggaccgtctggtcatctgcgaaaatcgattttgatcttatgcaaaaattgattttgtagtattgattgttactcgtcataaaatttaggcaattatgtttgttttggtgacacttagcccgtctactacttaattggatcattatgttgtcgtatatgtttgcatgtacaaacagt

SEQ ID NO: 2087 - DNA, 7058 bp, Oryza sativa
ctcgaccagcggtgtagcgattctcccactacctttacttctagtggtcgagtttagagtacatctggttcttgaccagcggtgtagcgattctcccactatttctacttctagtggtcgagttgcgactaccacctggtcctcgaccagagatgtagcgattcttccattacctctactccaacaaagttgacatcagatacacaatatcgccaagtgttttacccagagatcccttaccacaaaagacacctagcgttgaaacctatcctactatccctttacgccgtcttgacaaggcctccgaggaacctaaggaaacttcggttggggacgcccagagtcgataaggccttgttggatccttcagagacgaaagaccatgtaagatctggtcgtgtaagagttctcgcagtgcgtattaaccaagccgtgtaatcggaaatggattttccaacttcacggctgggggctaggatcaatgcttgttcaactgaggcaggtccaaggtccaagagccttatcttccgagaacgattctccgatgacaaggctgggggctagggagagtgtataactcaacaaactgactaatcgaagtcggtaaaagagtagacgctcatatacaaaacattggtctgtaagtttaattcattttcggttttccatacatatataacatgtcaccctttgagcattcgttcgggggctatttctatctaatatttttttctgagtattgatttcaggaaaattctagccgacattatcgaagaccgcatgtctctatggttctacaccaagatcgactaaggcgagtatgaaaaatgtcgacaaagctccgtcgtagattctgcgccttcttgatcactcgagaacggttggtggatctcgacaaggaatacagaatgaagaaatggtgtacccgccgagataaaatttcttgacttcaatccaaattctcgattacagcaagacgggagacttagtcgtatgctctgtactttctcggttgacatcagagattgactcagacaaaccctttaggtgcccgcacgaggctgacaaaggaagtctaacgttatctctgaactcaccaagaacggtcacgtgagctcgataacagttcctccaaggtctgcggttgggaatatgaactcgttcatttgcattgaagtcaggggctactgtcagggttatggataccacatacctaatagtagttgactaaatctcggcagaacctaccacatagcatgttctatacggaaataacctgcagatataggaggagttccagataaggaaatacaaccagaattctacatggaaacgacaaggactactcggattgtatccatattggtttccctagttctacttggacaagggaacacctatgggtataaatacaagcccccctagaagtagaggggagacagacaacatagaggatcaacacccaacacaatcaacatagaagccacaacatagaagcctacatacgccaagacacgccgtcggatatcgacttcggagataggcacggctagtcccctacggtgtctctggatattgtcaggagagacgaaagcgctatctctgatctcgccgggtacggattcaaggagaaaggctaccctgttgtcgattacgagtcagatcatcagaccgccatgtcgacaacagttagataggctaccccaaatattgtactggtgtgattatcatgaataagagcaataccggattcggccaacaggatgtagggttattacctgacaattcaggggcccgaacctatataaaaatcctcgtctccatctcttttacctcagtctcgcgtatatcctagtactaacgatccccataccatgcaaataccgtagtcgagacatcaaacgtcgacaataccgcccaaagatgattaaaaatgtatttataccatccaaagatgatttgggtgggaattgcttatatgaagtatatattgggtgcctataaaaaaattatatattgggtgggaattgcaagacctggatagtataacaaggtgggaaaggtagtatgtttccttttcttgagtagggagtggttatacccaggcaagtttacacgttcatttttatcagaatcggtttttctatttttctgatttttttttgttcgttcatacgactaacaccctcgtttttacgcttttcaaacggctaaacggtgtgtttttttataacaattttctatacgaaagttacataaaaaaatcgtattgatccattttctaaaaaaagaattagctaatacttaactaatcacgctataatggaccactctattttccatgcgggagtgagttgctccaaaagtaacgaacacatcctaaatttaatcgtgccaacaaaaagagagagagaaaagaaagatgggactgggcctgtttgacgctaatttagagtattaaacataaattgattacaaaacccatttcataaccttaaactaattcgcgagacgaatctattgagcctaattaatccatgattaacatatgtgatgctatagtaaacattggccccgttcgaatcctctagaaagagaggataaacttttggattttcgtgacacgcttttcaaactgctaaaccgtgtgtttcgtgtgaaaactttctatatgaaagttattctaaaatgtcatattaatccatttttcaagtttgtagtaattaaagctcaattaatcacacgttattaccacatcgttttacgtgaaacacttgatcttaatcttcatcttaagaagattcaaacaccaccattatctaattatagattaattagacttaaaaaatttatctcgcaaattagctgctatttatataatcaattttatataagtagtcagtgtcaaatatcctacatggtaccagggtttcccaaaccgccggggccagggttaccgtgcctcggcggtaagcacggttaccgcgcggtaccgcggtaaccgtgaaaaactgtataaaatcgtgcaaaatttatcaaaaattcaaattattttttaaatttatttgaatttgaggaggttatcacggtatttatattaccatacccccgcggtaagctcggtaaccacgataaccacgcagttaccggggtaatgtaaatcctggcacagaataaagtttagtcctcgtccaaacacgacaccaccaaaatcttttagcgtctagaaccattgtgcgtgagtatctctctcaaggagaaaattgacattgtgccattctcaaaagtgggtttcgtccaaataccacgctgggagtgggctttattaaaatgccactttcaatcgaagactacacgctataatgctcgaacggacaaaaatacccctgttactaccttcttccacctctgacaagggatgcctcgccggctcgcctctgccacgcccacctcatccgcctccacctccgctccccttcctccctgacaaccctcgcttcgtccacctccacctccgcaccacttcctccccgcctcgaccgtccccaaccgatgaccccgtggtcacgctccacgccatccgcgccaccgacgccgacgtcggcggtctccgtctttcgtgccaacccgccgtcctagccactcccgttcttccagacggcggaggcgcacccgcacggcggagtcgttggtgggcatggccatggcgaaggcgcggcgcggtggtcatcggaggtgcaggcgacggcggcggtggccgggacgggtgcgagggctcgcggagggcggggctgggatgggggcggatgggagggggcacggggaggggagccatgggaggggtccccgcaggggcctttggcctgtggttctccatggaggagagctcgcgcgaaggcagatggtggccgccggcgagagctgatggtgatggagggaggaagaagatgagaggagggtaatttggtccgagatagtattttagcgtgtaaccatgtgttgaaagtggcattttaacgaagcccacttccagcatggcatttgggcgaaacccactttttgaggatggcacaatatcaattttctcctctctcaagcccctccgccgtcccctcttgcgttttggccgtctcgtctccgctcctcgcgccctgcgccgatctccatcccgcgagcagatcagggtcggcgatctccatctcgcgagcagagggggacgccgccgttgtccctgctgctgcttccgccacatcccggtgagcatccgcatccgcatcctctttctcattcacccccccctctctctctctctctctcacccactttttgtctcgattttgcttgcgtgaaccctagcttcttctcttctagatctggaagaagcttttctctaaatttgagagccctaaccttaatacaagtaacagtttgtttttccccccaaaaaagtaacccccatgtccgcccctgaattactaatcgatggatgcagtaggactctgctgtggagaacagttcgagaattatagaattattatatgacaggcttgactgttaagcatgtttgttcaactctgcatttattaaatgtgaatccccatgctttcggtggtacactgctgaggcgcactctttttggtatagccaatagatcatctgtttcctgtatagcgagcggtatccaactgcttggatctatctgagcatctagaagtgataactttcataatggtgttgcaatactatgtcattgtcttgtaaatatttagttcagatgttgatcaatgatccactgatctttcggcctgtttagatcccaccccaaaattttacaccctgtcacatcgaacatttgaacacctacatgaaatattaaatataggctaaaaaataactaattacacagattgcgactaatttgcgagacgaatcttttaagcctaattgctccatgatttgacaatgtggtgctacagtaaacatttgccaatgacggattaattaggcttaataaattcgccttgcggtttactgacggattctgtaattaattttcttattagtgcctaaacaccccatgtgacaccctatataatatctgatgtgacgccaaaactttacacccctggatctaaacacccccatgatgttcattccatgaacaaagggctttcctgagatgaatgtatccccatcttctgtttttcgattgcatcatgctatgttctgttgctgatgttatcacatttcaaggacaggatatcccctttaatgatctctttggttggttcatgttttgttgttgacacatctttggcccaacagccaaatataaaataattggtcaacataatgctttttgaattttgaattgcagcattttgagcaattaaggaggtgtcaacattcagtacaagaaatggtatgctatgattctcctattttaacggtctgtgtagtcttgcattgtataggtatgcattcctttgtgcttagtttgcttacccccactctgttcatttgttgcagacttacataagggatgaagatacaagacttgagaccactcgggcgaggcgtaatagttccctctttctttagttggaaacaattcttttcttgggggctttctgttattaaggaatccaagaaagcagtttaggcataattttgaacttctgttttgcagtgtcgaatgttctcaaaaggcatgaagatttgaaagagcgcctctcacggtactcccttttgcatgttctttagcatgtaacatctgcatctgtgcataaggaaataatttaataccctattcaaactgccagcaaatttattgaccatttttttttattgaagaacagattctaattgaaaccaaactcttgcataaaacaaatatcttatgagatggatacttcccctcaaatatggctcctctaatatgtaaatatgaattacttaggatttcttataatcgtatttgttgcagctatgttcctgataactaggcttactattgaatggattttatcttcctgtcatatttctgaattctgataaacatatgaatgcatgggctaagcttttactttgtttcagggattctgataaactgatttttgagcggctacagagagaatttgaggctgcacgaactgcccaaactgaaggtacagtttgctaacattaccatgaatctttgtgagattctactagaagaaataagcttaccaatgattatcaatatccatgtaattgtatatttgtgcaatctccttttcctttaagtttgcatattttagtattctttgctgcatattccttggttaagatcaactttgtacaaaatcaacctccacaaagactgctcaatttgcaaaataatgctcgccgagccatttctgatttctttgcattttgaactttgaaattccaaatggtgttttaaatttcatctctcaagttatgaaactgcattttggactaaattaaaaaaaatatggacacaaatgttcataagatagaatttaatgtggtcactgttcagttttttttctttttttttcttgagcacacaggagtcacctgtttaggttgctccttgaattccgtataaaccatgaactaacaagaatccatgcatgtgcatggctgaaactattgagcggttactgaaaaattaaagagctttgttagtgacatttttttgaattcaaaatcattaatacagaacataaaatataattgtaaggtaagaaatgctagctatttgcaatcctagctacgaattttgcattgaaggagagagtgagattattattctgttaatgcttctgttcacaataattcttttgttgtcatatttttatttgagtaaagtgcacgggcggtccttaaacttgcaggggtgtgtcatctaggtccctaaactctcaaaatatatatccaagtccaagaacttgtcatagggtgtcatttaggtcccaaatcgccccagcccctataggatcctacgtggcactgatgtggcatgccacacggacaagacgtggcatcatttt

SEQ ID NO: 2088 - DNA, 5958 bp, Oryza sativa
taagtacatgtgcccatgtatgcaagattgtgccattagtggcagataatcactaactattatttctaccaccatttctagaattagtacttggacacacgcatcatttcttttagctcatttaaatgaaatgtacaaaatatcatcgaacaatgttcattcaaaagttgagtcatagttataagtgaatcatgatcacaaaactcttctttaccacaagcaatagcatctgaatcaatatgtgttaaatacattttagcaataggttccacacttgattgctctatggtagcatgaaaagtggacatgtgagaacagtcaccttgatttatccatttttggaacatttggcatgtgtttggtttggggacgaagtgggatgggttgggttcatccctattttctggaataggatggttctattttttgtttggttagagagatggagcgcaccctattttttgtttagttagagggatggagtgagatggaatggttccatcacctgtttggatggagggataaggtgggatatccggataaaaatacttcctcaaatagaattggtgaggttacctctcacatgaacaatatatttttagcacctacaaaaatttaataaactctcacacaaaaaatacattcgtagcagccccaaaaatttaacaaaaagataaatatgttgccatatcatactcaagcactaattaatcatctcatcacaaattacttgcacacatcacaaactaattcttgctcacataaaaaaaagtctactgaaagaacatgtacagatctgaaacgaaatccccatccaatgttgtcatcgggattctgggaggattggagaaggaagatcgcgcgtgctgctgacgttggaggccgatggcggatggaggctggttggacaccgccatggctgccgccggctcaccccagctcgcgcgctcctgccgccggctcgcccatgctcgcgtgctcctgccataggctcaccctcgcccttgctcgcgccctcccatcgccggctcgcccatgctcgcgtgctcccatcgccggctcgccctcgctattgcttgcgccctcccgccgctggcttgccttgctcgcgcgctcccgccgccggtgagagaaggagaaaggaaaggggtgcggtgaaaaaaaaaaggtaggccagatggttaccgcgcgcgtgcgaagtgggatggcgctgtccgccagattttcgcggatgagatcgtcccgaatattggaggaatattctctttttggaaccatcctatccctcctaatctctcaaccaaacacttggttttgggatcatcccatcccatcccgggatatccctccaaccaaacacaaccttggtttatctcagcaccatttaatttatctttctttgtttagaaaatgtaggtgcatcagtcttctctttcttctcaagtgatgggaatagcacctcgatctcgttttcacaggtttgctgaatgctttgaactccctacaaaatgttagtaacaagaagcacaagcatagcatgttgctccctcgtgtcctccaaaatttcaatctcaacattgcaagcaagcatgaagatgtgggctatatgattagatgtcacattagcaagcctaacttgagtatctaaattaagccctttcaagaatctacttattgtgcattcattgtattcttttaaactgtagtagatgatacaaattttaaattcatggaattactcctacatagttttatcatcttatttcagatgttctaatttcttaaggagaacctttttataacaagaaagcacaaatctctttctcatcaataacttgcattctccccaaatttcaggtttgtcaccaacatgattccaccaaaaggatacagaagtggtaaacttcttactagcagtcttaatcatttgaacattagaaaaatcatgcctctcaaattgtttgtctactgctagctcccaatcaacataagcggcataatcaagcatatcatcaaagaaaagcaatacagattctactcttgcatgattataattgggtaccttataagcgtcatgtatagtactcgctgtgtcttttagcaggtgaaaaggttggcattcaacatgataaactccagttcctttgcataacctgtcagggttatggataccacatacccaatagtagtcgaataagctcggcaggacccaccatatatcaaattttatacggaatcatacctcgtatatagaaggagttccggataaggaaggacggatagagttctatatagaaacaacaaggactactcggattgtatccataatggtctccctagttctacttggacaaggggacacctatgggtataaatacaagccccctaggaggagaagggacgagccacaacaacaacacacccaccatagacgcgcaaatacacaagccaacacacgccaagacgagccgccggatatcgacataggagataagcctagacaaacccaatatggtgtctgcggaggccaacaagagggatctaagctatctctgatctcaccgagtgcagactcgaggaggaagactaccctgtcgtcgactacgagttggttatccatgccgccaagtcgacgacagctagataggttatcccaattattgtactggtgtgattacgatgaataagagcaacactagcctcggctaacaggatgtagggctattacctgtcaaataaggggcccgaacctatataaaaatccttgtctccatctcttttacctcaatcttgcatataccttggtacgaacgatccccataccatccaaataccgtagtcgcgatctcataccatgattagtagaaaacaagaaaaatatagcctatcaactattgaacttggtgatatccaactccctctcaatctcccatcttgtgcaactaagttcttacatgtttttaccatgttatgtagatggtgtttagcaaacaacaagaacatcaacaatggttagttgtaccggaaccaacaacaagcacgagcatgtgtcatagtagataaatatgtggagctacaggaggttggaagcaaaatcacggtacaactaggagctataggagattgaataaatgctcaacaatgatactatgttgctcctagcttaaacttagttagagacacgagcttggtcacaagcgtagccattcaaaatagcactaaaagaacacaaacaaaaacaacaagaacaacaacttctcttttcttcttatgtattgtttcttctcctttttttcttctcttctgataccttttctttcctccttttttttatcatttgcacaactagctcaaagctaaaacgtttcacaagaatttttgtcagtgttctagatataggacaccctatacttatgtttaagctcggcggggtccaccatataccaagtcctatatataatcaatcctcatacatatgacaaaagtcctaagtagataaggaagaagtcccggacaaggaaagagaaatagagtcaattttgcctcaacctaagctacttggattgtatccataattgtccccctagttctacttggacaatggggcacttgagggttttgttgacagccgttaagtaccaactatgaccttcaactcctgcataaaaaaatacaaaatataatatcaaacttagtagtgagggtttattactaatcgtttccacgagtattggtaaatatatgtgtgcagataattttggaaaaaaattacacctgctatgtgacgaaatgtacctccgactaatcatgtgcaagcacaaggattggagggcccacataccagtcaaaaccgactaaaattaagcttatccacggtgcaccgccataacggccacttttcagcctcaccaaggaaaggttggtggctgaaggtggtggcctggcagccttggtgctcccggccaccgacttccacgtggtgcctcactatcaggttcccaatgacgataggagtgtttatcgacttaacaaccgatctacaaccgtcattgagctgctataaaaggaggaactcacttcactcacaacacacaacaaagtagagtacaacccactttcatattttaggcatcactttagtagtgtggagaaaatacgtacagagtgaggagaagtacggaggagtgtcgaagctgtcggcattctctcctctcctggacctaggcagaagcttctttcataaagtaagtgctcgagattttcttttcgatatttaattacttactatcagggttatgagtaccacatacctaatagtagttgactaaatctcgcaggacctaccacataccatgtcctatacggaaacaacctgcggatataggaggagttccggataaggaaagataaccagagttctacatggaaacgacaaggactactcggattgtatccatattggtttccctagttctacttggacaagggaacacctatgggtataaatacaagcccccctagaagtagaggggagacagacaacatagaggatcaacacccaacacaatcaacatagaagccacaacatagaagcctacatacgccaagacacgccgtcggatatcgacttcagagataggcacggctggtaccctacggtgtctccggatactgccaggagagacgaaagcgctatctctaatctcgccaggcacggattcgaggagaaaggctaccctgttgtcgactacgagtcagatcgtcagaccgctatgtcgacaacagttagataggctagcccaaacattgtactggtgtgattatcatgaataagagcaataccggcttcggccaacagaatgtagggttattacctgacaattcaggggcccgaacctgtataaaaatcctcgtctctgtctcttttacctcagtctcgcgtatatcctagtaccaacgatccccatactatgcaaatatcgaaattgcgacaacaaacgtcgacagtggcgcgccaggtagggggattcggctgtgaggagatccaacctgtccaagtacatcttccgacaagatcggaaccatcgtcgtcaacaacttggtctatcgagatcatccaagcctcaagcttcgcggcgtaccaaaagatgtcagatcgtatgatgtcgaacgagtacgcaataaggtaattggtagattggttttttaaattgatctactaatttcgtagatacatccggcatgtatctacaaaggtacgcaatattttatctgcaatttgtcgtacctattcagatcatacaacattgtcagatccatgatttattatgtttatctagagcatgtttttatacaatatctattatgcgagtgtttccggtgttaagccgacaacggtttaacgctgggggctcgctctatttccttctgtataaatcatgcttgtttacggtttacataatacctgatatttacatctgctcgttatatcctgataatactagaagatccatgcagttttttgagtatatactcgattttatctactatatatcttgtcttctagataattctactcgttcgctagtcctcgaaccagtgcgtagcaatctctcgcactgcaacttccattggtgttcgagagataattctacacgttcgctggccctcgaaccagtgcgtagcaatctctcgcaccgcaactttaattggtgttcgagagataactctacacgttcgctggtcctcgaaccagtgcgtagcaatctctcgcaccgcaacttccattggtgttcgagagatgattctactcgctcgctggttctcgaaccagtcgacagcagcaatctctcgcatcgcaacttccattggtattcgagagatgattctactcgctcgctggttcccgaaccagtcgacagcagcaatctctcgcaccgcaacttccattggtgtttg

SEQ ID NO: 2089 - DNA, 3248 bp, Oryza sativa
cttttccaccactcagcaataagctaggacctggatacataagccatgaagtaaggcacaccatcaagtccatactatcttgaaagaacaaaacgtccaatttgctccatccaatcagtcatatgaattaatcttctcacgtaacagtgatgcattaaccccaagaagatgtggacttaactctgacactgcctttaagtcttgtattgagatcgagttagggcctgtaggtataataataccctgcccatgcacatgatttttcagtgatacgccatttattagcttacgtgacaactgctgcttcagtgatgcatggcttagtttcccaagctgtgatcttgttccaactagctgcacacaagatccaatcaactgctttaagaaaacatcaactccattattcaacaaattagcacattctactgagaccccttccaaacctgctgcttctgcaactttttccatcctcttactcagtagcatagtatcacataactcaccaagttcatagcaactaacagagctatcatttggagggacagaagcaatggctgaagattctgaatcccaccaaaattaactggggaaaattgaatccccagtggagctcgcacgggaccttggatacggtgtatattttcacctcccgagttttcaccataagatatagcagaagggccattgctgtgtgaaggctcaagaaaactcggtggctccttttcataatgtaatcgcttgttacgtggctcagcatgctcactgttctgaacctgttggcatctcttcagatcactaaaatttggagcaccattctccctgataataggcgctccctcctgctcaatggtcaatgatctattgtctttgacatgctggattgaaacattaccattgttccaaacaggatgaagtatctgttctgatttagaaacatctcctgctaacttgggcgcatcaattgccggtggaccatttgcacggcatgcattgtggagaatagaacggatgaggtgattgtgcaatgggaggttctcacggccaagtgtcacaagacagagcttatcaaactcatttttgttcaattttgatgataagaacctctctagatgctgaaagtatttctttgctcgccctggcccaatcctcttaatgatgttggacttaatctcacgaaggtcaatacgagtgctctgtcctgccgtggatgacggtaatggttgcacagttggtgcaggttgcactgatggtggcgtagaggacggcatgtcttagaaaagatatgccatgtaaatgtaattgaaacacaacgtagaatctcagtaaaatctccaccaagtagtgtagccctcctccaattcgacccctcttagtataaagctagccacaaaatgtactgcagtgaacaaatctctgattaggaatataaaatatgtaaaataataaaaataaaaataaaatgccagtagcacattggattatccaagaacaataaatcagtgaagaaaatcttctacgtatgatataatgccagctgctttctccttttacaatgaactgaatactgatgatggtggttgctcaaccaacacctggctcaacaagaatagaaggaaagacttattgaactacttggctataataaagcctataagtaaagactggctaaggacctgattcccctgtaaaccgtgcatggcctgcctcatgcagctcatgccatttgaggtgcccagctcaccattcattcacagattctgtaatgaaattgagactgctcgatttttttaaaaaataaagtgaggatatcccttctagggtaggatgtttacttgaaaataacaatcgcctgttccagtagcagtggccagtagacttgcacaacaaaactatccttgcacttcctaatcctacatgtaaaagttaaaaacaatctctaaaaatttggagatacaggggagggataattcaatagcaatgaaaattttagaaaaaggaaactccgtaccagcaataatgaatggtaccaagcaggaaaatcactattcattatgtctgtctttcatacatctttcaaatacaaaatcaagtttgaccttggaattctacatggatacaaaattgtctccctaaatgtccaaattttgatttttgagaacttttacacgtgggaagcagggaggtagcatcatatgagagggaagcaccaaacatctccttgatgaaggctcctccaaaccaatacaatgtgaaatagggagcaggaaggagatagggatgagagacaagtggggctgactgccacaaattacttttaccaaggttatttgataaggccaaatccttgtaaaaagaaaattacttcactaaaatgtgttaatgtcctttcaggacaaatagttttgtaaataaaataaagaacgtaattcctcagtatgttctggatccttatagaattgtgttagtgttggcatttggcaaaacttgaagaagtgccagcaaattgtgtggtcattgaaatcaattagtactagcttctaggtaagataagcacctattaaactaacaaaaagaaaggaaatttgatattggcatgtatcatgtacaggaataaaaaaggccactgaatgggtgattctaaaataagtgtttaagtttgaacggccaacctacatgggttcatgtgccttggaaaatcagaaattcaggattccgctcgttcggaacatgatgttttttctttaataaaacgaggtaaataaaaaaattcaccacaaaaggagattgaaaataattaataattgaaatacccaaaccagatactgttcctaaaaaaacacatggcaaaaggcactccgcaccaaattttgcgcactgttcataactataaaccattcgagaaaaccaaccatgaagaaacaatatgaaatggcaggtcaactgtacacgaagagtaacttccaaacgaaacctaaaacagaacagcagaaacacagagtttccctgctccaactatgcagtttttgcagaccctgcaaaaaatccaagcttgacagcaagctttcctcatgtgaatacaggtaccacccaagaagaaaaactgagacatcagccaactgagcaagatcacataaaattgtacctacaatcgccccccccccccccccaataaaaacattgtacctacaaaacaagaaaagaaaatcgccaactgagatgcatccagctctccttcactcacaactcag

SEQ ID NO: 2090 - DNA, 4461 bp, Oryza sativa
taaaacattctcacaaacattacatttatctagttctgctaatacatttcatgcagaatggacagggaaaaatcggtaagtcaacagttgtgtaaactgtaaaactaatagggcatgataaaaggatagtaagtttatatgtactagaagttgaatttacaatgcaaatataaatccagtaaatgaacttcactaagaaaaatgttctgctatgcaatattctccgtggctgtaccgctgctgttatttattactctgtttttaggtgttctcctttcagagttggataacttcttttagctactcacatattgtttttttaattatgaagtattcctctgtaaattattcgggaatgctttgcagtttgcatgatgaataaccacaccactatattatcacgaagaggaagtatataatagttctgaaacagatgaacatggctgcagtaaccaactgtgaattattgcagcagaaagaaaactgcttgctttgtctaaaagaagaaccgctaaagaaatgataatgcagctaacaataaataagagacagaagaaacctctgtagcatctcggtgaaatgccagcatgctagcctcaaagcatacagcctttagctgtgcaccattaaaatcatctgtacagcaagccaactcttcaaagtttacatcagggtttttgtccatttttcgggagtggatctacaaataatcatacagagcaagacatttaggttatgtgtgcaaagctagatatcttttcaacaactaagcaagtaaaggagggaaaaaaaaggtgttcaaggtagcttgcctccagaattctaactctagcctgttcagatggatgagggaattcaatcttttgatctaaacggccagatcgcagaaaagcaggatcaagaacttctggccgattagttgcagctattacctgttagtcagccaaagagttcatcatgtcattacttttttaaaaaataccagcaagaaacagaagtaaagtattaacagaaatcatattttagtgaatgtcataaagcatgtaggaaacatgtgttcgttagatagacaagcgataaggaacaaagcttatgtttgaagttataagaagctgaagacaatcaacaaaaatgcaagaacaggtccttaggaatatccattaggataactaaaaggctaatatgaatgaggatgtcttgatattatctttttcatggtatttattgtagctttcatccagtgatcaatattgcacagaacaaatgggcttcgctcccttccaaaaaaaaaaaaaaagagagggattcactgcttatggtcacctaaagttattcacaagttctaagaaatttcgagtccatgctggtaccatttgctgtttgcgaataaaagaagagattactgcatcttaacactacaggcctgtttgggtagtcggaaaaggaaaaaaaatcactcacaaaaagccagcttttcgtcctagtcattcattctcctcttctcatttcaacctaatccttcctatcccaacaccactaatatcccacagcccaaatgccctgtatcagtacatacgtgaatataaaaaaaataaagtggaacaggaagacatctgaagggctctgtactctgtaccaggatatgcacacacaccaaatgatttaatacaatagttccatacacagaagaataaagagatatgaaaaaaaaaacacacttctaaacatatttcaagccgcagtttgcatattgctaaatctccatctgtggttatcgaaagtcacatgagcttgtggttattaaaacatttacctttatactctcatagctcccgacgccatccaactgattaagaagctccacaattgtttgttgcacttccctatcaccactgcatggcgtgcaactagtcagaagtgcaagtactcaaacctagcagaaacagaacatacattgtatattgttgagagcaccataactgccaaatgtactaaaggtcctattataaactcgagttacttctactacaagtctcaacaggagccttcatgactttgtgccagaaatgaagttcaaacttccttcctgacatttctgaggatctaaaaattcaaatgtcttaagcagacataaaaacttgtattggaaaagaacctagaatcatttgcataaagtaaacttgcagtatacatgctaaattaagtgatatatcaactaagggtgcaggtaaaggcaatatacgattagaaagaggacatgatttaacaagtatttaacatgtcagcaagtaggaaacaaacaattgctggaaagaaattaacagaaaagacctagtgtatttgttcacatattcaaaagtgggaaatgatgaaggaacgaccatgtttgtcatacctatcaaagtgcttgcttccaattgcatcaatttcatcaatgaaaataatgcatggggctttctctttagcaagctgaaaggcatcacgaacaagtcttgctccctcaccaataagcttctgcacgagtccacaaagaaaccagtattaatctcaatcgtacataaaaaaaaaggcaaatcatgtagcactaagaaacttttcagaggagctcaaagatatcgaaggatcatgaaaaactctgctgttcaatgcctttacgcatttcatgtatctatcaaatactttgattggttttcccaaattcactgaccaatgcataaagatggaacatgagaaagatacagaatatacgcacacctgatttcatgaatagcacaacaatattttactgacagttaggtgatggattttctgttgcaagataattaccacggcaagttgtggaccagttagcttaagaaatgttgcatttgtctgggaagcaaatgcatgggcaacgagtgtcttcccagttccaggtggtccatacagaagtacaccttttggagggtgaattcccaacctctggaagcagttcttgtggattattggcaacacaactgcttccacaagctcctcaatctgaatatgaaatttacaaaacagtttattacttataggagatggggtggtataaattaacaagtaaacaaaacgctattcagtacaataataaattaacaagtaaacaaaacgctattcagtacaataataaatgaaggagtgcaaacaatgttgctattcagtacaataataaactatgtccactgttattattaccattcttaagcagggaaaagtagaaagagttgtaacttacttgtttttcgagaccaccaatgccacagtagtgttcatttgatgtactgtcaacaccaattaaatctccaggcttaagtttgctagggtacactaccccagcaataggacggaatataatctgtcattgcaagaaaaggaaacaaaagaaaaaatatatatatcagaataagtttagaacatagatgattgactacagaaaatgaaatcgagtgagctcattgcctcaagaatgtcccctgtgcataagttcatatttatctatgggtggtatagttattgcagcaaatttaggctcctgttgatgcatgtgcatattgcaaaggaaagaactccactgttgattcgacatgccagtcaggattgaacatatccgagcaatattcataaccgagctcacaggcaataggaacgtaggattggtttaattcttcgcttgcaaacataattacattgcgaatgagtcacgaccacaaatattagcaaaacacattgagtatgttccgtacacatgcacagttcaaaatgtggaataccagaagcgtacttttaacttttgaaaacttaatcaagcttgttttagtctagcagtagagacatgctgaattagtgaaaggcagagagtttgctattgtctgaaaagagaggttatcatctgtggaacagaagatatcactgcaaccctgttgatgttacaaatgacacagttctgatatattatgtatatactgcctccgtttggaaaaggatgaagttctggcctcaacgcctgaagacaaagacatctctttacagctaagaaattgacagctttgccccttactagagtaattaatgttccaatcattgaaatgccaagagaccaagcaggcccagggtagcacaaatttcaatctacctcaatcaatgcaagtagtgctgccacgtggaaacattcatatgcaattagggatagctaggaacagcagagttgagtttgagtaatggattgctctctctctctctctctcaaacgggcaggagagccgcgcatcattatataaaggaaaagagtctaagaagactcaaagaagcccattagggcaaggtttagtacacaagggctggctaaaggaataaaaaaggactatgactagcaatccaagcaaacaccacatctatggccaaaaggtactaatgaattgcttttaataggggtaatttgat

SEQ ID NO: 2091 - DNA, 4899 bp, Oryza sativa
atactaaattaagtgtatgtttgaacagccgtactccatgtgcctttgaaaattaaattcaggtttccgcttgtttggaacatgatgttgataaaacaaggtaaacagaaatactgtccatgaaaaaacacatgccgaaaggcacaacacatcaaattctgtgcagcgctcatcaccataaaccatataagaaaaccaaccatgaatgaacgatatgaaatgccaaggtcaactgtacactcagagtaacttccaaacaaaacctaaaacagcatagcataaacacaagtttccctgctccacaaaattcaagcttgacaactaactttcgtcatgtgaacgaagcctaccagaattttcctatccagaaaccatgggaaaaaaactgagaccagctgccacctgagcaagatcaaacaaccttgtacctacaaaacaagaaaagaaaaatctccaactgagatgcatcaagctctccttcactccaactcagtttctcccgattcgaacgagtaagcaaaggaaaggcttcacactcgaattaatcaaattattgtaactctaacaaacagataaccgaaatcacaagctccaccgggtgactgaacgaactgtggacatagtcacaattcaaattttatctccaacttacatggacacgagctcctctgatccagtgccccccattacctcaacccgaaatccagataaaagctagggtttcgcaccaaattcaaactcccgagctcatgccgtcgcaccgagctaagggaacatccccaaacaacgaacccgcgcacatcctgaacctgacgagcaaaaccgcgccgcccccgcaacaacgcgcagctcaaaccaaatcccagcgcccccgtccccatcccctctgatccaatccggacaaccccaattccgccccgggacctgcgtcccgcccccgaattcgaactccccggcgcccgaatcaccagaacgaagccccgccggcgagtggcgcgccgccattgccgccgccccccgcgcgcgtggcgggtacatggatcgaggcagagttgggggtggagggggattttgaaccggaggggggtgggggggggggggggactctcacctctgctgcagcttccgcgcgcggggcgcgttggaacgcggggggaggcggggaggcgatctccggccgcggctgctgctgctgatgctgatgctgatgccgctgacgctgacgacgctgctgctgacgcgtgcgtgcctcccgaggcgcgctgcccgtcgtggagggaggggggcctgcttgggtggccgggggttagcacaagggggtagtgagtccgggcggcgacggcggcggcggaggaggaaggcggccgcggcggaggaggaggaggtggaggttgctggctgctgcgttggttggggtggtctctctcgctttggcttggggtggggcttgtgtgtgcagttgtttgtctgtgttggtccgtctcggcctcgattcgatgttgtagtgtggttcttccttccatccatctcctttgccttgcctctctgttgttgatctatccatctgatgactatctatctgctgtcaacttcttctccctaccgttttttttcacttttattcaagtcacctttggtgtggccagatgagagtattaggttagtttagtgcttgtaggtaaaggattttcgtggttgctaaaagggatatatgaaaccattcttagccgtcggtcgagatagatcgaacggccggcaagacttcagtatctcctagcaccactcctccatcaataggagatacaagtgcgaaagggtactatggttctataggtattttgcggctaggtttaaggctggcatagataataagtttattctgtaatggctacatcgattctctcctagtctctaggcccccacgcacaccgccgccgcctctactttcttaagcactggcttcttgccttccctcagttgtctatcttacatcgcctatgtcctctccccagtcagaagtacaacaacggcatttgtgggcaagtaagcagtttagatctaggatcctatttgattactttctccacctctaaggacatgtcatggtgctcatatgtagctaaagtttttagagtaggccagagttagtttaaatttaggatacccatagaaggagaaaatcaaataaatggatggtattacagctcaaatatcaaagggattgtcttgactaatcaggatgtaaagctttgaaaaaccaaaatgttgagtgcccttataaaaagctctagaaaattaaagcaccaccaaaaagaaagtcaagatattctcttactacttcttaaaaaaagatgacaccgttaagaggatggaagaaagggactaagcacaatcaattttgtactccctccgtttcataatgtaagacttcctagcattgcttatatttatatagatgttaataaatctagacattatgtgtgtctagattcattaacatctatataaatgtgaacaatattagaaagacttatattatgaaacgaagaaagtaatatggaagagtttgttaaacatttatttacacaataccttatagtagttcattttatgtggattgttagtggagtgtgctttaaatattgtaatgatacacactaattgtttggagcatggttgcacaaatctatatgttctatatagatacaacccactaaatacctaaacttcaacatgcaagtatagtaattattatatagggctttccgatctttcaatgagaagaggataactttgattttggggaggagtccacattgacagtctaactacaactaccacacagggtgttgcaccatagcaactggtacaccaatgtctaactacaactaccacagggggtgttgcgccatagcaactagtacaccaactctgaattgttgttgttcttgttgtgccaagaacaaccttgaacctactagcaatcgaagaacaaagcaagaacaaattaacaagaaaacagtcacaacacttgctaaatatgaaattgacacacactaagttgggaggggggtgaatcaagtatccgagttgtctaactgacacatatgagtacaatgaagtagctgaagctaaactttcatgtaaacaaaattcaagttgcaaatggtagctacaaggggtttatataggtggaaaatcaaccgagcagagtggtaggagcaaaccctaaccttggtggatccctaatatgctctactgaatacaagacccaagcccaagttttttgtctagatgttgtttcgattattctgggtagctttgctcaaatctaatggtgaggatggactaacttgagagtaaacaacaatatcttttaaatgagtacttgtgaggccaaaacggaacagtatgcgaattccacggtcgtttgaagttagttttgtctcagatggccgaattggattccagtgtgcgggggagttgatctccatctcttgatgtgtcataactgatgtgtacatcttccatatatatgcaaccccaaccatgtaggttacccctaaacaaataaaggtatatatctccctcattagttggtgtcatattcttaatgcaatcaaatgagagcttgtgatgaaacgacttcatccgatgatatatgatgtgagcaacgattttatgcatatttgtcatggtcacatcatcctcccttaatttctttatagaaaactatcgtcggttttatatttatgtggtggttgttgtgtagtgcatgatcttgcccatagaaatgtgcaaatgaaaagcacactaaacttttctcatgtaatatcatcaattatttttcaaatagaatggttctctaataaaatgaatgtacatggcaatggagatgcacaacaaaagtttatgaattacattgaaatcactctcccgcaactcatcttgcaccccttcatagaagcaaagtactcatatcgtgcatctaacttgttgtatgccgacagagtcgggtgatcagacccctcctcttcttcaaatgtttcctcaaatcaaaactacaaaaaaaaaacttgagacaatatatctctttagtttgctattttcttgcacaaccataggaggtttcaaatctaaatatgcataaactctgtgcaccatataaattgctttattactatattgcatcatatcgtgcatccaactcttggcagtgagtgacatctccattgcaatctagtcgatggtgaagagctcacctgacattggccgacacgtcgatggcgagcttgggagagcatcactgacagcaacttggcatggctagtcattttgtcttctgcattgcctaagaggatggtgactccagcagcaacctccggactccatggatggacaccatgaacctgtagaaaagaaggaaaaaacgtagtgtaacatagaagcagattggagtgcatggccttctctactggctggctgttcaggtcatgtgcttcattgcctctacgacatgtttgtacaagcttgttgtttgtgtgagcggtcgtgtgccgcccatggtgtaaggccttcagccttgtagatgccttctgtttcactttattgcgtctccctcctctgtatgtgtgtgatggtctaccttttatagtgaagatgaggcggttcccatccattgcgcatgcatggctgatgtctcaattcatggctagctaattgcctgagttttgtgatttgcatttcttccatgcgttgtgattcttccaattaatagggatcctactcagcataattccatccgagttaccggggcaagctcctttccaacctggcgtgatacggatcgattatttccttgtattcgtatacacatagtgtacaacaaatctcgctttt

SEQ ID NO: 2092 - DNA, 3866 bp, Oryza sativa
tgtggatttcgatttgaagtccagcctcatcacgatggcgtaggctagcccgttctgtgccaagcctaatgaggatgccaatgctcatatgcaacagttcctagagatttgtagcacgtacattatcaagggcgtcagtcccgatgccgtcaggctgcggctgtttccgttctcccttctcgagagagcgaagcagtggttctatgccaaccgtgctgctgtcaacacctgggacaaatgctttacggcattcctctcgaaattcttcccgatgggcaaaaccaatgctcttgtggaaggatttccagtttccagcatacaagggacgagtctattccggaagcatgggaacgactgcaggagtatgtggccgcctgtcttcatcatgggatggacgactggctgatcctgcagaatttttacaatggactcaccccaaagtcccgcgatcacctggacgcggcagctagaggagccttcttctctaaaacagttcaaggagccgttgaattaatagagaagatggtctccaatatgggttggagcgaggaacgactccagacccgtcagcgaggcatgtaaaccttcaaggagacggaattacttgctgccaagctgtacctcctcatgaaacgcttggacgaccacgagaaaaggccacaaggcaccgtcaaggccttggactctcacatcacgtgtgaggtctgtggcggcacggatcattctgggaacgactgtccggaaacctgtgaggaggcgatgtacatgggcaacaacaccgggtaccgtccacaaggaggtcaggggtggaaccaaccacgcccatattatcaatgaggtaaaaacaacggtaacttctctaaccagccctccttgaaggatcttgtttttgcgcaagatgaaaccaccgatgcactaagcaaaaagcttgctgctaccgataagatcctagagaacataaaattcaaattagatggctttgcctacgcatttcaaaactagatgagctttaataagatgaaagaaacccagttagctcagttagcatccttagtccctgcaactgaaactgggaggattcttgggcaacccgactcctccattgaaaatgttaaggcaatcacgacgaggggaggtaagtccactcgtgatccgccgtatcctaaccttgcaggaactaatgggatatcaaaagaagcgtcatctaatgactcggctgacaaggagattcagccagaaaagaccgtgccgcaggagtactgcgacacgcggttgctgctgtttccccaacggattaggaaaccgtcagtagacgagcagtttgctcgttttgttgaagtaatccaaaagattcacatcaacatgccattgttggacgctatgcaaatgccgacatacacccgttatctcaaggacatactcaacaacaagagaccgctcccaacaacggaggtggtgaagctgacagaacaatgcagcaacgtcgtactcaacaagctcccggagaagaagaaagatccgaggtgtcccatgatcacctgctcgattagggcacaacaattcgaccaggccttgtgcgatcttggagctagcgtcagcgtcatgcccaaaaggcgtcttcgacaagcttaacttcatggtgttgtcaccgacaccgatgcgcctccaactggctgactcgttagtccgttacccggcaaaatattcatgtggtcgaagtggagccacccaagacggacagcctggtgaaattcatgcaaaacttcctggagaaggaaacaacaatgcctaggaaccgctattggaggacgtcggtaaaatcacctgtaccggccaagaagttagagcagccggctcagaagaagccatcttccgcaccaaaatcaaagaaggtgtggaaggaaaagccgaaaacgcccgctccatcacctccagagacgggtagaaaatccgtgaactaaaccgaaaggaggtacggtcttgcacgtcggactttaaatgacgcgaccttcgccaacaggtaaattggtatgtatccgcatatttgctttcaacaatttgaatttttgcatcatcacatatttgaatttcatatttgcatttaggatttttgaattttgaggaaattcttcaaatgaatttttcaaagcaaacaaaaaataaaattttcaacaaaaattgactgtgccacgacaacactgaccgttggaatccaacggccgaaagtggggccggttgggcccaccaggggttcggccgaaccggccaggcaacggtcggctgcctcactttttgaggcaacagctagtgggccccacaggtcagttttgaccgttgtgggtgcactacttaagccaaccgaccgggagaagggacttcaccccatttcaacacattttcatcccctctccaaagtttgctatcaagttcattcaagctttgatagtttccctcaaattcaaaatagtttagttgcatatataaaagttgctttggtgaaactaaccggcgggtgaaactcttatcattcctaacccccgccgagtttgcatatgcaattactctatgttatgacgatgatattatagtagtatctggtagtttaggcgtggtgtctagattacgggatatcattatttggggttatatattgcggatgagaggtgggccgctgatggtgacagctcattacgggtattcctccacaccggtatataatcctaagttaattccctggggagggtatttctccgtatttagccctggttgtatggtcatgacgggctgtcgtaaggaactcgacagtctggggtggcttctcgaagtaccaggagggcatcggatagagggtattagctagtatatcggttaaccagaatgtatgtataccatgtatattagaagtatagaaatagattatatttctcttttctgtccacttagcttagataatatattatgagaatgagtagctaaaacttgtgtgtcactctacccttgtattatcttaaccactgcttagaatatgattatcacaagtaatatataaattatttgtcaagttctctacatgatcttcccatgggataaaataaatacgatacccttggaatactctcggttgaaatgctacaatggtatatccgtgcgcttgcgaatgaactctgtaaccataatatactagaagtattactgcgcaattgctgggaattatatttatagtaatgttaagaaataccaacaacgggcagcgacatgcaccaccggcgatgggtgctggcgatgcacgagcaatggcgggaggtgcggggcatggtggcgcacgcgggatgctgcggctcatgtagaaacaaaaggggagaggggaaagaggaagtcctgtccagggaaacagcggtgaccagcgcagagcgcgggacgatggcaacgttatgccaaggagcagacgggctacggcgagccgtagaggaggagatgagaagggtcaagaagaagatcacttgcaattgaagaagagtgggttccggcgacggggagcgatgaccgaacggtggccgaggggcagacaggctcgacggtggtggcgacgcagctaggtggtgaccctagcgctgtctagtggacaactggaggagagcgatgagtagtggagctctctcgatccggagtttgaatctcttcattctcgacggacggctgctcaggaaccttttcatcaatcgagctagcagaagtggatggttgagcgagtggcttcatcgttaaaggttcctctatcttggacactgatgccttcgactggttttcattggtttgcgtcatgaagatagtattttctagaatgcgatcctacattattcttcctt

SEQ ID NO: 2093 - DNA, 630 bp, Oryza sativa
acgagtttaacttcactggtgagtggtcccctgaggacgcctaagcggcgaacccagaaaatttatgttgggcgtaatatgaagggctaatgaattaatttggcaacggactagctgacattgtaatatccaaaaacaccgccgctgcttagcgcctcaaacatcaaataatggggtgtttcgtttgtgcagggcacggactgcagtctgcagctagcttaatgctgataaatatgactacactgatgagtcgctgatcccaggaaatttcacatttcttggggtatgccggtgccctcccggcaccacccctgggtccggccttggaggacgggcacaaagaggatgccagcaagccactgactttacaggattttttctcacgcatcacaaaccaacgaacgatgcgatcgacgaagaaccatccacccaaacgatcactactggctcaggagcagcatcgcctccggccgctgctgcccgaagccgtagaacgggtggtggtagtggtgcggctcctccgccgccgcctcggccttcgcctcggccatcgacaccaccagcaggttctccttgtcgccgtcgtccacgcaggcctcccttcttcacctgccctcgtaccgcgagttg

SEQ ID NO: 2094 - DNA, 511 bp, Oryza sativa
aaggtacgtttataaagcttacttccctcggaattttttgctttcattagttcatcgagctaggtcaaaatcacgctgccctcatctcttagcgcgctgttgcaatttagtttgtttgatttttgtttcaagttctactttcaactgcttatatacctgtgcgatggtcttaaactatttaatattggttggttgttcgtaaatcagaattatgagttgtgttattattttgaaaagacacactttacatcaccttcacagtgcttcgtatgttgctttttccaggactgataattctataaagaatcattggaatagttctctcagaaagaagcaagatatgtacaataccagcaataatatggtagttccgaaactgcttgttcatgataagttcaaggataaaccaaagctgatggctatggagggtcatcttgatttgaacaaggcacccattatcaattcaaaagaccaacctggaacagctcatcggtctaattgctcagggttt

SEQ ID NO: 2095 - DNA, 7714 bp, Oryza sativa
  unsure (1)..(7714): unsure at all n locations
acttcagcagcgggcgactccactccacaggcaatccttgacggcagcgacgaaaccaactttgacaaaacagctccaactaggaagatcttcagctctggtgtgggagaaaagagagcaagactgagtactacccactgtactcagcaagtcataccggaagaggaggtatgatgcaggatataaccaaaggaggctaggggttcttttgcataaagctagcatttaaaagcagtagttgaaagcagtaaaacagttgtagtaattatcaatattaaccaaacactgtccaacgctacaccacgttgcaacaggcccaaccaaccacctgaactacacccgttcattaagctaaactaggggtgagactaatcacggtgaatctggttgatcgcccataaccgcgggcacggctattcgaatagttttactctggccagaggtgtacaactgtacccacaagacacgattccacacatgtcgccatgccccgaagtatcaccatgatactgcaaagggggaaatcgtgacaagaccctccacataaccctcccctaaccatccacaccacgctaaggtttcacccccacccctcaaaaggcagtggcggtcccctcttgcgccgcagtgaatccggcagctggacaaccggacaccccggccgacccaactccatcacgcccaccctcgccaccggtgcctaggaaagggtcgagctatacttcagatcaagcagttacccactcccgcttggggtaagcacggtaagtctcncagggtttcccgtgaaccggtccttaattgccatgggtgcgaccagcaaaaccatgcacccacagcccaccattcagtgtattttaattaaccaacacccttgcggtggcaccaatccaaagctattgccaataatcaaagtctatgctttaatgtgattccctttttgtgtactagtagaactaagcatggctaagcatttcctaaatcaacatctagtcattttaatacccaagttgtcaatggcataaggtaaacaatatatggctgagtagtaggacccatcccacatgatattgtaaaagaatgcaacatttaatagaaatgcgggatatttgtaaattgggtacaatatgatcaaacgtattgcatgacttgccttgctctcgcactgatgagacctcagtaacgtcttcgagaaaccgcggatcgacgaaacggccgaaatctacgcgacaaacaaagcacacaagcaaaacatgctataagactactgaaacaggaaacaaaactatttttaatggattctttgcatttttcttgatttactgagacttgaatggacttaaacggagctcggatgaattacttatgaattttagaagataaactgtgtttttactaataaagaaaaagccttaatcactttattgcgcaataaagcccagggctgacgtcagccaaagggggggcgccggcacgtgggccccacgggtcagcggctccaaagggagggaggtggcgcctggcaggtgggccccaccaggcggtggctcaaaggggaggcgagggaggcgccggccgggctcggctcggcctcaaggccgaccggccgaccaaggcgaggcggcggcgaggcacggccaccgacggcggtgaccggcggtgcgggaagcggcggcgacggccgaaaggtggcggcgcatggccgaaggcgacggcggcggccgaagacgacggctcacgcgcggagggcggcggcaacacccaaagaaggggaggagaggagttagggatggagaggacgaccgcgacgacccaaaatggccggccggagatggaaacaatggtgagctcacgagggaatcggagctccggcggtgattcgcggcaacgaagcggcggccgaggtgcgggctggctcagtgagcgcgacggcggcgactgcgcggcgcggcggtggctatagtggcagcggcgcgcgaccggagatgggcggcggtggcggagctcgggtgtgacagcgcgggtgcggtaggggatgtgggagaggacggcaaatgggggaaacgaaagaggggactcggggcagcgatttataggtgcggaagggggcggacgtggccggggaggtggccgaaaccgccggcgacgtggggtggagagagagacagagtgccgccctctcgagcgcgtgcgcggggcaggagcgacagggcgtgggcggcgtcgtggggaggacgcgggaacggcgtggcgtgggcgcgggaggagcggaggaggtggggcggcagcggcggttgccggcgtggggcggcagctggaggaaggggacgacctgacaggtggccacctgtcagcgtcccgaagagagggggaaggggaaacgggccggcccaaggaaggaggccgaacacggctaggcgagctggatcgggccgacggcccaagaaagaaaaagaggaaaagaaaagggaaaaaggaaaaaaaaaggaaaaaggatttttcctgggattaaaatattgcgcttgctcatttttaattggttaaaattatttccaaggctctgaaaattccactaaaaatcttgttaatgcattggagcatggggaactcaagaaaaattccaccatgctatttccgattattaattgcatttattaattagagaattagctctaggttaattaagataatttcttcggacgatttatttagccaatttttaaagcaaggagagggggaaacttcagggcgtgacacgcggcgacgacaatggcggcgggcggcagcggctaggtcaggcgaggcgaatccggtgcggtggcgagcggcgtcgacgagctcgggcgccggctggtagggttttttttttggacttttatttttttcgcgattttttctttttgtatgcggttgacttaagtgcccgcatgcggattttcgcatgcgttcggcctagccgcatgcaaagatcgccatctttgcagacgatttggcacatgcggttggcgctaccgcatgcgaaaatcgctcccgcccgtatgcaaaaaccgattttgtagtagtggcggcggccggcaggagaggatcagcggttcacggcggccggagggcgggagggagaggagcggccgtgcccccgtgctggcgaagggggcggccgacgggagcaccgcgagggaggaggcgagctcgtcaaggcggccgacaggagaggagcgacggcgcgtggggaccaacgggagatgaggcagtgcgcgccagtcgacgggagggagggagaggagcggtggcgcaccggcgggagaggagcagtggttcgccggcctctccaccctggtcagtatccctgtctcctccctccccgcccgtcactttgcaatctagtggaaagctagaggaaatacaaagagtggaggagtgggtcccactatttttattttttgttttgactgacggatgggtcccgcatattttattttattttattagtttttgttttgctcacgtcaatgcaagtaggacgaagacctagtcaaaagagtcacataggcgtcacgtcgaccaaaccagggtcaatactgccaagcgacctcgtttggactagttttgtaagttggaggacgggttgtaaccggttttccggaccgagaatgaaaatcagactgggcaacaaatgcaagtacctagaatgaacttattcctcctgctgttttgttctgttccgcaggcctcggcctcagcaaaggccggttatgttcctccctctgtctcacacggcccaccctggctgctgcgcgtctccgagcggcgcgatgggccgcaccacccgtagtccttcccatctgctcggtcgtccctgaggcagggactgcccgcagatcgcgtctcgctgtctccgcgcggctttgggccgatccactacgcagccgttgttcagttgctgcgtgcgtttctctgcaacatgccggttagaagaatcaagaatatacgataccaaaagcatgaatgtatagtagggaagtttcatcactcatttatattgttccatttatttattccatttgattggtgtcgtcgcgtcttcttttcatctacttttgtttcattctattgcatttggactttgtgtcacaaattatattataagtgaggcactaataaaaaatgtgtttttcttggcaccttctttcttttttttcctctagtggataaaattcgaaacacttgtgaaaatataactgaacgcccttgtttaatgatcactagttgtcgtcttaaaacaattgcctgtaaaaatatccccattttcacaagctatcttcctagccaactacttttgaaaatattttgtcaccatcggttctgctacgcaattgcgtgataaataaaacgcttcacggtattaaaaagggttaattggatccatgtcactgcaaatatgacatactaaaaaaataccactactattcttgaaatttgttgcgtgccgctagaatttttaaaaaattagaaccatgtcactctgtagatggatgccaagctgtctcgccagtgacctcgagcctccgccccgatatcaaagacgtcaccgctcgtggatgctgctattgctattcatgcggcccaaagcagagccaccccttgaggcccatgccgcagatgccatggacactaacttcctccttagggttgcggcagctttggcggcgacgaggaagagaagtagaggaaggaccagaaactcttcatccccgggctctcagccgtcacggaagatggcggagggttggccactggcacagcagagggaccgtggtgtgacgtcacagacctttctccgctctagcccaccgccgaggagtagagcgggggggcaccgctgcacggtggaagcatggcgactaggtagagggcggatgttttggacgccgagagggaagaagaggctggagtgctagacttggacgagaacacgagcctgcccagcttctcccgtaggcagtaggcacatatccctccgctagccatcgccaccaccgcttgtagggatgctcgctagcttcgctgcagtactgaatccatccaggcatgctgccactaccgagccatcatcctcatcctcatcatccactcctctctccgcttcagtaaccttctcccccatccttttccttccttcttggtcggatttaccaacagcacaagatccttcttctcttcttgatcccctatgctgcacgacgaacggacgaacaaaccaatctatgcaagacgagagagaaaggatgaaattgaatcggtgatatagcaacaacttggcatctatctctatgacagaaatcatgacggagtggcatggttcaaattttcaaaaatttcaatggcacgcactatgtttcacgaataatactggcattttttttatatatgacatgtttgcaatggcattaatccaattaatcctattaaaaacacgacatataaaaactgccatctctctccaccttatccttatcgcttcactctccccaccgctcatcccttcactccccaccgttcccatctttcttggtctctctttgtcacaccctaattttcgttcgggatcaaaaattattaaatagcgcatatctagaaattatgtaaaagttaattttatcaagtaaattaatgagggaattaaaatttccttttaaaatcatggccgaaaatatttttgcaatatcctttgtgccctaaatattctctgaaatttctcttgaatttttggagctcaagaagtaattttaaataaaacaaagttcattaaatcaattaaattaaattgaaaaccattaaagttctcccaataaaggtgcagtgttaggggtaccccaagacgatgaaaagatggatggaatatttgagagtgatatcatatatggattattagaactctataaccttgaaagttatgtggaaaatagtgaccggaaacaacaccctagtggtgtgaacatggatcaagaatggttttacttaatttaaggcaacagttatagcttccagaaatcatttcaatgcctctcggaagttgactaagaaatcattccatacatgggtcagaaagatacaagggtcaggtccggaaaggtttagccagcagagtgtacgacagagaatccttctcgataaatcatcccaactcaaggtttgaaagtggagttattatgatcaaagagaaagagcagaaactcttgatagcgccaaagtcagtttccaacagtcatacagattgcagtatttgttggaaagcaactttagagcttatagtctatcaacccagaggagtcaataaaggataagcaaagaagtgaaatgttatatcgaggaaataatcttttgagcttgatctattaagtgatcagtgcttatttcaagatatcaactaagcagcccgttcaaccagttgacaccgaagtcagggcagaacagaacagtcatgcagatggaaaggtcaatcaagagtctgtatgttcggaaactgaatgagagtcacttttgtggaacttcctgtcaacaactgatcagtgttatgttccaagccctcttggaatgaaagtgcaccggcatcaccttatttgaactgattgatgaagcgatgagttctccaagtcagggttccaggaaaataaccgaagtttggttattttcaaggatagcagtttaattgatcacggtcaggcaaatgctcaaccacttgttttaagggtaagtctcgaagatgatttttgtcatgccccgtaaccgtttcaattggatgttcagataagcagggaaagaacagttatagctcaaagaagcctattgccaagttaacagatttaaatctaacgtgtacacccgggctgccgtgtcaacagttcagcctacagaagaacagggagaaatcgtaatccaggtgaaatgccgatcaagcaacttcttcaaatacttgtttccgggtcaagagtagttcaaagcaaagtaagcatatgaggattcacgaaagtcagtgcaaaagatgcaccaattccttgtcagcaaagtgagttatcagtttatcaagtatgtcagcactaacagttcagtccaagatcgaaattaaatggcacaagaaactgcattatgccgctctcatgtaaatagtattaatagttagcgtaaataatatgacaatataaattattccttcgtacgttaccatggcataagtgaattagatgtataataaaagaaagaaaaaaacaaaacctatattatgtttgcgaatgatggttgtagacgagtttacatataatagtgacaaagtgatttttgtttgcatgtgatagacattaacattcagtatattaaagtctatgttctatttcacgttataaattaatattttcttcttgcataattataacatattcttcttattgtgtatatgatgagaactggcttcttttaatatactttttacaaataactagttgggtggccctcgcaattgcgcggttagcatccatataaaattatatatattttaatatgttttacttaaaatttattaaatggttatcttgttgtctcaagacattgtaaaaccaaaccttatcatcctcatgtttttaattttattgtttttaaaagtcacactagttgctaccccttacttctgtcatatccttctttgtttgcttgctcgatc

SEQ ID NO: 2096 - DNA, 1065 bp, Oryza sativa
aactcctattgcattcagcagaccagataaacttttcttccttcttcaatagttgtgtcattggcttggcaattttagagaagttctcaatgaaccgacggtaatagcccgcaagtcctaagaaactccgaaccagagtgactgtccttggtggggtccacttggtaaccgactccacatttgctggatccaccgctactccttgagcattcacgatgtgaccgagaaactgaacttccttaagccagaagtcgcacttgctgaacttggcatatagctggtgctcttttaacttttcaagtaccagccggagatgctgctcatgttcttcctcggacttagagtagataagtatgtcatcgatgaaaaccacgacaaacttgtccagaaattccataaacaccttgttcatcaaattcatgaagaaggcaggtgcattagtgagtccgaaagacataactgtgcattcgaacaacccgtaccgagtgatgaatgctgtctttggaatatcctcttcgcggatcctcaactggtgatagcctgatcgcaggtcgatcttagagaacactgtagctcctttcaactgatcaaacagatcatcaatccttggcaacggatacttgttcttaatagtgacctcattgagtgcgcggtagtcgacgcacatccttttggttttatctttcttttccacaaaaataactggagcaccccaaggcgacgtgctcgggcggatgtatcccttctgtaactgttcatcaacttgcttcttgacttccgccaactcgttggctcccattctgtaaggcctcttgtggatcggtgcagttccaggtaccaagtcaatccggaactcgatatccctttttggtggcattgttgtcagatcatccggaaaaacctctggatactctctgactatgggaatatcctccaacttcttagtggttttctccactactacctcttgttcttcacccgcagcctggtttaaactgatcactggcttctgcggcactggagactggaaggttaccacttctcctttcacattggtcaacttga

SEQ ID NO: 2097 - DNA, 576 bp, Oryza sativa
cttcggacgatttatttagccaatttttaaagcaaggagagggggaaacttcagggcgtgacaaacctaccccccttaaacggaatctcgacctcgagattcggaagagctggcgaagaggtgcgggtgggtggccttcaactcatcttctctttcccaagtggcttcttcctctgagtggtggctccactgaaccttgcagaatcttattactttgtttctggtccttctctcgctggtttcgaggatacgagttggcttctccgcatacgtcaagtcttcctggatttcgatttgatccggacttgcctgttcctcaggaactctcaaacatttcttcaactgggagacgtggaacacattatggatgccaagcatgttggagggaagctcaagctggtaagcaacttcacccctgcgttccaaaatccgatatggtcccacaaagcgtggtgccaactttcctttggtttggaagcagtgtactcccctgagcggagtgacacggagatacacataatcccctgcttggaaaacgagctcccttcggcggttgtctgcatagcttttctgccg

SEQ ID NO: 2098 - DNA, 4483 bp, Oryza sativa
tgaggcacatctggagttcattctactttacctttggcatccgtcaacccagcagcatagctcttatgtttggtagttggtcaaataggtttaatccaagaatccaaaagttgatttttgtgggtatagctgcaatttgttggacggtttggctgagtgggaataatgtggtttttattgcttacaattttaactcgtttttgcaagtaattttcagcgtagcacattgggcaaggctcttgtcactgttgtgaagttgatggcaagatggtgaaggcttattacaagctcctcgaatcaagagtgctgaagttttatgctgcatatggctggaattttaagagaaggattcacgcttagttctgtttctttccttttgagtgagcatttgtttgatttgatattgaactccccatattctgggtgagtctatgtacttctttccataccttttggttatcactactagaaaaagcatttttcccaacgtaggggtattattttcacagtcggacatgacctttgaagccaaacgactgcctacaaaaatataaatcggggtgaagttagctgttcgcagacggaccacttaagcggcgcggcggaccacttaagcgacgcctgcgaaaatcaattttcgcaggcgcatgttaggtggtccgcttgcaaaaatagtacctacctccttatcctctcctcccccatccttatcctatcctcacctctcctctccaccactcatttccctccccacctctctctctctctctctctcacttagaaaaaatctcctctccacccccacctccgccgcggctggctccatcctcggctccccacccccgccgctggcgacgacgacgaccgcgacgccgcctccacgcgccggcgacaacgacgaccgcgacgccggctcccctcctctcccaacgtccgcgcgccaccggccggctccctcctctccaacgtccatgtgctgccggctccctcttcggcgacgacgacgaccgcgacgccggctctacgtgccgacggctcccctcggccacgacgacgaccttcgcgccgccggctcccctcctctccccacgtccgccgcggccgactccctcctcggctccccacctccgccgccggcgacgacgacgactgcgatgccgcctccgtgcgccggcgacgatgacaaccgcgacgccagctcccctcctctccccacgtccgcgcgccgccggccggctccctcctctccaacgtccgcgcgccgccggcttcccacctccgccgccggccggctccctcctcggcgacgacgacgaccgcgcgccgccggctcccctcctccccacgtccgcgcgccggcagctccctcctctcccacgtccacgacgagcgacgacgacgacgacggcgctgacgaacacgacgggcgacaacgaccacgacggcgccgacgcagcagctcggctcctccctggccggcggcttccatggtgaggccggcagcagcgcccgtgttttgtttttattttttttaggcccgcctgcgaaaatggtctattttcacagtcgatgggttagcggcggtcctcctccctgcctgcgaaaatggttttgggccgcctgcgaaaatcctttttctagtagtgtatgtgtacataactgtggatgtagtggccgggttttttgtgaatcacatagttttttagccaataatttgaatggaactataccatccacagtgaaaaatgagatcttagtcatcgattgcaagattgtagcactattacgtatagtatcatgtttcatctgtggtagcatcgtagatcaaaagtgcaggtaatagaaagctatgaagatatcatatggaagttgtattataaaactgaagaactccatgatgaggcatttaaaaaaaatagttcagggtagctgtaccgtacatcttcctgttttgaaaagagtatagtataatgattatactcctatgtaagatgtacatagatcactgctaacatacaaatcagtgtgccctttaacacatatcaagagataattaaatgtccaaatgccaacattcaatagccaaattaaaacccgtttacagaacaaatacagagattgctacgggctttgaaagacatatagtttggatccgataacgatccactgaggcatgtgtcattctacagtttaactcaggttggaggttactttcaacggatgaaaattattttggatagaggaagacaaaggctgagaggccactaaaaaaagagaaaagggtgagaggagaacgcgagtcctctctgggggaagagttcattacggagctactccctctgacccataaaaattatatttctaactaatttaggacaaaacagtaggattagaaaataaccacaatgacattatttaatgaacccattgcatacacacattccatatatacaaatgattaaaaggaaatttgagagaattaacccatataattagcatacttaaattacaagctgagagaacttaaggaaacttatctagatgaatcaatttgctgggccccacatggctagaaatataatttttatgggacaaagtcttagagatagaaatgtaattttttttgggacggaggtagtacgatcctatgaactcagagaagtcaagcgttcattaagttcattttatatgttaatttgttcaccaaaaaaatgttcaattcacacgaatatatatcattaaaggaatcatcatttttcaataggacttaaaaatggtcaggataagtgggatacctgatcccgaaaggttttatctattcaataataacttgtataatagctaaaaaatatatcgaggcaaagaaaaaaaaagacgagaaaacgtttcaaatcgatcagtacttctgatgtttgattaatcgctagtttcattttatccgattgtagtttgggatatggcctccaaataaattaatgtcggcgatgtcaaatgccataaatcaataaatatatttgtgatttggctattgctaagttccaggtgactgaaacttttagcaatttcacgaagtaagcaaaactcaactgggtttttctggtttttggtgatggaacttgctcacccggttttaaatcctaaacataacacatgtgctcgcatttatggctaatgagacgtccgtggtgatttgtcaatctcaaattaaatatatcaacctaattttttttgaaggttcacatagggggaagggtgtgagtttctgcatttgtagggctgaatattcacgtgttgtgattgcattgttagcatttgtactatgttttaaaatgaatatttaaataatttcaatcgcattcagcctaacacccaattcaaggaggaggggagggactcactagtgatggcgacttaaatttctagagatgtaggctggaagtgtgcgggatcagcggtgggggtgaggtaggccatggggttagacgccataactcggaatatgagccctagtacaaaactcaaatgagacttatacttattaccagaaaatgctttatactattacctatgttctaaaatagaaatttgttactgtatatctgaataagagtatgtctaaatacataaccaaaatttgttatatattgagactgatggagtagtaaatatcaatttaaataaaagagtaaattgcatcgatgccggtggcaggaaaaatagttgcgtcttaattaatatagtaattcagttttctttattaaccggaaaatataatcatttgcgccaagaacgcgcgttaacagtgtcgttaactcgttataaactaactctttgaggttttgatgattatcaccaaatatttgttgaagtggaagaaaacaaatcgcttatagccaaatcactagagtaaagtaggaaaacttttaaaaaatataaccggagatcatttttttaaaggactcagacagtacgaagttcatattgatagagtagaaaaatattacaagattacaatcctgagaggtcatagccaagaaaatgaagaaaaaataaccacggcccacacactaacaacaccaacacacgtaatcgagagaaggccagcaagcacaatcgagagaaggccaacaaaaaattaccttgttgctaagttggcattttagatgaaacttttgctggctagaaagcacaattcttgtacctatatgcatagtattaagtagttctttaattaaaaaatattactgttataaatgtttattggtgataaacacccctctcaatatctgtaataaaacgaagtgtttcaccatacagtaatttaaattaatgccaatattttttgagattaataaatgaaaaaatggcacacaacaccatgtataataaaagagttgaaacttgaaagagcagtgcagattaatcacaccactatccatccattattagttgatatataatatgcccattaacccaagtcaca

SEQ ID NO: 2099 - DNA, 630 bp, Oryza sativa
  unsure (1)..(630): unsure at all n locations
cagagtatcatcatctcagatacaagctgcattgctgggttggattggtcttcaacatatagattaatgtttggttcaggatcatcaggatttgccaccttgatacgtgggtctatcatagcagtatcaatcgaaccctgtgaacttcagagtgtcaattttgtcaaataacaaatgcatcgtagtactgatgtaatacttcaaaaagattttgaaaatacaggcttgagctaattggtaagtggcaccagtagtccagtactaatggtgaaatgaacagccgtggcattcattttgtagaccttggtctaggaaaggaatctggaagggagttcccttgtccatagaaaaccatgtgtatctcgctttataagaaaattacaggtgcatttcattctgctttcatttgctaatcacagatgactcataaaaagacaatgtattgataacttttgaaattgttttaatacaaccttttcccccaggncttattggggggggcgagggaatactaggctctttgaatggttcacatggctcctataaataaagtccaatgatatttgaactacacttgagaacatgcttgatggtgacattgacaagaagccaactttcgtttatgacttg

SEQ ID NO: 2100 - DNA, 1613 bp, Oryza sativa
tacagttcagcccagatattagttcatttttgtttcagcttttgcacgattatgtcaccatgttttaactgcacgtttcctcatcgcaggacctcgtctgccttcgagcgcgttcgcaggcacgaccggcgcttccacgagctccgcaggggcgttcgccacctcttcgggcgcgttcgccagctcttcctctcacggagcgtcgatccctcgcccacacggtactttactttttattaatactgttaaatacctgtacgaaactgatggtccttgtccagcaggatttgcagccgggatcttcggtactggggcctcttcgtctcaagccggtaggactggtcctactagccagttctacgacgacgacttgcacggtgcagaccaccacgacgtactaggctcctctcagcttggaggagctccagaggcgcacactcaggagcagccagaggtcacacctgtacaggcaggacgggttggccgtgccgtacccccggaccgactcacgtactcccacgggcacattagggcgcagggtaggagggacaggggtaagaggcctcgtcagtagtgttctacctcttcagtccttatgtgaccgtttcttttggcttacaaacttgtaaagcagtactacttttgctattactactgcagtactacttgtgtttgtctcgtctacatagttcttttcattcatatggtgctagaacaacttatgctcacgacaacacactttcggcgctgcacggtagtgtcagatccagtagcgcgcacagtccacaacagcacacatgaaaagcggcagctcgagttatcactatcaactttcggcgctgcctgtttacataaagtgaatcacgcccacgcgtgatcgtcttgtcacatctaatgaataatgtatctcattgagttcacatatattgcagtgaaaacgacgctatataattgacaatctgaaggcaacctcttcatattttctttcccactagcacacaacacacgaaaatggaagcctattcattggtaatacgtaatctagatttgagattatgtagaacattttcactacaattttacattttggcagcaaaccaaatatgatcaaatgcaattttaccttaccaaatatttggtcgtgaagaaaaatttggcactaacaatccaaatatgccctaaaaattaataaaatatttgtacggtaacaaaatatttgtacggtaacaatccaaatatgccctaaaaaataataaaattgtattttaccagtcttggagattttaatcttgtatagttttcaatataaaaagatttgataactattgatatttatacaaaaatatagagcacagtacaaaatcgccctagcggagggcggcaagggggccgcctgcaaaattccatgccccctcgccgcccatttgcaggcggccccccgcacagtacaaaatcgccctcgcggagggcggcaagggggccgcctgcaaatttcgttgacggccgtcgcccgagagcgaacggccgtctgccacgtcattttcgccgccctctgggagggcgatttttaaaaatcgccctccagagggcggtaggcgactacttccgtcaat

SEQ ID NO: 2101 - DNA, 4950 bp, Oryza sativa
tattgttttcatcaggcacaatgtcaagtaaggtcacatttcagatagttcacgatgaaggaaatattagatttggtccagatggtgttgatctgtcagattttgtaatgacatctaagggcatcgataggcctgcggagagaacatttcagtcaatttatagttggttgttgagaggatttagaatagaccaagaagtatacacaatgtcagtgtcagttgtagtgagtcgtgcaacagaaggttatttttgggaactaatgccgatggacagcactgatgcttggagacggtatgtggaaatggcttttgaacggtcatggcccctcgttatatttgtgtcggtagaagagaaagatataaatgtttcaatgcaaaccgaagatgtagagggtcctatcaatgcaggggatgttgttggaccatcgatgcaaaatgaggaaaatcaaccaagggaggagcaggctatgggcatggcggatgagggggagagagtcggtataattgttgatgaaatggagagggaagattcggataatgaggaagtggacgacgacgcatcatccgatgaggaaggtgatgtaatggccactgattgggcaaatgaggacttctctggacttgttatatcagagggtgatcatgtaccttgggagtataaggagaacgaggtaattgagggtgcaaggtatgctcataaggatgagatgaaggaggcggtgaagcattgggcagtttccttgcagagagagtttagggtggtcaagtcaacaaattatgtgtatgaagtgaggtgcatgaaggaagattgtccgtggcgtgtccatgcatataagggtaaatggaatgattattggaaagttagcattgtgaccgagcacaagtgctacttacaaggggtggagaagtatcaccgaaacatcacttcagcttttgtggcaagtgagatgtacagcagtgttgttggtaacattggctttgaaccaaaatcaattattaggcacatcgagaacaaattcaagtacaccataagctatgcaaaggcctggagagccaaacaaaagatcattgagatgaggtatggcacatttgaagcttcttatgataatttgcctcgtttgttagccaccattgcccagaggaataataatacgtactatgacctacatacatttacatcggttgatgatcgaacaaagagtgtgctgcaaagagcctttttctcattgggtgcttgcatcaatgcttttgtgcattgtcgacctgttctatgcatagatggaacttttatgacaggtaaataccgaggtcagatattgacagcaattgggtgtgatgggaacaaccaggttctacctatggcttttgcatttgtagagagtgagaacactgaaagctggtactggttcctagagagagtgcacattgcagtggtgcgtatgaggcccaacgtttgccttatacatgatcgtcatgcgggtatgttgcgggctattgactacttgcagaacggttgggatgagaagggacttccagctaagtggcctgatgttcggagtcggtggtgcatgcgtcacatgggtgcaaatttctacaagcaattcaagaacaagcatcttatggagctctttaagaggctctgtgcacagaaccaagagaagaaatttaatgagttgtgggacaagttggatgagttgacaacgaagcaaacagatgagcaatctcgcagaccactagttgaaggtgacgagcctcccatacctcttggtgcattacatgatgacccaccaacaatgagaaggaggtcagggtcgtccatcagaaatttcactcagtggattgagaatgagcctaaggagaagtggtctctattgttcgacaccgatggatctcggtatggcataatgacaaccaatttggcagaggtgtacaactgggtaatgcgaggagttcgggtacttccattggttgctattgttgaattcatccttcacggcacgcaagcgtactttagggatcgatacaagaaaattggtccgtccatggccgataacaacatagtgtttggcaacgtagtgacaaagtacatggaagataaaatcaaaaaggcacggagacatcgagttgttgctcaaggcacacaagtgcatcggtatgaaataatgtgtgttgataggagcaggcgtggtatctatcgcaagcaagccgtgcaggaatgtgtcttgaaggcggatggtggatgtacctgcagttgtatgaagccgaagcttcatcaccttccttgctcacacgttcttgctgctgccggtgattgtggcatatctcccaatgtgtacgtctcaaattatttcaggaaagaagcaatctttcatacatggagtgaggagatatatgggttcgggatctcaggatcttacacaacgctgagtgcccaagttttttatattccagatccatctaagttaagggtgaaaaagggtcgacgccaaactagacgcatcagaaatgatatggatgagtcagaagcaggtgggaggactttacgctgcagcagtgtgatctgctcggccatacttacaagaaatgcccgaagaatgcagaagttccaagcggcgcagatgctagtccatctggacaggcaagtgatggtaggcgaccacctggtgaaggaacaacaagcaggcgcgcaagaccaaggcgtcgtcgcgcagcaggcgattccatggtgtaacaatgctttcgatttaggaaataaaatgctgttgtgatgtaatgagtgttcggactaaatacttctatcgtgtaatttcaattcaatgttgttgtaatgagtacctccgactattgttgtactagtagtattgcgaattattcggtgttgtatcataatgttatcgtgatgagtgttcggactaaacacttttgtttgtttgtactcttgtttaatatgtgttagtaattcgcttatgaacatttattacttatgttgaactaattatttatatgtttctgatcaacctatttgatgcaggtatggcgtacgacacaccggcgctgttgaaccgtgggattgacaagaaccaccgctcgttcctgtcagcagtcgagggtgcacagctcggcaccttccgtccacgcacgtcgcgcgagtggttgcgtgtcgacccccgtcacgttccttggtacgcgtatgttcacatttcaactcaactttgctttgtgttgtacttatgtttgaagtttgctctatacaggttgcgtgcggcaggccttctaccactttgtaggcttgttgaggcggcggcggacgaccgtgacccagcgaagcggtgggatgcagaccggtcactccttgccgctcttatagaccgctggagacctgagacgcacacgttccaccttccctgtggggagatggctccgacactgcaggacgtgtcgtacctgctcgggctaccgctggcgggagcagcagttggtcccgtggacggtgtttttgggtggaaggaggatatcactgcgcgcttcgagcaggtgatgcgccttccacacctaggaccgaccaccacccttcctccgtactctacagtcgggcctagcaaggcttggttgctccagttcactgtaagtaaataagttgttattatcatacgtgcttatttgcgaccgaatgagtgttttgtactaacatttcattcttaattgtaggcggaccttctgcaccctgacgctgatgattactcggtccgacgctcccttgaggcgtacctgttgtggttgttcgggtgggtgatgttcactagcacccacgggcacgctgtggacttccggctggtccactacgcacggtccatcgcggatgctcagccacaggacgtgccgcagtggagctggggttctgccgtgctagcagccacgtaccgtgccctctgtgaggcgtgcacgaagactgacgcgggagcgatcatcgctggctgccctatgttgcttcagctttgggcagccgagaggtttgccataggtcgaccagtggtggacagcgcaccctacggggttggtcgcagcgcgcagtggccagaggacggtcccacgatggggacttactggtgtcgacgtggggttagtgcaacttcgctgcgttataagtttatcagtcgtctttttttttcttcacataacatgtctaattccgatcatgtttattgcagcgtcgttacgctcacgtccaggtgagacgtggttacccggacttcgtgttcgagtttgaccgtctccagccgagcgacgtcatctgggagccgtacacagaagaggccgtcgctgcgagagcaccgctaggactttcgtccttgtgcacacgcgaccaggcttactggctcaccatcctgccgatggtgttcgacattttcgttgagcctcactgcccgcagcgtgtgatgagacagttcggacttaggcaggtgtttccgggcaacgtgcagccgaccgtcctccctgccgaccactcgtgagttcggattgttcatttctaaatttttatgataattacttcatcgagccatataatttacctctcttcacaggttgactcgacggggacagctagcaggcgcactttgggctccacgtgtacagcagtacgttgacgactgggtgttagctacagaggaggtgatcaacgagctcttcccacacacggaggagaactaccgtgactaccttcgctggtaccttcctcgcactcgtgcgcgtgtgaccttcactccagacgccccagagccgcacgttgccgctgtcacggacgcgtatcccacgcaccgtgaccgagactacttcgtggcggtacgtccaatttgtattacttcttacaattatttcatttatcttgcataatataggacaactactgaatttgttatttccatcttgcataggctgatgccgcacggg

SEQ ID NO: 2102 - DNA, 743 bp, Oryza sativa
ggatgtgtttgagatccgttgattatacggctaattcgagctcggtaccaggcctcaatctactatcgtacccaactttgcaattggaaatattgctagctaatcgaatttgtgttgctcaaactacttccatgtttgaatgaacaacgaaatgttttgaatgaggaagtaggagcattatccatgtcaggtcagaagatttatactaaaagctagaaggaatgcatcttaaaaaacataagggaatttacctgcatatctccttttcttgttagctcttcttcttttgcgctcagcttgtgtaagttctgcttcttctttaacatcaccttttccttcaaaaatttcttcaagagcaagcattgcagcatctgaaacagctacaggtgcaatctgcaaaaagagagagaaatcatgacatgaaatgctcaaccgtataaacatcatggagaaatgaaggattttatttacctcctccattgctagagctggtacatttgtttgtatagacatatcttcaatgacctgaaaagtgaatatttaccttgttagttaacttcgctgaaagaaattacaaatttaagtaaaatatctggtcactattccataccggctttggagcaaagtgtaaatgagatagtgcatccaacctcaagcatattctcttaaataaggtctttgccctagtggaaacagaagtttgtcaatgcagcaagcctctatatcatcacaggggaaaaaaa

SEQ ID NO: 2103 - DNA, 739 bp, Oryza sativa
  unsure (1)..(739): unsure at all n locations
tggacctgagaatccgttgactatagggcgaattcgagctcggtacccatagcagcagatcgtattgggaggaaaccagttgttgtgtttggcattttcgcggtgttagtgatatttttcctcctctatatgaaataatagttgatatctggcacaacctagtttactccggtatagcagttccttttctttttattggtgtttgtctaactaagttcttggtataatggaaccagggtcatatttaatacgctatttgggcttagtttcacctattggatggcaatagctacaagattccttcttggtgctttaaatggtttacttgggccaataaaggtacaataaagttgaaactttcctttgttgtacttgtacctggtcatgtttttttttcctccaatgcttgtacctggtcatgttgatcttgatcaatttatatttgtcctttcaagcctatgctattgaagtttgccgacctgaacatgaagctcttgcattgtcacttgtaaatacatgccatactgntctgntattaatttttttctggttaaattgagttgattttgaatttttttaatattaggttagtacggcatggggaataggtcttataattgggccagctattggaggctacctttcacaggtatgtcacagagaattgaacagtgttagggatttttttttaacaatggggctacatttaatacgatttcttttatggcagcctgcagaa

SEQ ID NO: 2104 - DNA, 763 bp, Oryza sativa
  unsure (1)..(763): unsure at all n locations
tgaaaaatctggctgaaaancngctgaagtaaacctactcactacaaggctatattagagctcggccccctacatcctctgtcaagcctaataaaattttcctatagtgtatgtgtaatgttttcgggcttgtgtgaggaggcggcttccactcctcactctctcttactataactcttcttcctttattcaatgcatgaggcagtgcccctgccctttcgcaaataagaaaattttgggtactagagatggaaatcagcaattggagaagctgctttcaattgtccaactctgatcacaaagagttagtcttcttagtaaatctattatctttcttctgtctctctctctgaaacattttttctctcatttcaatatttattatcttctttcgtgtgtaactaattatatatgtatatgtagtgccaatgcacaattgtgatacttttttttaccacaagcggcgccagtgggtccgagaggaagatttggctaaagcattaaagatttcctctaagcaactgcgccgcattctccagttttttgaagaagagaagctggtgagaagatgtcatcgggaagaggttagaaatctctgagagaaagttgntctcatttttgcatagcccttttttttttattctagcatggnaatcgccatctactncacttaaaacagaaagtgntaatttattagtagtttctgaaagcaagacctgatagaagagtgagacaacgattgcggcctctcagtttgcactgt

SEQ ID NO: 2105 - DNA, 596 bp, Oryza sativa
ccctttttttttttcctgaaatgtaccagaaagttatcttgcattttcgttctttggggaactgcaacgaaatagtctgcaaaactagaacaagacaaaggaagtacttccccaacttaaaatgagaaactgccatcaaggccgaaactcaatcatacctgcagaaggtttgagcttgagcaacccccacttgccttacgtatcaagtctgccttgcaaagcactgagagatcccctcataatttccccaaagcgtaaccatgtgtgaataaattttgagctagtagggttgcagccacgagtaagtcttcccttgttattgtgtagccagaatgccgcaaaacttccatgcctaagcgaactgttgagagtacgtttcgatttctgactgtgttagcctggaagtgcttgtcccaaccttgtttctgagcatgaacgcccgcaagccaacatgttagttgaagcatcagggcgattagcagcatgatatcaaaacgctctgagctgctcgttcggctatggcgtaagcctagtccgtaggcaggacttttcaagtctcggaaggtttcttcaatctgcattcgcttcgaatagat

SEQ ID NO: 2106 - DNA, 1791 bp, Oryza sativa
caaagtcagggtcaatatcactaccattacccataattggatgctcatgattttgtatctgacatgaccatgaactcttgttctgcagcgtgatattcgggatgctgattgctctccccatcacattggtctactacatactgctggggctctgaagagctctccaagtctcaactcaactgtgcaagaacttgatgttactgacagtttgattaggatttatggttctgttttagttgctcagattttgtttggatgataggtcagcttagtgatgctagttagacaattatccgaggacttttgggttcaagtgacggccagccacggtttctgattgaagattaggaacatagacatcacattagtgacaacaggcatctaatttgtaagacattgagaaggtctgtttcaaattactgacaatgtagtaagacattgaacagtgcttataagcttatttagcattccaataactgatggtaatgcacttaaaggagctactctgaaggacttttttaatctcttgagagattagctccggattttttccttttggaatgtttctttagtttgagggctctgaaaacacgaaaatagaaaaatcgtaggaacatgatgtcatgctatacaaatattataggaaataaatttattaatttataggattttgcaaaaaagtattgtttattagtagcaccatcggaaaatcaaaggaactttaaggctgcgttcttttagtttttagaaacggctaattagccgcactaaaacttttgaaacggctaattaactacacgtaaaacgataagtgtgattagtatatgattaattaagtactaatatgtaaaagaattgatgaatatatttattagattttttaaacaactttatataaaaaatttttacgtaaaatgcaccgtttaacagtttgaaaaacgtgctaatgaaaatcgaggagtagcatgaggtctagtctcatgttttctttcaaaattcctacacaatgagcaataggaattttaaaggattttggggaagtcatttctatgttccaaaagatcatgttgggaaattttccaatggattttaagggttgtttggttccggttacacttttcatcacttgccaacaaaagttgtatcactttgtttaaggtgaggtgaataaattcttagtcataacttactaagcctaagcctaaggaaactttaccatatttttttaagttattgacacgtgagacccaatttgttagaagagaattttattaactatgggtaaacactgaccaaattgattaactaatcttaaatatgggaaactggggtaaagtgtatgttccaaccaaacatcctctaatcttttaaattcccctttttttttctttttatacacttttactttgtttaaaaagaagcggaaagagggaatcttttttgccacttttttcaaagtttcaatggaagaaaaacatggcgtagcattgttgagcatctttttcatactcccaagtataacaaaaagtttggccccaaaattaaaatgctaatggctggcctgtttgctcgaaacaacaggacagaaaatgataggtgttgggagtcagacaaaagtgtttggctttaagcatgcgcacttgaaggttggagcaacatccgacaattatactccactcttctcgtctgtatgacaaaacttaacgggtggatggattctgaaagcgattaaccaacgggaatttttataatacgttgccgaaacatattgttattaataaaaatggggac

SEQ ID NO: 2107 - DNA, 694 bp, Oryza sativa
aacacccatatacggaggacactgagaaaaaagctaagtgcctttatttttcctctttatgtgatattttccattgagcaatttttttatatctactcatgctaactactcgtccagcgccggacgcctagttttatcattatttatcatattgatttttaatctcagattaatctcttgttattttttgttgttgttcgcatataattacgcggcactattgaggcgattaatgctggtcatggagtcgaggcgtctcagctttccggtcgatcggccgcgagtccactttgccggcttgtcttcgccaccgccattgctgataacaacaacgacttcaccgccggcctgcttccgtcgccgccgagtggtgcctccgcctacacggctggcctattatgccgccgctgttaggcgtctacgacttcaccgccggcctgcctccgtcgccgccgagtggtgcctccgcctacacggctggcctattatgccgccgctgttgggcgtctacgacttcaccgccggcctgcctccgtcgccgccgagtggtgcctccgcctacacggctggcctattatgccgctgctgttgggcgtcaacgacttcaccgccggcctgcctccgttgccgccgagtggtgcctccgcctacacggttggcctattatgccgtcgctgataggcgtctacgactt

SEQ ID NO: 2108 - DNA, 649 bp, Oryza sativa
tcggaaaacgatttttttggttcacaggcaatcaaacctaggtagccaagggaagtatcaaaaagagctatgagtttgagactcaccttgaccactctcctgtttctctcgcctgcgattcaacagctttgtatagtctatcaagggtgtacagtgttaacccgaacttacagcatgcctcttcctcctgtaaaattaggaaattcagccagacatttattagtacgtattgtaatcctaatatttttcaagtttgtaattcgaaagtcgaaagaaaatgactttctcatcaatacgaaagcacttcaatcttggattttcaagacgaaggtggggatgtccaatcttgaaaatggcagtttcttgttttctcatactaggtgaaggaataaggtttttgcagacaaaatacaataggaaagcgttatatactccctctgttttttcaagttgttgacttatgacatgacatttaaccattcatcctattaaaaaaatttatacaaatgtcatttgttttgctgtgacatgttttatcattaaagaaactttaaatatgacttgtactttagtatatttacactagtttttttaattaataagacaaatgatcaaacgtaattctgaaagtcaacggtgttatttatta

SEQ ID NO: 2109 - DNA, 840 bp, Oryza sativa
aaagttcatatatgtggaagtggaatccctttccactggaaggtgtagatgattcctatgaaacaatggaggaaacattagagtacaaaagcaacaaacctgagctgcattattgggaggtctgtactcaacagctggtgacgatggttccaaggatgcgttacctaaaaaaaatgcatcatgaacatgtggtaagtgtagatgccagttgagtacagctaatgaatgcacctcaaacaaagcaaaaaaaatggtgaacatgtggtatgtgggagtagcactataccagcaaattctcttgtagcaatagcatcatgtgcattctcctcctcttgcaactgcctagctaaagcttcatcagatgccaaccaggcctcaatcctgtgggtttctgaggagatatggactgaataggtatttggagttgccattgatgaacctgcaatgatttgctaattaacactgacaatacatcaagtaaatcaaacattacaaatcagaacctgtctaagaatccatcttaattcagaaaaaaactcagattagatgttcatgcttccaccagaagcaggaatgtgcaacctacacttcctgtaatttccatactacaatgtccccactgaccactgtgcctgatgctctattagaataccacatcctccatggctccatgtaaatgcatataaatttgactctttaaattagtaactacaatttaaaatttatcgaacattgttcaaatttataaacagtttccccaaatttagatgctcccaaatgtacacagctactagtaaagcaccatccagtttcacctgaacaggactgacataaatgtgt

SEQ ID NO: 2110 - DNA, 2831 bp, Oryza sativa
ttgattgacattactcggagagatacagctcgcaggcacacgagattcttctgcctttccaattgccacgaacccacatgtcacacgaccaaccaaaaagagagaatttttctttgcacaaacaaaaagtgagatttttttttcgccacaaaggtgcgaactttcttctctctcccactttccaatcaagaaacgaagcactcaaaccaagaacaaaccaaggaaggagagatcgctccctctcccagagcaaacgaaaggagagaactcagatggatgcgaactactaccttgcctctttccccggagaagcagcgaaggagaagagcgcgatgccgccgccgccgccgcctccggcaacctccggctccggcgagtccgcctcctcctcctctctcacctctctcttcccaaccgtgtggtgttcgagaagcttttatgcgagcgacgtgcagtggaagcggttgctcccaagtcaaactgatggagaccacctactatcttcctcttgttttcttctgcttttcttttctttatcttttttctttcattttattttgagcgatgaacttgagaacagtttggttgtgggttaaattaaacggtgcagaattgcaaagctacgtccttttcgtctgattaaggtggtatcagaatcctaatctgttagctcagcatttgtttttgtgtgtttaattggccatgacatcagatggttcagaccggtggcaggtcttcatcggagaggagaatgagagcaatgcaagttgcaaacaacaaacaggtccttccaaacgggttggtttcattccacagaacaggatagcaaccagagcacaaaccgttcaacaatatatatatatatatatatatatatatatatatatatatatatatatatatatatatatatatatatatatatgatttaaaattatattactatttttaggatacggaactcttaacacatgaaaatctaaacattttcaaccaatcagaactactagaaagataatctaactacttcaaaatttaaaatttgacaaataaaataactagttttttctaaagctatcttcactggacaacttatgaatatttatatttatgaagcgagtactctcctagtacatattacatatatattcttcttctcatgaaaaattaacttctcgctataaatccgaacatatattatgcgtagcaagttgttttttttaacgggtggagtaatattagagtatttaaattccttcaaattgccatccctctgggactttgctgctgttgttcttccacggttgctgtcagtgtcacccagatttgcatcctttccagctcgtagctactgttctgcatgtattggacttggattaagatcaaatgcagttgctattgtaactgcacaatagcaactgcacacaatcatgtccattcgttttcagatccaacggctctagatgactgctacagtacatgcataatagtacatctctgctacaggttttgctgcagtaccacttcatatcctggccttccgttctagatcatgtgatgtacatgtttttttgaaacaacccgcacaagacattgatagagtaggaaatgtgatgtacatgttaacggcttaagttacagttacaataacaactgcacaggatcttgatccattggacttgtataatatctcatctcgtgcttccattatcgtggtaacagttggcaacttggcatccagtgctggaaactatgccgtgtgtacatcaggatcgtcctttttgttcagttccaagatagaacaagtccaaaagatggccgtagtttttttagtcacagtggaagctgacatagccgtggaataagttctgcacaaaagttgccattcgagatcaactactggtagtagtagtcatcttctaccactgcgaatattcgaagggacacaaaaagatcaacgagtaaattagttcaccggaagacgacacattatcaccacaaaaagactaaaaacaaaaagaaattgccaggccaaaaaaggcaaaaaagaaaaaaaaagatggcacgaggcccagggctacggcccatcttgtcgccggcccaaccgcgcgcgcgaaacgctctcgtcggctctcggctcgccgcgacgcgatggagagttcgcgccgcggcgcgcgcgcgcgttcggtggctcacacgcttgcgccctcgtcctcccggccggcgcgggcgccgaccgcgcgtccgccgcatgcgcgcggcgtaggtgagcaacgcgggcctcgccgcgcgcgctcccctccttcgatcccctcctataaatcgagctcgcgtcgcgtatcgccaccaccaccacgacacacacgcacgcaccgtgcaggcatcgacgacgagcgagagcccctcggcggcagaagacactcacggcgatggcggtgacgaggacggcgctgctggtggtgttggtagcgggggcgatgacgatgacgatgcgcggggcggaggcgcagcagccgagctgcgcggcgcagctcacgcagctggcgccgtgcgcgcgagtcggcgtggcgccggcgccggggcagccgctgccggcgcccccggcggagtgctgctcggcgctgggcgccgtgtcgcacgactgcgcctgcggcacgctcgacatcatcaacagcctccccgccaagtgcggcctcccgcgcgtcacctgccgtaagaaaacgaataaaatcgatttgctatctatcgatgattgtgtttttgtagactaaactaaacccctattaataatcaactaaccgatgaactgatcgttgcaggggctgcaggaa

SEQ ID NO: 2111 - DNA, 5529 bp, Oryza sativa
ttttccacgaaagccgattgaaacgaaaccgcgaaattttgatgcgagatgaaagcagattccgagtgaaattttaaatggttttcaagaattcaaatttgaaacaggaaattagaccaaaatttagcaaaaaccgtcattaccattaagggtcaagatccgaagctcaatcaggaaggcgaaccctgctttcgaccttcttgagcttcaagataaaggggcaatttctttgccactaaaagaactcgagcaaaataaggaataagcacaaagtagaagctagagtttctgtcgtttgccctgtttgatcaaactaaaaacaaaagagaagaaaaatcagcaatgtgcattgccacaatgaaactggctcaggagaactgtcccatcgacactctttgaaacgaacaatgtcatatggttttaactaaaggtatcatcatcctataaatatcctggctccatgttgtttatggtttaccctgacattaacatcgaactcaaaaggagagaagtatcaacatcacggcatcaccgccatttcacaccgcagaagaggactctcaactgaaccataaaccagtttgtactatttttactaacaaaagcaagatgcaagtataaaaaaaaatgtaaaaacacaactttctgagggtgtccctaaccatgactaaatctttcttcactattctgtaatcttttctagaaataaggcttcctgcttgcttgttaggcccagatcactaaatgacatatcgccctcaccagtggtgaaagcacgccttgggtacgaccttacctgcatgtcacagaatggtacatgtatgagttccacaattgtctcagactacacaatttctaacagttccacaattttaacaagagtgaaaaaggaaatgcccactcaaatcaaatggtagcagctacactgtggaaatggttttccaagcatggcagtagcctattagttttaaaaactttgatttagcagaagcccttcagctaacaagatcagtagcctattagttttaaaaactttgatttagcagaagcccttcagctaacaagatcagaagtcgcacatactactagagtatatcaccagaaaagtcagcgaaggagcagcaaagaaacactttaatgtaccctgaaatgaatctccctatcctttagaagctaaactatggactcgtcgttctcacatccacaactagattcactcttctgggagtacagataaaatatatgtcgtcaaataaagggggtgaccttcaaaaaagaactaacagtagcgaattaccagtctgtaggttcctggcttataagtcctgccaatgtctaagaaatcaaaaaggaactgcaagaggaaagcatgtattagtggttatccacataaaacagaaggacagaaagtaagcctacctgaagtttatgagatttcagaaagcgacgcccctgtcgactaccatcaggcatgcggactacaagtgtgacagcaccttcctcgtctgcagctggctctgacggcaatgatgcttgtttggatgcaagactggactctagctcctgtttgcataaaacgtcaggaaccacatcacacacattacaaatggtgcagaatacaagtgcaatatgaattaaggaaataatggacaaagcctcaatggaactgcagaaagaaagcaccaggtttgtcatacagctttataagaacttgatactgctttagcgaattgcttgtcaacaaaatgtagaaaatatcaatataataatacaaaatgtcaggaaagaagatgccatgatgctaggtagtatccatctagactttatgcagagtttcatcaagtatatcaaccagcagctaagcctcaaagtagaaccctttgtaacatataaaatagagcagatcaccagagcaccaagtttcatatgctcaaaatgtgaacttatgatctaaatacctagcattcaagtattgaaaagactgttgttgatgatcaattaattccataattatttttaacgaaaggtttacctcttcctccagttgttttttacgcctttcctcttcctcttgcttctgtttttcaagggcagcttctcttgcagcagtttcttccaggcgacgaagctcggcctcctgtagggccttcaactctttttcttgatcagcttggagtgatgcaaggtattcatcatcctgtaaatcaaattaacagtcatgacaattcattgcatataccaacaaataggtcaaactaaagatcaaacctgctgctcacgtaacaaccgctgttcagttaatgctggtgatggagcatgctctacatggggataaagacttgggcttctatgagatggcattgagaacggatacatgggtccttctggaattccaccaaacattgcagcctcaagcataacagcttcatatgctcctcagaagaaatgccaccccacttttccaaaggaagaggcaaacagtgaataacatataatttaaccttagggtgaagattagtattacagaaaagaatacctctgatggaaattcatctccattattctggcgatcattcaaatttccttgaggctgagaacttgagggaggactatcgaccgtgtacacaggttgtgctgactcagtgttccagaagggatgcgtctagaacgacgtctaactaatggctgttcttctacatcttcagtctcctcttggagggtatcttcatctattggctgcctagatgatccaaccttttctgtagctaatccttgcctccgaaaagaaaggacacgtataagggatcaagtgctgggtagcaagaggattaaagagcatgttagtaaaaattaatattcaccttccagctgttccgcttgcagttcccttgtcctcttcatcaaaagaatgttctgtaatgtttactccctctggcggctgtgttattccttgctctgctgtctaacatttttgaaacaagtaggtaaggcacatgaaagagaagtttaacaaaagcgtggttgaggaaaattaatacacttgcgaataaaggatcagctgtagcaagctcattctaatcattcacatttttatatgggagaaaagaacacatggcagactaaagcaaaggagatgagggtgtgcaagcttacaattgtcattgcctcagcatccctttttgaagcttcaattgctgcccggatcatttcctcttcgatatcattgtcatagtcagtaacatgaaccaatggaggtgcagttggaatagaagggttcggctgcaatgagctatcaatattagcatgaagagaaggggcagatggctgctcatcatcatcatcatcaattacaatagccccacgaacttcaggaccatatgaagattcatgcccagtgacatcctcgataataggggcctgaccagaagggcctgtttgcgggttgctatccttaacttcgataggtatctctcgcacctctctagggtgtgaaacctgtgggccatgaccgaaagtatctgtggaaccaactctgtcaaaataattttgctgaaagtttgtgtccatcagtgcaaaagggtcacgcaaagtttcagggaacaaagatcttctaaatgcattatcaagtggtccatccaggtccatcatatcatcatgactctcaggtatattgttttgactggctctgttcctgtagaacaccagcatctcattcatcagttctagcagtacagtgtgggcatatggaaagcaatcttatatgtaaataaagttggatggaaaatagtaaaggtgtacactgtactgtctccttcattgaaatgtgcattgattgccgtgttaaggtcgccaccatgttcctgagttacagtgatgaggtaagccattataaatagatgaatatagataaacccaaaggaaaaatatcattgcagttaacaatcatttcagaggtactccctcacttactaattaatcatggtatattcccaaatgatcatcatattagtattcattaccaaagtctatttgttatttgtgcatgggagtaaatatccgcatacatccatgcacacaaccctctacaaccaacatgcaatgtcttgttttgttattatctaggaagtagcggggatggtgcatgcattgagtttgttaccggagtaaatatagtccagtatttactccaggagagttattggctttccttggtcttggtgctctcatgtaatatgatgatcaattgggaacggagggaataatacaacagagcatgtctgaggaatttgcactaagctcacttaccttttttttttcctttcctcccacacgcgactaagcccaggacagatcacactagatagaagataagcaaagcagaagagacagggacagggatggctagattgaggtgaggggcgtatggccattcgaaggtactctagatagcactatacccagctgtgttttttgtgttcaagttaaaatcaaacaaccaaatatcagatccagtaatccagcacaccggatggtagggactatggacaaaccatgaattgacagcttgcgaaaacctaactacctaagttgagttattgaacactctagatgagcaatcacaagaatttcatacaaactctacaagccccaacttgaatgcgcgtgaggaagtcatatgaaactggaactacaaatctaacagggatatggtatcaatgccaaatcaatccgagattccgtgaccaaaacccgcgctcccaccaaaatcagagcgcgataagctcgcaatcagacagagctaacgccacgagatttgttccaagcgaattcaattccgtaaaagcgccttcacagattcatcacgagttcacggcaagtaaaacaaatcgggcgcacaccacacctccacctcaaccccccacatcgcgccgcgccgcatgaacccccgcccggaggaggaggaggaatcacaaacctagctagctccacgcgaccacgcccccatcccgactcgcccaaatccgcaccccctccacgagcgcgcacgcgatttaccgcacgggattacaaggggagagatgggaggtggggaaggcggggagggggggcatgtgggatgtacgcacctcgagcttgcggacggcgagggcctcgtcggcgccggtgatgctgacgaaggtgtcgatcgcctcctgcggcggcctcgccatggttggttgggttgtggaggcgacgcgaggagaagggggaaagaggataggagcgatcgatctgtttgtgtttgtgtcaatgcggtggagcagcgatgcgccgatgattcggtatgtagttgtacgggtgcttctgcgtcattctcaccgtctcagcggtcgatttcgcgataacaaaaccaaaaccgacctttgggcatggcaatttggcaatccacgattccacgtgtggtggaaccatggaacgtttacaaagagtagagatatgtactcctactagagttggagaattttccaaggaaaacatgtagagtagaac

SEQ ID NO: 2112 - DNA, 969 bp, Oryza sativa
tacttcctcaaacaatactccatgatgaaaccaatcttacatacagaggagagaaaagaaaaattggtttggacaaaatgggaatgcatttattagatatcgtcgattgtcaattatttatgaaatgataaagctatcaagagttacaagtgtttgtaaacatatattggtggttttctaattttttgcagatatattaaaaatgtgctgcatatatacttttctcacacacaattcatgttttctgctacaatgaaccatctttagggattgtgtttactacctatttaaaggttcattggcaacaagttctctcattcttccttttgtgagttaatgtcaaaatcaatcagatatattccaattttctctttggaacaaaatgaaatgagtgccatgcagaagactgctgaatgtgctacttatattgaaacaactcatatgcaaagaggttatacagtttttatctagcactaagtaattgtcgagtcacctacatttgttgatatgaagagccaacacaaatgttgatattttccaaaaatcaactgaaacgtcgaatttgaaatcaagttgtagaaaagggtaagaaggatgtgctcatttcaaacaataggagaactgtaaactatagaaacttgaagtcttaaggacactacactaaccctgaagtcactcgccatcataagcaaagtgccaacattatctgtctggaatctggactcgtcatttaggggctctttggctaggcagcagctgtatgtttcagctttagagttgtccttagaatccatctcattgagaaagcgtacttcaattgaaatctataacttcctcgcattctgggaagttcgtttttttattgtctacaatttttgtagcaactacaagcattaggggaagcagtaggaaatcaatccagaggattatctgatgacctgatatgctatttggtgccttttaagaaca

SEQ ID NO: 2113 - DNA, 541 bp, Oryza sativa
tcctgcagccaaaaaggccttaatgaatgaattgctccaggccagtgagcagtacgcagttgattcgcagtcaaaattaaatggctttctgtacccaaaaaagaaacacgcagatccacacgctaattcgagcgtagtaaaccatctcgtgagatcttaattgcacaatcaaacaacccgatcgcccagcgtgaaacaagcgaccgcaattgaagcatcgcataacccgatctacgattcggcaagcggactccgacgcgtgcgcgttgtagagcagaggacgaaggcagggttagagagagggggcaccttctcgtcgcaggaccggcagagcgcggcctcgtcggccacgcagaagagcaccgccggcgcgctctcgcacacgtcgcagatcgtccgcatcccgcccgcgccgagccgcgcccgctgtcatcgccccccctcccccatctccccgcccccccactccctcctcctcctccttcggcggatcggtcctccccgcctggctcttcgccctcgtaatcgtacacacagcggc

SEQ ID NO: 2114 - DNA, 1186 bp, Oryza sativa
catgcggttgcttatctctcacaaatttggtggtttgaggtcagaggggaggttgaattctgcttcccagaaggtacatatagcctatttttccgtcttcatctaggcaggccactcaagcgactaggacgacgggtttatagctccgagcacatccatggctgggatataaaaccagtgcgcttccagctatcaacttctgatggacagcaagctcagtccaagtgctacttaactgatcctggggtctggatcaatcaccacgtcggcgatttcgtcgtgaagagctctaatgaactagtgaagatccaatttgcaatggttcaaatagattgcacacacacaaaaggtggactctgtgtcgattccgtggctgtaaaaccacaatacctcgcgaagaagaaagcatctcggatatatgtgtaggttcttcgatcaagttcagctgattctcatcgataccgcatagctttgtttttatgcaccacttgtgtgcttgcttttgagttttttacagatcctgtaatatgtagttcatggggtaagtgatttttatttcctcttgtccctctagaagcatgttacacttgtaaattgttaatttagcatacagatagcttttgtggctcatgatccttgacaccctgtgcaccaatgttgttcttctggtagtgtatcaaaagctttcatggagcaatttcatcctcaatttctgagttctcgacttaatgagaagtgctagtgcgttttgctcatcagtaacttctgaagccattttacacagttgtctgatatgttgctgcagttcatcagcctgtaactgttgaggttcatgcgcaaagcaacatgcttcttcagctctgctcaattaagaaatactaaatttgtgatctggttttcactttgattccagaaaatgataaattaaagcagcaaacaaaacaatattttatccatgatttaagtttacaacagcttgtggttatcagtaatcaaatttcagctacaaatcaaacgtccatggatagctttcgctctaggttgtacaggacgctggaccagtggatcatgaaagaatcaagctaaaggcagcttgagagacatcattatgcaccatctccattccttcgatatggcatgtagcgatgatctttggaggcgttcttcctccgccgcttctccatga

SEQ ID NO: 2115 - DNA, 3643 bp, Oryza sativa
  unsure (1)..(3643): unsure at all n locations
cccctgtacctactctcctcctagtacttcgtcagaaatgaacacctcacggtgctctgcctctaacctgccccacaagtccagtaaatcacacgcaaacagacagcaatctacggcgagaggaggaaacgtcagtgtcgcactgtcgcaacaaccaacaaaagcttgactctcacaccaattctaacgtacccaccagattccagaaaccacactcgggttaacttccaagactacaccgccacaccgggaggaagcatcagatgaaacatcagcattcacacaatacaatggttccgtgcgtcagcagcaacatttacaacatcgatcataatgtgcacttgtcagtatgtcaacgccattttaaaccgcgccggcgaccggcgtcggcgtcagtgccacgcgtggtgcctccgatcaccgtgctccacgccgccgcagccgccaccgtcccggacgatgatctcccccggcggcagtagcgcaaccgccttgccaccgtggcgccggtgcttgttgagcttgagcccgtccctgtgctgcacgccgagcgccgcctcgtgcctgccgtgccggcggaggatgacgtgctccgccgccgccgccgccgccaccgggtcgtcgtcgtcatgtatgtggaggacgtggtggcggcggtggccggcaagctcggtcttgtgcctcttgtgcgcgtcgtggtggtgggagtgcctgtggctgtgagctctcttgtgcctccggcgcgcgcgctcctgcgcctccgacccgaccacgccgtcccaccaatagtacagtggatcgaagagccctttccggtgcagaagccacaggactgaaagccaaaatgaggaacatatgttatcacgtttggtaagcaaagcacgcatggaaatgcaatcaacctgatgaagaagacacagcacctgcgacaagtagcaggccgtggatgacgaacttgaggaagctccagcatctcgtgctgccacatgagaatgatctacgaggtcagaaatgtgacacaaatagatgaagcacaagaatggcttcctactatatcaatacaaaacgccgcactgtctttgcatatggcatatagcttttgtcgatgggcatcaatcggagggagaaaagagaaagtgcgggctggaaggagtttattgacgcacctgcatgttgtaccagtgaagaaattaatcagcatgtgccacattttggcgcaccaggctttgatggcttcaaagaaaccccagatgccaccctttgtgtggttttcggacgaaccaatctagaaagttgtgttcaagaaccatgagtgtctgtgtgtttgattgctcaaggtactagattggacaaacacgctccaagataagttggcaaatgcttattaataggtaaccggacaatgctaaggttgtatgcagatctaaactacctcgttgcacttcaacaaaagcaaaaggacaataaattctagatcggctattataaggcatgaatatttctcaacctgtgttccattgttaagaactgtagctgtggttgagaattgggattcttttctgtcaagttcactgaaatctgacgccttcaaaatagctgcaatagcgcagaaagaaatcagatgtcgagtctcaagtctccaacacaggattatgaacagtagaatacatgctatgctctagtttatgtataactgaccttgacatgtatagttcgatgcttggtctgttgacgaacgcaaatcaaatgtccgaataagcttttcatcaggcttcatgataaagtactgctcctgtaaattgaaaaaaacagactaacttcactacttgaggagaagaaacttaatgactagtacataactagagcactaagtacaatgatgacttgatgatcaaatgtacacatcatgtacaacaacctcatacgaagaattcagaaaaaaaaaagatctagaaaactcaagcagtacactcaatcttgtatgaattcaatatactttgaaaggttcagaataaagtgaacaagcttggaaaaaaacagtgtgcgcaaaatcacagaatgtgattactatagtaccattacctcaacgggattgatgccgcttaagcagtcaaactgcaaaggaaaagagaaaccactgttaacatttcaggaaaataaagggcaagttacacatctagtatatggctagataaaaataaaagagtaaaataaaattttatgataaaatgtatcgctagtattcatatgatgcatcagcacatgtaagtattccagattgaaaataattgcatgacagttagaaaatcaatttctccttttgaactcgttaaaaaatagaataaaaataacaaagtaacctgtcaaacagcaatttcttgacaagatgcataccgtcaagctatatgaagcttcaagtcttccaatattcttggttttgactctagcactgccaacttgacttaaggcttcaaacgaagagatgttaatgctaattatcttccctgagcttctgaaattaacaaggaaatttaacatattacacatactgctaagcaaagaacataaattagtgatttataacatgaattgaaatgtaacaccagagtagaaaattgtgtgtaaaattgtccaccatgtcttacgtttagtgcaataatgtctgaaattgtatacatttaaaagtaaggttgtgcctactggtaataaatattcagtcgtataatgcaaaagtattattagtacctctgatagacatattctatgtcatcagcactcagctctatcatcaaattggtattgagaacttgtgggattcccacagaaaaggntatgaactcctgcattctgtaaatgtatctatcaaaaaactttatccaatgttggcatataagaagagaagagaaagaacttaaccggatattggttgatcctttcaaactttcccagaacaacgtattggggtggttggctattgtttaccctgtttttgtcaatctgaaaaaaaatggtgaatgatctttcaagaccaaaacagttttacaatttaataacaagatacttggtactcagttatgctatgatgaacaaaattaacatggaaacttaaagcacaagtgttgtagcaataagaaataaaagaaatagttacagatctactttttagtgttacctcccaaaatttggaaagctgatcgcccaagcagctgtcaagtggcgatgaacaaaagttaggctggctcctgaaagcttcatagccaactccaatcttattacattcaagaccatctaatgtaaacaggactctctccaacagcatccacctggaaaagtcatcaccaagcacttctagttgaccaccgccaacacccttcaacattttagatttagaagcacaatgaaacttcatgtgagggaaatattcttatctaaaattttcgattacctttcgtggagtcacaaggtagaagttctccaaagatggaagacttgtataaccagcaaagtcgccaactaaatttactctcagggagctgtcttcagaaacaactgttctattttctggaccaacaataacctcctggtgtgtaatgctaatttagcaaagataaccaaattttgggaagtgctttgcataatcaag

SEQ ID NO: 2116 - DNA, 663 bp, Oryza sativa
acgcgtccggcgcgcatgacttcagcgcgatggaccgaccctcgattgcggagccgcgaagcggttacgaccgacccgaggacgcactcatcgatgccgcccgcgaccagggcatgatctccgcgagccgcgagcccgacagacgatcgagctgttcctaaaaccaagggtcaagctacttcgcaagatcgccatctacgtcgtccgcgagtgcatgcaccgtgaagtagacagtggcggtgacgctcaccgatttgtggcggcggcacgtcgcctcctgagcgagcccgagtctgatgatgagtacttgcgggtcgagtacgcacacctcgcgcgcgttgcgacgcagatcgactactcagtgagttcggtcttcacgccgtttcttgaacaggcttaccgtgccgacctggcatggatgcgcgagcggcttgtgcccgaaggcgcggatcctggacaggcagaagcggagatccaggacaaggccgatcgctaccggcacggttggctcgctgccatcggccacgacgcgctccctcctgagctgcaacaagagctagccaagttggacgcgactcacggcgaaatcgagaagccactggagccacttgggcaggtgacgacctggaccggccctaacccccacacaagccaagaggaaat

SEQ ID NO: 2117 - DNA, 4443 bp, Oryza sativa
  unsure (1)..(4443): unsure at all n locations
catctcttttccattgttaaaaaatggtcatttcctactctattattctccaaatcagctctccaaggttgtaaagcttaaactgacgtagacatgcaacaaacaagcacaaatggaagttgtgctgtacctgaagattcgtccttttttgacctttgtttattatatttgatctcatacaacaaaagagtattcatttccaattatttcgcgagattttattcttatttcaattttcacctcacgatttgttttttcccctgagctgttcatttcaatattttttgtagaaaaaaaaactcttgcccatcttaaactagttatctttttcatacatttgcatgtcaggcatcaaccagtaccaaacacctgatgatggctcaaaaaattgccatcaagatgtccattgcaggccacacctggaaacagataactttaattattattgcaacaaagctggttcagatcaggaactactactaaagtgctaagtagcacctattattggcatgttattctacacctccttttggctgaaatggccaaactctctcttgatccagtgaccagttccagtcaaaaatggggcaaactgacacagacagttcagaagaaacacacaatgagtggattaattgctcaaacatgcaggttgccagatttatctgatgctactacagctctgaaggaaatttttgcatagatgtcatcagttcagatgcatgcttgaagcatagatgattaatgttcatttaatcatttattggttggtgttagttgttagtgctactagtagtgtggtacttactctgcatgacaatatgatactactagatcttatccacagatgacagattctatgccaaacctgcagcttgtattgtttataagcaatgcttcctccactagacaaaattgttgattgctagctttacacaggaaagaatttgatgagaacatcaacaaggcatattaaagtgaggccttgcaaagtttcagttagacagcatcacgaaaagatcaagagtcttttccttttctttttcatccagaggaaactaaaagaaacatctagtttagctaatgttttgctttcatgacacaaatctctgctcttcaggaagaacttatcaactgaactgaataataatgacaggtagaccttttctctacagtgaattaaaccgtgtcactttcagattatgtgctgatctgatcagcaaaaaccaacgaaaaataaaatcttccatgtagcacgaactcgtgcaaatgcaatgtccttgactttagttggaaagtgaaatgtcctttgcacggctgcatcatctggacctctattttattttatcttttttcttaggattggactatggatgttgcatcttacttgaagcttaaaggcaatcacgattgattgaggggtatacgtggttgctcactatgacctgagaggaaaaagaaaagctcccttttcttctggactctctgaacttaattagtatttgcagcgattggtgacgtctaaagatcagcaaactaccattatcattgaaccagctaggcatctcaagattgtttttgacgaacaagacatctgggttgcctctcatccactttcggcaccgtctctctgttctccttttcctattcggaccgtagcaggtgcactacagtccacaacattacaactacagtatatcaattacaattattttcttaatctttcacgaacacgcagaataattacaagtcaatatattagaaaaaatagaggttttgttatacaacgtaatcagtaagacagacctatgcctagagggaaaaagaaaacacaaaatagaaaagaaaggaaaactactgttgaaaacactgatatatgaccgataaattatagaaaaataaagtaggatataaaataattgataggtaaaatttttatatatacttatttttgtctgtttaaaattttagataacaacgtaaatgatgaaagacatacttcagtattaaaaccagtaaagatttgattgatgaattacaatctcaccagtgtgatgaaatctgagcattgtagaaagcaggaagggggaagcagaaacaaccggaagcccacagccacagttcactacaagttcagttaccagtcgcagttggcaatttcagataagcacagaaactctcgacatgtctcatgcgaaaagtctatacgtactaactttttcttattaaatttttactaacactgacatgtcatgctatgagtgcatctagattttttataacttctatctacttgaattaaacggttgagatgattgttaatataaatttagtaagaaaaatttagtatgtgtagcggtgctctttctcgtgagatggacctgaccgttcgcccgtctcggttcatgtcaaaatttaacaagatcagcatatgaccatggcggctgcagccagcgaacgagagctcagctcagagctcaagagaggggaaaaaaatgcttcgcgataaatacgatatttttttttgagatttttttctttttgagaattcgataaatacgatacgaccaataaaaggcaagcgagcgacagcgacgactcgcgccaccccgccttgaaaaaagctcgagtctttggcctttccccatgggcgaaaaatccagcctttttttgagtctttttttcaccatcggtgatcacacacacggcacccttcttcccggcttttctgctgctgcccatcgtcttctcccccctcccctcgaaaccaaccaaccttcaacctaaccccgcaagcaaacgccctgaccgactaaccctcgccaccgagcaaactcgagacccaaagccacgcaactttctttgtgttctttgatttgttcttggcaatcgcatcagagatctattgattgattttgaagcagaggaggagcagagaggtagacgaagagctgcaagattctttgcctgttcaatcgaccgtgctttgtgagagcatacgacggcggcggcggcgagggcgcggcgtctcacctgccccgacggcacggcgaccgaggaggggaggccggcgacnagatgggctccttgccgctgaggagtggtagcagcctgcctccaccgtccttctccaagtcgccggcctcgctgctgctgctgtccaagtcgctcaccctctactgctgagagagctcgagctcgagctcgagagctcatgggcggtgtcacctcgtcgtccgcggggggaggcggaggaggggagaccgcgctgggggacctgccggagagctgcgtggcggaggtgctgcgcaggctggacccgccggagatctgccggatggcgcggctcagccgcacgttccgcggcgccgcgtccggcgacggcgtctgggaggccaagctgccgcgcaactacgcgcgcctcctcgccgtcgccgccgacggggaagccgccgcgctggaggcgatccccaagaaggaggtctacgcgcgcctctgccgccggaaccgattggacggcggcaccaaggtgcgtgctttggccgcaaccctttttcgctgtgttctatttaaggctcaaaaatcatgtagtttgcgaacttttgcatgtttatgttcgtgtgaattgatactagtttgtaacacaacattgtgttgtgatcttgtggaaattattacgcctgtgattaaccaaaagtataaggacttgaaatgatcttattggttgagctatggcttataaaccgagaaaaaaatgaacgaagcaactaaaaatggttttaggttaggatgtttgtacttctactctttagcagtttaaaagttaaggctgaaaaataggaagtggtgaaaaaaataactagattaagtttcaaaattcaagttgtggttctggcttataagttcatgggataatgatttgtgcccttgtgtttggattgttttggtctgattagcttcagctatctgtcaatttgagaaggagctaagttacttgtttatttaaagtctctcaggtttggattgttgttttcgtcggctatacatatgaaatttgttttgttgaatgtgtaggagttttggctggacaagggtggtggaggtgtctgcatgacaatctcttcaagggcactttcaataactggcattgatgataggagatattggaatttcattccaaatgatgagtcaaggtgccttcaccaaaaccaactctcagatttgcagcttatactggctaccatttgtagaaaactttttcaatgatttcatatgatacatagggatatgaagaaagaaatatagtggcatttaatctgttgaattttgtactggaggaaatcattaattcatctcatgtgaatttgttagcatttaggatatgtagttattgattaccttatgttagattttaatgttctgttttcctgtgcttgtgttgaa

SEQ ID NO: 2118 - DNA, 565 bp, Oryza sativa
tgatatcgatagcttcttggatcatttgggaccgcggtataaagattggtctggtcttggccctattcctgtggatgctgacttgcttcctggtgttgttcctggttacaagacaccatttagactacttccttacatggttaaaagtacccttcggaataaggaaatgacggctctgcgtagacttgcaaggcaaactgctcctcattttgctctaggtatttcagtgaacttatctgagtagcttttcatctaccgcatagtattcaatttgtcaattaatttccttcttttcacacttcatgcgtaccgtgtggtttagggagaaacagggaacaccaaggattagctactgctatcgttaaattgtgggagaaaagttctattgcaaagattgccatcaagagggggttccaaatacatgcaatgacagaatggcagaagaaatcagggtaaaagatcatgataactattatcagtagtttgcctgtttgcattcctgtctccacaatgttatgtatgtgttgaatcaaataaacatggcattgcttgataagtagctatt

SEQ ID NO: 2119 - DNA, 709 bp, Oryza sativa
tggagcatctttggtggctgttcaaaccacaggcaatgctatgtatgatccaattggctccatcattgttggcaacttactgggaatggtatgttaacatagtcggttcatattattctattatctttcttggcttatattctgttgctatgtgtgactaattgatgtaacggaatatttgttcaattgttttctgccttattgaatggtcatttggtattggatacatgtataccccttagtctgacacaaatatcatgtcctcgtttctttataattaaataaactatgacaatctaaatcttttatcccacttatcttgttaaacttcttatttcttgcatttctattgttgctgtctacacttcatcgaatgcccatcaactatgctaggaagggccaaatggtgctttgttcattttttatttctatgcaagataaaacagtattttggctatcataacagatgagcactatgttcagatatcagcagtttgtgaaaccccaagacaaaagattcatagctaccagtaaagatttgtttattgatgtgtatttcttgtatgttgactacatctattctgaagtatattttattcagatattctgtattctgctcatactaaaattgtggatgctatccatgtttttgtgtgtttctaaaatctaaaaaagcctaattcatttgtatattgttacataattggaa

SEQ ID NO: 2120 - DNA, 501 bp, Oryza sativa
ggagagcgtcgcgcacccgcagatgtactacgagaacaacgtcgccggcaccatgaacctctactccgccatgaccaagtacggctgcaagaaggtcagtactatacatctacacgatcacctgattgattccattccgatgcatgcttcgatcactgaaatcaacaaacctacgcgcagatagtgttctcgtcgtcggcgacggtgtacggccagccggagaagaccccctgcgtcgaggattccaagctgagcgctctcaacccatacggcaccaccaaggtataagacatgatcgcatccattgctcgtgataagcatgcacccgtcacgcgccattcggattcgcttcgccgattcggtgattacgatgccgaattgcgatggcgatgatcacaccattgcttttttgctatgcaagcattgtttctaacggcatcgaattcgattctctcgttggggcagctcgtcctggagaactacttccggcaggtgcaggcc

SEQ ID NO: 2121 - DNA, 696 bp, Oryza sativa
tatagggcgaattcgagctcggtacccagagtaagcaggcttctgttaatatggctgccctcctttagcctcataccagccgatgccgtctgagatgcacgctcacttcctgctaaatcaacaaaatttttgtggccttgtgggtgagctagcatgtactggattgttgacacgttggagctggtcgctgtcaggatggaaaagaagtatgccgggtaaattattactatcacttctacctaggataaacgaaggattaacatggtggctgtcattgtcctgggtgggtcttgtctttgactaaaactgctactgcttgtatccggattgattactcagccttgcactcttcagccttctcacaaaattctagctttagtcataaaaaatggccttctgatcttgcagaaaaatgcgactactcatcagtcgtttatcctgtaagcgcagcaagctgaagggctcgtttggaacaggaggattttgaaagattttcgtaggaatcaaactactatatatgaaaactctgtagaaatcttaattaggttccaaaggtgccatgagttcgggttaatttgtcccaactctgcaaaggtttgtgtctaaatggggtgtgctaaactgatcaggactacactacactacaaaatcaatctccgatcaaatggtatgatatatatatatttgggctgacta

SEQ ID NO: 2122 - DNA, 556 bp, Oryza sativa
  unsure (1)..(556): unsure at all n locations
acgtgtgcgagagcgcgccggcggtgctcttctgcgtggccgacgaggccgcgctctgccggtcctgcgacgagaaggtgccccctctctctaacctgccttcgtcctctgctctacaacgcgcacgcgtcggagtccgcttgccgannnnnnnnnnnnnnnnnnnnnnnnttcaattgcggcgcttgtttcacgctgggcgatcgggttgtttgattgtgcaattaagatctcacgagatggtttactacgctcgaattagcgtgtggatctgcgtgtttcttttttgggtacagaaagccatttaattttgactgcgaatcaactgcgtactgctcactggcctggagcaattcattcattaaggccttttttttttcattcgttgagtattgtggacttatgaccaaacgaagttatggtataataggatgccagcgtgcattgatagtgactaactgtagtgcttgtttgggtagtaaccgagaaattgccttatggggtatccacttatttcttgtctgacttcacaatgaggcctattgcttagagaatt

SEQ ID NO: 2123 - DNA, 3888 bp, Oryza sativa
agcaaaagaaaagcaacagaacagcaggcggcattcaggctttttctttgctaatccactgtaggaaaacattctgagtaccataattctaaacggtcccccttcacacccacgcacgcctattcccaacatcttagggtcgaagatagcaaactagtaaagctaataggggacctaagacacagtttgctacctcatgcccccggatacactatttactcttcatcgtcctcattttcctgcaaagagcaaattaaaaatgttcattagcaacacaactagcagtagtaaaaattcattgggcattcaagctaaaatagggcaccgggtgttcctttaatgattacctcatcgctaccaccatcctggtctcgtcgacctcagacttggacttgtcagagccttctccatcatcatgggtcttagctttctttgagcttgtgctctcctgaagaagtaattcaagaagtccaattagtgcctaacgcttgaagggctctataattaggatgcacaattattctatcatcaccttcttatcgaagttggccttggtcttctcgtagtcctgcttcttttggccagccttgtccacataaggtgccttctcctaataaaatttaacacgaagggccaaaaacatatggcacattgtcacatcaatagccacccatggtacttatgtgtacttaagcgcttcactgagtagaattcaaaaacaaattgcaattttcattcaactagtactttaggagcaattcaatctttttcctaacaaacaggccagaacaattattaaacagtcctctagtgatactcatggatgatgtatgctaaataacagatgcacacacttaataggaacatgtactaatttttgaacactgcagagaaaaactcacttgctcagacatagctcgccacttctcccctgcagccttgctcacctaatgaaccaacagaggagaaaaaaattggacatctaaagtacatcagccaaaaagtggcgaaaaagatgatggtgtcaggaagctcacggcggcgacactcttgttgtcaggatgcgctgcctggtactcctgcctgaactcagacctgcaaaagtaaaaaataaaaaccacaaaaaatattaaaattcaagaaaatcaacaaaaattaaacaaaaactcaagacagatctgtactagatctgaacagagcaaaacgtgggcgagggagcgagaaactcacatgaagacgaagaaagcagacggcgggcgcttcggcttgccgctagcggcggccttcttccgcttcccggcgccgccggcggccttgagcctaacaacaacaacaacaacaacaccaaacacaaaaccgctcagatgtgaaccaacaacagccaccgccagaaaaccctcctccaccgcccatacgcagcagcaaagacggccggagagaggatcttacctgccctcgcccttcttggaggcgtcggccttgcccttcatggctgcggcgcggagatcgcgaagtcggtgcgctagggtttttgcgggggtgcagcggaggaggaggaggcggagtttgggaggcggcgcaacgggcgttgtctggccttttggggcggagcgttgcgcggtgcgtggccgcgtgggagtgcgtgaaagggaaataaataaaggacagcgacgggctgagcgctgtacctgcgacgcgtgggtcggtggtacgatcggttttgggttggaggaagcgggctgggccgtgtgggatggcccaacattgcggtcagtcgcggcactgggctattgggccttatgtcaccgataaaacacagaaaaaagcctaaatcaaagaacctgttgcaaatgtgttatgagattcaggattgtcaaagggaaatggatgaatggctaggactaaatgagatgtgaagatatagatgagaagaatagatggctaggatacgatattacccttcgatggatgggatatcatttcccgatcccatttgccaaagaagcctaaaagaccattacaacatgtaacaagagatatgtcgattttctagatcggcaataatatttatcgggtgcactagacgtaggaaagatggtgacacagtgattatgctagttcaggcactcgaagagaggtaataccctagttcagtcgtatgagattggatctgtgcagaatttcgcaatacgacgttgagagtagcttgtagcgatcacccgaattagggttagccgacccccttatatagtcatcagggagccagctaagacatgcgtgatatctcttataatccggtacatgcctcctatttacatgagataagatccattgccttatctctaattcctttcttataatagaagtaagttggatgagtctagggcacttggcccgtgtaacatcctgaaaatccccgacaataaaaatcactaaaattttgaactttttaaaacttttgcatcatgctggatgttatggttggtattgcttgtcaaactataaattgtcaccactgaaaattaagctaaagctatacaactgattaataattataaaaataagatatttattgtgaaccctataaatatttacgcacaacacaacaaagccatacaaagagaaggttaattactaatttaatttataggccaaatattaaatattggaaccatgtgacaggtgtcatgacatctaagtaaccatgaaataatcgccactatgacgaccctatatataaaggagtgttgcactggaataattaaattaatatttacaatgttcatcaagtctctcaggggatagattcactcatgtaaaataatttgtcatgtaaataaattgagttctatatataaaaaagagcttatgggagtattcgattcaatgtttaagaccaatattgcaccaaatctcataataccttcatagaataaaacttaaataaattaaacctatgtatgtaaaatatattgctatacaaataaattcgaccaatgtgctattgtattattaaatgtcacaatagaatatttaattagtttttaagaaatatcaaagcctagaagttgaattggataatttttggataatctaatggaaagcaaactcatttgggaactaatgaataactaaataaatattcaaatcaaacatttgaattctcaaaaccagaatgtatagatttcatttcatttcaaatccaatcccattcacttttgcagattagcccttccccctttctctttttccttttcccccattccttttctttttcagtcggcactgttcatcgcccatgaaccgttcgatctgggcccaagccgctcacatgctgcgagtccgctccttcccggtcactactgagccgcgcacgtgatcaatcgcgccatctccgcatctcgtgtcgcccccgtgcaccgcatcgtgtccgtgccggtgcgccatcccctccgtgccgcaccagaaccgcgccaaacctagccgcctccccgccagcgcgtccggattccctccaggaaacatggcgcctcgcgtcttgtcgcgccgtcgccatcgccatcacccatcacctcgccaccgatggataacggccagaacgccaatccgcgtcatccctagccctagccaactaccttaggacgggaaaaccgccccagcaagccgccgctccgccacagctcccatgtgcgcgcgttccgtcgcccccattcgcgcccaatgaataaaacggagcctcctgccacagctagagttagaacgcacagactttaggctttaggtacgatgatggagccacataaccttaatggaggaggagatcaaaccttatccgcgtcatccacctcattgctcttatccgatcaccattagtactccagctcgcct

SEQ ID NO: 2124 - DNA, 2045 bp, Oryza sativa
atagattttagaggaaatctagcaagagctagattttagaggaaatctagcaagagctccagcctcttcaaaaatttcatttaagtctatatctctcatccaattcttacattttcatgcaatccaatcaaacgaccattcctatgttacacgtgtgttttgcacttgcatttctataataatcctatgtttttcctattcctccgtttttttcattttcctattcctccattttttcactcctacgattcaaaaagggccctaagttcaagatgagcgcaaaaaggcaaaagctagtgtttggtttttaaaacatgtttaactcgaagcaatagttctttagaaagaaagaagtcgtacaggtgtgcagttattcaactcgtagaaaaatgaaaaagaaatagaaaaattaaatcacattggagctaggtgcaccatatgattgtttcatgttccacaaactaatcaagattcaagaagcaacaaacgcaaaagcaaaaagggaagaagcaacataatcatatagtcacgttgatttgattaacgatcagaatctctgtataatttccagagtaatagatacagtgaatggattacctgagtacagcaacaacgctttcactatgcaggctgcagctgactagttgcaaaagctcgcagcaaggggaagtactgagaaaaagaatgggtattgaatggttcaattgcctctacctttgcaaaatgtggacttctagttgagtttcctcctgtacaatggcctcgaaacccatagattgtccaaaggaaaacgaatgtagataccagagtatacaggtgaagaactactgttttgggtccttggctatctagaccctctgtaatatacaattgcatcaacgacgtgtaactggttaacacataacaggcatggtaatatggaagtcaacgcctgttcctggtgggggcatagctcacctgtccattcagaatgcactgtcagcaatagactatgactaagatagatatcttcactgtcccaaaaacgaaggaaaaaaagaggaagagttgaagattgaatggcgatatagagctctccaaagccaaggatatgtagttggcggtccccaaatgaccccagtaaataagcggattggattcacatatctaagtccatgtttcggaattttactacaacaaaggaatcaatgtttggcaagtaaatatagtaccacacaataatggtagcaagtcaaatttggcacctcaaagattctgttatttaaagataccaggcaaaaaactactgcacttgatgatagtacgacactcaatcactcattaagcccatgtactatatatatccagtgaaggtgtaaaagctgttaatgatgtagataacatagagcaattctttcaagtcttagagttagaataaaaggctattctttttctaaaaatgtataaatagaaatgcgagaatttgcagaaaactatgagaagggatgtacctttgttgagacggtcagcttctgaaataattaatgaaattattcgtgtactatgatacagtgccaggcttgcagtaaatagatgggcaaactggctcagcagctctcatcaagctccaactcaatgcctatccagcacacctttgggtgaaatcaatgaccatggttgcacccaaggtgtggtggaccagatctcaaatccagtggaggcttaagttttacccgatcctcaaagcccttctgtgaagcatgctcagaaggcagtggcttatcatgcaaattccacacgctcacatgtcccatccttccaaattgagggctcagaatgtcagcttcagggactgccctctcctgaaaacctagcgagggttgtttcactctaacaaaacgaccaaggaccggatctggaggctggtttggcaagggctcatcaagacatctcgatgtaattgtgaaaccctcattattgtaagctaggtgtcttgcatggttaaaaggaatagctccattaccaccagtcagaggagtggaagcacctgaaggggctgcaggaat

SEQ ID NO: 2125 - DNA, 4022 bp, Oryza sativa
ccccaaacaaccctttgagcatgttgatcctatttaaagctattgtttctattcaactattgcatttattttcgaatgtcattgggtggaattaacctattgtttgttatagccctttttgatcttgattactttattccttgataccttgggttattataatttgactagttgagctttatttatattggttcagctagatattagatataattgcttagccctgcttagaaacattagcacattattgggataacttatgactcactattatttaatgatttcacgatggtcaatcgtgattggttaattaattaatgtgccaactaaaacctggtaatggtgggttgtgagcacatggtcttgatggtcgtgctcatgacaattaaggaccggttcacgagtttcggttgtgaaacattaaccgtgccaaccacaagccagcatgggcaacggctttatcttttgtatagcatggtttattgcggggcaccagactgagaagtggcggagataagcccacgggggtcgctggggagtccatgccttgtttataagggggtgattatgatccaggaaggtgcgctgcggtggattgtgttatgcaaggggtattgtcacaactccgttccgaggtaccgtggtggtattgaggcacatggtgacatgatgtggggttgtgtcttgtgggtacagtggtacacctctgatcagagtaaaactattcgaatagccgtgcccgcggttatgggcgggtctaacaatgtctttcgtgattagtctcacccttctcaccatagtaaatgatgctataactggtaataatttgattagctcctggtttggaatggtatattcctggtttggagatagaactgtgcagccgggatggttgttcagaatggttgggcctatacaacagggtatgttgtgtagcgttggattaatattgattaattattacttaactgttttattaaattctgaaatgtttattaaaggctgtttgtgcaaatggaaccctactatgccatcctttgttatcctgtgcacttgcatatttgctgcgtggcttgctgagtatgtcatatactcaccttgcaatcattcatcagaggaagagttctacaatgaggctgatggtgtggaggattaggtgtagccttggtcaagctgcctgtggagtggagccgtctgcgccgtttatcttattttccgctgcttagatctttattgattgagaggaactatctacctctgtaatgaccttttattcgcttattaattagagtaataattgtactctattatcaatttgttattgtgtgcctcggctgattcctggacgagggttcacacacatgtaagcgtttggaattttggatagaaattccgggcgtgacaaccgtccaacttaacgcaagaaaaaaaaccatcatttccaaaaaaataagttagaggaaaccatccaactcaacgcgagaaaaaaaccgccgtttataaaaagaatcgctctgagaaaccgtccgactcaaagcgagataaaattaatggacgcttgggtcggataagatccatcgattttttttccatctcctacacatcatttgtttcctcacctaatctcctgcattggagaccctgcacttttgtatgcaattatcattatcagacttttttttaagtacaactaatattcttaataacatattatatggaaatagtattaaaaataaacatatttttaattgttatttagagaagagtgcacggtgactattttgtgtagactttatcgttagtgtaggatttgattaacctattattggttgcaagaataagattgaaagaatattttagattatatgtatattgttatatgaataatctaattattttagttaaagcaagcattggtaaaaagattgccattatcgagtttgggtcattacataaagatgctctaattttctaattgtgttagctacaacgatccatataaacattatcattgatatgggtatgcttgaaaaatgtctattgtcattggattattttttttacccgttgcaatgtacgggtattttttttgctagtactattttaaaatagatgaagtaggtacctgttcccggtaatacacgagtgacggaacaccatgactcacttctacatagatctagaagaggtcttttttttcaatatggaactagagcagtgggcagctcctaatttgggtggagattaactccaggatgtaacaccaaatgcgctgcattttctcaagaaaccgaaaaacaggcattgactaagagtctattgcttaacgttttggagtttcttgaaatgcagagctgaaactcctcttcaagttaattgctttgattagagtgggtgattaatagctcaatgtgccacatgtagtggtaactctcgtgcgtgtgcagcttatatatgctgccttcttgcattctgttacgttctgttctctgaccccttcgatatggagacgaaatatagtatcttggagcttctgttggtcagtgccgagggcctgaaacatgctcatcacttaggtctatattcttcaccctatcttgtttcagaaactctaatgctcatgacctccgattttgctcattggcatggaatgtttgcaggaacgcaaagacactacgtgaacattcagttcggggaccaaattttcacgagcaagatcacacaaggtatacattcctgtatatacaacaatagtcaattgtcattgctatcgatagggaaaatcttgctttgacatctgcaagaaatgccacttgcaagctttgttcaggtaaaggtaaaaaggtttggtggaacgagaagttcagattcccgttgtcatcggatgaatgcaaagagcttgcaaaggtcacactgaagatcatggagagggataagttctctgaagacagtctagttggggagacaaagtaggagattgtctgagataaagccgaaatattttaactgaaattaatcgtggttactgagactctcaacatttgcatcttgatgctgtgcgtgcagggttcatgtcggcgacatcatcagcgagggcatcgagagggagttcttgcagatgaagcctgctccctacaacgtcgtgctggaggacggtaggtacaagggagagctcaagcttggcctcaagttcctccccaatgtaagcacgcacagaggtcgctcacatcgcatcaatgacaatgcgtctgaagctctcgatcgtgccagtatacgtagtatcttcgtaggcatttgtcttgacctggatgcgaatcgcaactgtgtatgaggtaagcttggagagcctggagcagtgcaccgtgccgccgcggaggcagacgagcgtcccgtacaggccttttctgaacatcacgctgccggacatcccatggaggaggttattcttcttctgcacacgctccaatgccaaaggaagcaggaagacgaagaacagttgatccgttgccatggtcgtcgcaaagcccttccattttttcttgaaatttctccgtataccctttggagctagctagtggtgtgaactgtgaagtgtctatgacttgcgagctttgaggtgccgatatgtttagaatttagatcaagtgggggttttaaattttgtaaatggaaatttcttaaaatattccgttaagatcagatttgtgattttttagtaaaaagaaaaagaaaagaaaaaacattaataaaaaaagaaaagaaaataaagatgccctgctccgtcggcccgtccttgctttggacttgtttggaccgttcgctttgaatcgaacggtgcatacgcgctgggaataaaaaaaaacagagcagcccacgcccaagttcgcgaccccgcttcctctccccttttctcctttcggtgcccgagtgccgccgggctcgccgcggggcggcacgctcgaaacaggtggcggcggagatggagatgggcctcgaactccaaccagctgcagcgccgtagt

SEQ ID NO: 2126 - DNA, 9396 bp, Oryza sativa
cctgcaccccttagtggtagctggtttatctaaaccagttaccactccatctataagcgaccatgtccacctatacttcaaataaaattttctcttaaaccactcatccgattacaccgttgtgttcgtaacaattaaatctttacaataagatctcacatgattatattttgataaaaaaatacaaattaattttatatatatctaaattacttcttatatatataaaagtaaattcaataaaaactaaaagtaatttacatatattatagaagtaacttataacaaaattaatgtaactttaatgcatgcctttttttcaaaggacatgactacacagctagtggtaactagtttgtctaaaccagctaccactccatctgtctcctttcaacttgaaaaatacaatagtatgtatctttttttaatctctttaataacttatatattttaaatcacatattgtttttaagatctatttgcatcattgtactccactcaaaatatgtgacaaaacaatatatgtcggagatatgggcccggggatatgcgaagtgaggggaatctaccttcccatcctgccacgtgtccctactgcctggtcctgtccccgcattctgcgaaccgcaggagcggccggggggtcggggcctcggggtgccacgtcatgcccctcgggcccttgcactcctttgccccgaggccctcgcctagccgccgtttggcggggggagcaagcgaggagggggcccaggctgaacttcctttaatgcgcgcaacgccccaactgccccctgtcgcatttaatgtagtggggcagatgtgcggcgtgctaaactgacgcgcgatggtcaagaatgaccagtctgtgaccggcctgacgccggtcacgtctgactggacggacaaccgtgctcccacgtcgcatctgcttccagcggagtggaggtaggtatgattcgtcccatcggggggtcattcggacggcggccaccacaagtcttcacctattaatgagggaatgacagggctgtcccccgtgtcaggcgagggacggcgctgggccccgctcaaggacaagctgtggtttagcttccaggcgaaggcacgggtcgagttccagtcaagatagggtgggtccctacccgaaagaagagtaggtagaggcggtgcatgtggtattcccttgaggtataaaaggaggactttgcccaccgagaaaggggacgactctcagaaaacctgagcttgtggaggagggaactaagagtgttctcccgagtttaggaacccttgtaactctcagtctaaatcctatacacaggagtagggtattacgcttgatagcggcccaaacctgtataatttggttgtgtgcgagctagctaggagccttggggacggatacgcgatttctagaggcgagcttcttcccccggccgaactcacgaaaggagggtctcacgatctcccgctagagaggatcattcctgacaatatccatattgaatatattcaaacattttattaatttaaaagtaatttattacatgttagaaagtatcaggaagtatccattacatcttgtacctatgattaattctcattagttattccatcaatgttatttacaacccatcaaaggttttatcttcttttctcattctacattaaaacaaaaatgaaaggaaaaaaacaatcggtgattaaacaaatttatgatagttacttctgaaccatgcaaatgttactttcaattaacattgaagttacttttaaaaattgttaaacttacatgtgctgatctgtgctgattaaatttaatttctagatggagtcatatttttatccctacaacgaatttacttctaatgtcgtgacaaagttacttccgttttatttttaagttacttttctaatatatgtaaattacttttagactttattgaatttacttttatatgtctaagaagtaatttagtcaaatttaaaagtaatttatgtatatgataaaagtaaatttcatatgtaataaaagtaatttacaaatataaatattttttcatcgtaatataataatgtaagatcttattctgaagatttaattgcaacgagcacaatggtgtaatcggattatagatcggataagtaatttgagagaaaactttataagaaagggaaaaaaaatgcatgtgtaatgaaaaaaggcatgcatgtgtcacacggttgtgtaggtgtcgcgcgttaagactatcgcgagaggcctcgctagatagattatatgtttaaaatagaagtattcctagttatacatctaaacgtttacaatcagaaatgcttagcagatagtaaaattgcttccgttctcttatagtaatgaaaacggtcataaaacttctcaaccattttcataaccatatttttctcaaaacccaaaaatagaaacagtattgagaatatgaaaaaccagaaactgaattatatcacgtaggtatcaatcagaaactggtaataatatcggaaacattgaattgtaaaaccacatatttagctttgcatataactatctctactactttaaaaaataagaggtgcttccatcgttcgtcaaaaagaccgggcggaaaaaatagagtgaaaaaaaaccaaatttaaccgatccaaaaaaacaggtgaaaaaaacgtgcgaaaaaaagaaaagaatccgataaaaaagggggcgaaaaaaaccagacggaaaaaaccaaatttgtttgaaaaaaataaaatctgtcagatcaaaaaaggggtgaaaaaaaggaaaagaaaaacgaatccaactccgtcaacgcggtaaaaaaaccgagcaaaaaaatgataaaaaaaaccacgcgaaaaacaaaccgtgcgaaaaaaaaaccaaatctgtccgatccagaaaaaaaaggagcgaaaaaaatgaaaagaaaaacgaatccaactccgccaacgcggtaaaaaaaggacaaaaaaaatctctatctctacttatctctactattataaacattgaagatgtttttgccgtcatccgtgtttaaattagttttaattttattttcagttttaatctctatatctttatctctacttaaaaagaataagaaatttccaaagtcggtaaaaaagaaaaagaagtccgactaaaaaggtaaaagaaaagtccgactaaaaaaatgataaaaaagcttctatcgttgtaagaaagaaaatcgtccgactcaaggaaaaaaaagtctcgccagtaagaaaaaaaagtccgtttgtgtttttttaccggcgactttttttttcacgcgaaagagttttttttcctgcgcacgcgttattgttttttttgtccggttttttaaatcacaccgcgcctcgcacttttggttttttcgacaatttttttcaccggttttttatcccatacgattttggtttttctcatctggtttttttaatccgatctattcgcggcatgtctaccgagttgaaccctggcgatgcgctagcgccatatcgatcgtgcgttttcacttcaatttgattgcaaaaaaaaaattcgattcctactcgtccctcatcattttctctgtaattttccttgctttattttgtcggatttaatctaatggttgccgatgatgacggcgatcttccccgattatttttatcctgagttttatgctctaattttgggtaaaacggaaagaggtgagtggccggataaaaaaccctcaaccaattttgagtgatcgagaaagattcgtccggattttatgggtcgaaggaagcaggccaaacgaaggaggtagcagaccgacctagggctaaaaagtaaaaacggcttcactcgtggctgggtcgaaacaagcagcctgaaaagtaaggaatgcttttggcctaaaacccaagaaatattttcattaactttttttcattataatatatagcgatcccgatgttaggattttcattaacttttttaattataatgtatagcgatcccaatatttcaatttattgctcagctcttaatataacattgaaaaatcgtatttacccgttgcaatgcacgggcattttttctaatatatacttaaaaagtaaagaaatttccgtcgtccgtacagagaaaagaaaattacgcgcgagtaaaaaaatgcgtgcaaaaatattttctgtccgattccaaaataaaaaaaattccgagcgaaaaaaaagtttccatcttcctacaaaaggaaaaaatagtgcgaaaaaaaaagtttctatccgaagggaaacacgcgcgaataaatacctaattaaaaaataaatatctatatctaaaaaaccttctgtcgtaaaaaaaagaaaaaaaaagaccgactcccgtatagaaaaaaaagtccgactcctgaaaaagaagatttctcgtccgtaataaaaaaaaggaaaaaaacatccgactcaaaatccgtaaaaagaaaaggaggaaaaaacgtcccggccaaacctaaagtcgcctcttgttgtccgtatatatctctttaactctaatctaatctatcgatctaatctaactttttaaaaagagaagtttccatcatccgttaaaaaggaaaaaaatgcgcaagaaaaaaatagtttccaaaaaaatgcgcaggaaaaatacggtttccttcgtctgaaaaaaacaaaaaaaaatgctactaaaaactatcagaaagaaatacaccatttctaaaaaatgtttcaaaaaaccacacaagacaaaaaacaccatttatagaaaaaaaaagccgctatgaaaaaactaaccgatgaaacactgtttataaaaaaaacagatcaaaaaacaaacggactcaacgcgcgaaaaaaccgctgtttcaaaaaaagttcgagaaaaccgttgtcacaccctaaaaattcaaaatatataaattgttgtttaaatggaatttttagaaataattttaaaagcctagaagagaagatctaattttaattaataaattccaatataaaatggggccagataaaatttcattaaatactttgattaattctataattcctagattttttttgggatttatttgagctaaggaagtatttttaataaatggaattgcatttaagaaataatttaaattgaaaaaggttttaaaaagtctcttttggctttgggccgaaagtcggcccaaatctcttctctctctcctcggcccaagtcggcccagtccgccgcccacgcgcgcgccctcgctgccgctgacaggtggggtccgtgtcacaccccgaagttttcctcccaagccaaaattgtaatttttataaatgaccctaagaaaatgcagatgaaatcaggagaaaaccctaagaaagtaatgcaaataataatcggatttgacatgtggaatttttcttgagttctacatgtcgaaattcattaacaggatttttagtggaattttcagagctctagaaataattttaaccaattaaaattgagcaagcaattttttttaattccagggaaaatcctttttctttttctttttcctctctttttcctcctttttttcgaatgggccgccggcccattccctccttccttccctcccccttactgggccggccgctggccgaggcccagccaggccgtcccgccgccctcctctcggggtcgccgacaggtggggcccacctgtcgggcccgtctccctcctcccgccgatctcgcgctcgcgccgccgcgccgaaaccgccgccgcgcccacgtccccgcctccccgggccacgtcgaccacgcccgcgcgtgcgccgcgtctcccgcgcccactcccctctctctcccgctcgcgcccgcgcccgagatggccgggattcgaaaatcgaatcccgcctctctctcttccccactcccccacgtcggccggcgattcccgcctctcccggccacgtccggttctctctccccctttttaagcaccgccgtcgccccctctcactttttccccatttcgccgcactctctcgagcctcccatcgcccccgcgccgtgcaacctccgcagccgccattttccgctactccggccgccgctagccgccgttagggtcgccgccaggccgcgccgtcgccgccgtcggattcgcgtggccgagatccaccccgtccacctctcctccgtcgaggttcgccgccggagccctcatcccctcgcgcacgggtgagcaccacctccaccgtcgccttcggctatggtttccgatcgccgtggtccatctccctctctctaatccctctcttctccttccttagggcaccccgaagctcgtccgctcgccgacgtcgttctcccgtggcttgccgtcgccgttcgccatcgtcttcctccgcgccggccaccctcggtgaggcacccctcccttcttttccccttcctctcctcttagtgtcgcgcgccgtcgccttcgactgccgccgccgcctcccgtgccgccggtcgccgccgtcgtcggccgcgtgccgttgccgctagacctagccggccggtcggttttgatgccgagccgagccggcggccgcctttatcgctgcccgtttcctccccttcctagccgccgttagcgcagccgcctccgcatcgcctttgcgccgtcgccttcgccggcaacgcgttcgcgcgcgcgcacgcgccgtcgccgcggtcggtcggccggccgtgagccaagccgagccggtgccgccgccccttctctcccgcgccgctgaccagtgggtcccgcgtgtcggcgcccttcctccctctcccgagtcgctgaccggtgggccccgcatgtcggcgccgcgccccgtgctgacgtcagccctggttaatattgcgcaataaattatttaaggatttttgttatagtaataaacacagtgaatcttctaaaattcataactaattcatccgagctccgtttaatcccattcaagtctcagtaaatcaagaaaaatgtgtagaatccattaaaaatgattttgttccctgtttcagtagtcttatagcctgtttgcaatgtttgctttgtatgtcgctagattccgatccttccgacgctccggtgtactttgagatagtcgccgaggttcctccagcagcagagcaaggcaagtcatgcttgtcacttgatcatattgatcctatattgcaaatgtcctaatgttttctttcaaataccgcatttgttttgcaatattactatgggatggttacctattgttacagccatgctattttgataccatgctcctttgttagcttgggttataacatgattagagttaggactagggtttgcttagccatgcttagttcaactagcacacaatggggagatctcatttaaaacctagactataggtttatatgataatgttagattagtgacaccgctttggtgttggttaattaaaatgaatcacatggtgggctgtgggtgcatggttttgctggtcgcacccatggcagttaaggaccggttcgcgggatgccctggaagaattcatcgtacttaccacaagccagcgtgggcaacggctgggcttgtagtgtggctttcctctagccgacgcatccaggcaagggtgggcgtgatggagtttggatgggccctgcgacggcctatgcggcttccggattcacctaggcacgagaggggactgcccgctgccttgcgaggagtgggggtgaaacctgaggtgtggtgtgcttggttagagggggttatgcgaatggtcctgtcacggcctctttccgggatgtcgtggtggcatgtcggcgcacggaaacgtgtcgtggggctgtgtcttgtgggtacagttgtacacctctgatcagagtaaaactattcgaatagccgtgcccgcggttatgggcggtcaaccagattcaccgtgattagactcactttagtttagtctaatgaatttggatggtataggtggatggttgggcctgtcgcaacgtgggttagcgttggacagcagatggtgaaaattaattaattttttttcaactgtttaaatctttcaatttctgtttataaatgctcgctttatgccaatgaaccacttcagctcttctttgttaattccctgcatcatacccccgttccggtatgacttgctgagtacagttggtagtactcagtcttgctctacttttcccaaccccagagttcgagttcgggtcagatgaaggtttctctgaggagtaggcttcgtctgtgccgtcgaggatgcctgtggagtggtgttcccgctgcagtttagtcaaagtttagtcaaggcttagcccctgttgtttttcttttcttccgctgcatttatgtaagactttatgatgtttgtaagacgtggatctgtatgtcaacattgtcgtttgtgtaccccggctggtcctggacggggattttaatgcacattctgcttggaattctattcgggaatttctgggcgtgacagtccgcctgtcggagtcgtcgtcttcgtcgcgccgtcgcccggccgaaccctagcgcgccgccgccgccgttcctttccaaatctggccgcccctttccttctccggccgaattgatagaggggaaatgatcctcgggatctcctctaccttttctcttttggaaacatcggctaattcgttttggaagttcgtggaatcgagttcgattcggatcggcctctttcctccgaaccccgaagtttccttctcgtcgccggccgccgtgggccttcgccgccccctcctagcccctttaaaaggacccccggtgtctcctctacccgccgccaccctcgccttcgcctctcgccgtcctcgtccgccccttcgccgtcgccgaagatcaccggaacaccgtcgccgccgtcgacccgatctccgccgccgtttcaacctcgtcgccgtcgccgtccgttgatcttccgccgctcttttggtcaccggtgagttcgccgcgtcgcgctctacccgttggtgtcctccgttcgtgccgaagcgccgccgttcgccggcgagcgtgcgccgtccgagccgccgccgccggtggtgacgtcatcgccgacgtcatcgtcgccctctcccgtgagccggtcgtagaccgatcgatctcggccgtccgttttggatcaagtcgatctcggccgtccgttcgcgtgaaccgtcgccgtgcgcccggtccaccgaaaccctagcccgctgacgcaataaatctctttttccttttcaaaaataattcattattgcgtcataattcaattaaaatcagtttaagtgttttaatccgatttaatctttaaaaattcataactaattcatcttagctcggatttagttggttcaagtct

SEQ ID NO: 2127 - DNA, 4866 bp, Oryza sativa
attcctgcagcccttacgtaataagataaaatacatatgttaagaacacaactacagaatatctttatcgttgtgtttgtaagtgctgtatagtaaaaagatggtgtggaacacgttagcagaacctgagcccatatgtagaatttgtcgagaccttgattggaggaaatctgctaattatgacaatgataccctaaaagaaagaacattgtttttcattggtgagctcttttttgcattctgaatggttactgctaattcttatgcttgatgcctcagacagtactaataactatagatcaaattaatggagaacaattacctggttttggggttgtccacttgtccagcggtgatgcgacagcgacaatgctcatcttgctggctcatcgacaggaactcgctcgtcgtgtgaatcatgagggcaaggaggcatgacggtgtgagggaaaccagtcgacggggcaatccggcggcggcatgacgctaaccgaatggatcagggatgatctgcaagagggcggctgcaaacaaatccagaagatgcagcgatgtggaaggaggtgacccacgagggaatgatgaggggcgcgatgcggtgagggtggagggaagcgacgcgcaggggagacaaggcgaagcgcagagggaaacgatgcgtgagggagggggcgaggacggaggtgatggcggcgatgatggtggcagacgggtgaaggtggaggcaaggcgcgcgaactcctcctagggcagtgtacagagacagtttgccgacaggaatacccattccctgtacataataacagcagcacacatcagcaaatgctttcaggtaaacatacatcatcacagctaaatcttttcgacatattcatgacagcaaaatcagggcaggaaatgggggaaaagatgcagtacctgacaaccaagatctccaaggccaagaatgcgctcaccgtcggtgatgacgatcacctggatgctcctctccggccagttcttgagcacctcaaggatcttccccctgaatccaccaacaagcaaaccaacaaacacagattcctgtcaggctgcaaattcctaatcaacctcaacatcagaaggaaaacagaatcctcgcaagaaaaccgcacttgtccttgaggctgatgtacaggccctgtggccgcctgtagatgctgccgtacttctggcatgcctctccgaccgtcggcgtgtacaccaccggcagcagctcctccacgttgtcgatcaggagcttgtagaacagcctctcactcctctcctgaaaaaagcacaaaagaaccaagaaacatgacagagtgttcagtaatcaacagttcttgctgcatgaacattcattatcaatgcatttgattttgagcgagtgatcaaagtgcgggtgaaggccagcatcccccgccggccaacctcacccctttctccatcggcgttgtcctattcctcctcccatgccgccgtcctctcccctcataccctgctcaatccggcgcggggtcggctcgcgcagatcgagtcggtgcagatcgggacacctcttccccgcccgtcaccagctcctttctacccgcacctcacaccgccacccctaccggcgttgccaccatccccaacgccgtcgaaaggggatggaggagggaggggagcaccggagccgactctgacgccgccacgaggggagggggatactggcgccggttacgccgccgccgcgaggggagggcgaagaagggggaagggggggaccggcgccagatgatgcacggcggcggcggggggatggcgtacggcgacgacggcggcggggcgacggcgtcggcgcggcgtggcagcgaggcgcgagagtgaggaagggaggggatgggcgtgatagggaggcgaggcgacggcggcagcgtctaggtaggcgatgcgagcgagagagagagagagagagaggatgggagggccggagcccggagggggatgcggcgcgtgagagtcgcgtgattgggggagatcacgcggtagatggaggtgggaggctgctgatcgatctggaccgttcggttttcaccagaaggtgggatcggcggattttgggaggtgggatcgatctcaatcgttcgattttacacagacgatctgaatcattgagtgatgaatgaaagaatgagtgaaactatttgtttaactatagggtagatataaacaccatttaacgagggacaccatagtatttcttctcaaaccttaatatatgctaaacaacagagaattacaattattttgggacggatgtagtactagtatgctgtttaggggtgaaaacggtacgaaaatttccgagatttttggctgtcgttaccggtttatactgaccgtttcaatcggtattagtaattattagaatatcttctagaaatggtagcgtaattaggatagtggtttttcggaccgttttctcgtaactgcatttgtccgataatttccatcaaaatttcgaaagttctctagcggctcagccaacccaacccattaaaagctcatgaatgaagaaagcttgcaacccattaggaaggggaagtggtcaggaaaaacaatgttaactctagggtgtggcatatagactttgttgaaatttgatctcctcaacttatcaatgttgaattattgttcaactttgtttatattgttcgttgaacttatcatcatatcactagtaatcatattacggtgttatgtggagtgtgatgatgtaagaatgaagttataaagtcatcttcatgcatagttaaatgtgtgattatgccagattgttgtttccgagatgaattttcgacttacaattaatatcggtagatttcgttcagacggtccagtttctgatatatcgatattatcgatatcgttactaattttgggtctatcgttccgattttgttttcaagaaaaaaaaatgaaaataaaaatggtagagggtttttggaccattttcatccctaatgttgctgctgtagggctactggatatcgaatcagctcaactcgctctggctcgctatgatactgaacggactctgctcggctcgctttctaactctagcgagctcgtttagcttgcgagccagagcccagtgagggaatggcaatctagagataggcaaggtaaggtctcaaggagtggccagcgacaggctatggcggcaccatgactcacttgcggctagtgctggtctccttgtgctgctacgggcaggtgatcggcggacggaggtatgctggatagcaacaacgatgacacaaggtaatttagtatatactgtacatagcaggcagttaacaaccggcagggcacgggatgatgcgaggtaatccctccgtccaaaaaaagacaaaccctggatttccgtgtccaactttgactgtccgtcttatatgaaatttttttataattcgtattttcattgttgttagatgataaaacatgattaatattttatgcgtgacttgtctttttaatttttttcataattttttcaaataagacggacggtcaaacgttagacacggaaaccaaggtttgtctttttttgggacggaggtagtaaaggagaagtgtgatgtcagtgtcaggcacgacagagcagcggtgtgatgtcagtaggcatgtcacaaggtgatattaggatgaatcttgacataggataaatttttaactcatgataacgtggacgaatctcaaccgttagatttattttggagggccaagatttaccctatatcatctcttgcgacatgcctatcctatatcactgaatctgaatcctgagaattcacggtgcaagtgcgagaggaggcgatgcaagagacgagaaacgcactagtggctcaaacgagattggtggcgccggggtagataggaagaaattttacgaccaaagatgttgggataatgagcgttgagacaactgttgtgcttggctgcctggctgagccttggcttgtttggctcatgatccagcctgagcttgtaaaaaagtgctactaacgtaccaagccaaaactgtcaaccctgaatcaaactagctagatgcttttcgttgttgcagctactgatagtgagtactctgtctgtttcataatataagtcattctagcatctttcatattcatattgatatggaaaaatatttatcaatatgaatgtgagaaatgctagaatgacttacattgtgaaacggaggagataactttttcatagagtgcttatttacccttgtttttactaactatgttccagccaaaatgtaagcatttctatttaaccagacgtatggaatgttaggatgaaaacgctcacaaatattcatgaccgactaacgctgtttttcaatttttactggtaaagtaatgtggaaattgttaccaacaaaaacaaaaacaaaaagatagaaatgataaaaagtacagaaatattgaaaacagagacgattttgatgtatactgagttactgaccgtttctgaattttactacatacttatggaaattaccttttctaattatggtaattactgtattttaaatactcaatatttattgttcatttctttatttgacgtatagtttagaggcccatcaacttctcaattaaataagtactccctttcgttttatacaagactgatatcaaactttaaaactttgactatgaataattttttaaacatttgccttagaaacatgatgaccgtacgtatgttttgatattttatatatatattattatagaaaatattgatcaaagttaagttatttttaagattgtgtccttatccagataacaattattttcaaccaggaag

SEQ ID NO: 2128 - DNA, 838 bp, Oryza sativa
tacatgcacatacagtaggagcagcaaactcatacctggcagggccttatgttggcttgtttgcttcacttgaaaaccaaaatgaaatccagatcgaatgtgaatttgtaccccaaaccgaaaccttgtaaagatctcacagaaaacacataaaaacacatagaaaccttgtaaagatcattaacagatttgcttgaaaattcatcaaccagaacaaaccctccctcagcggcatttaatcagagacctattgtgcagagtagagtaagtgtataacaaatgaatttacatcatcggtccgtttaagtcacaatcaaatagcaccaacaaaaggagtaaactggataggaggattctctttatatctcattaacatttgttagtatttcttttaatacaatcaaacaaaagtgcttgtccatagtattatatttattgacagaagtaagaaaattccttttttttcaataaaaaagtataaaagaataatggaaactggcaggtgttgcatgagtaatccaccaattaataaattaactcaagtcagctattacctgccttaaagggaaagctaatccatcactgcttcttgttgcttacctgcaaaacagagtcttatatcatagccttttgacacaaggaataaagtagtaactaacaggaaattatgtgtttccagagttaaaccaacagaaaactactcaacgttgtaacaagcacgacctgaacatcaaatcctacacatgatgaatccaaaatacttgccttctctgaccctaggcaagatgttttcttttagaaggttacatcgaacatcaaatgactgcacagagcaggt

SEQ ID NO: 2129 - DNA, 1299 bp, Oryza sativa
cctgcagccccacagctgtacgtcactcgtaatcgtcttgccttgcctccaatgatcgtgtgaacaggaagcagatgggcgtgtaccggccaccgggtaggcgtattaaccgtagggacgttttccctcccaatgtgaatcaccaacgacttgatgttgatctcgctcgtcctctcctccttcgacatgctccgtgtttgtagtgacagggagtgcactatcaagttccgactcggcaattgtgagtccgtcactatggtgtgctagctgtagttgcctccgtcgtctagcttctcagcctgttcgctcaccctgacaccctcgcctccatcaacgatgatgaggatggttactggtgtgcatccttcgtcgccactgccgagctcatgccaatgcatggcaaggacgaggtggtgccgtcgttgtggtggtgtccggtgtggtgccgtcgcactaaccgaagtagcagttcatcgttgtggggattgttgccgcacaacaacgcggaggtaagaggtcctccctctgtcctataatatagtaatctatgattggatgggatattttatagtgcaacgaatctgagtaggggtgtgatctatgattggatgggatattttatagtgcaacgaatctgagtaggggtgtgtccagatttgttgtactatgaaatatcaaatacagtcctagattgctatgttatgagacagagggagtaccgcagtggtgcataaaggcgggaagacaatgttaatagtggtggataaaggcgggaagacaatgttgatagagggagtaccgcagtggtggatgaatgcgggaagacaatgttgccaacgagagggatagtttggcatgtgtgctgttggagatggggagtgatgggaggtaatcctccgtccataaaaaaaatcagaataaatctagataagtgtttatacggaattatttgtacaagttgattttttaaaaaaaaatgtaaaaaaaattataggcatccatgttctctcatggtacgaatggtataaaggttcagttcttttgtttttacttgttagaaaggggaaaatattctgtcagaatcggggagcaccagcagatggtcgacacggtttatgctactattaacagcatttgctggaatcctcgaagttgaaaagtcaaagcaaagggaaccgtataaagctacaacaagcctacaatgccttgtttatagaaaactaaatcatcaatatccaaaacgagttcagtacttacatatcttcggtctgaacttacttaatttgatacgaaatctta

SEQ ID NO: 2130 - DNA, 714 bp, Oryza sativa
ttgcattataggagactgcatctttaacaatcagttgattaaagagatgtcttgatatcgtgatttttttgcatttggagtacaccttaacaagagcagtcgccaaaacaacatccagaggtatatatcttcttattaagtaggtatgaatactagcagcatagccgaaatagcatacctcaacacaagcagaaatcacgtttgcgaaggtgacagaatctggagttattttatgctcatgcagcatcacagacaaatagtggattgcatcaaaactctgtccagctctagtaagaccagaaagcatagcattccatgaagctgcagttccctttgaattctgtaaagtagcaactgctgattgataagctccacatcgagtatacaagttcacaatgcaggtctctagaatataatctgagacaacaagtgctctccttatggaatagcaatggagtgatttgccctctttaagtgctcccaaattcccagctatttgcagtaagcttatcatagtcacacggtttacttccaagttgccctgcagcatatcaatggcaatatcaaatgcattccatgcaactgaatccacaatttctgaataaccagtgatcatcgaagtgtaagcaacaacgtccttgtcaatgatctctttaaacactccctgtgaatcgtccatcctatgaagcttgagtattctatagtgtcacctaa

SEQ ID NO: 2131 - DNA, 663 bp, Oryza sativa
tggctacaacttggcagaccagctaggtgcgtacgatcccagatgaatatatggtgccctctatttagatgactaaccagcatgtgccgcgtggcacgcttcgatgatgaacagctcagcagctcggcttcccaatgagcccaccggcgtacctgtcgctgacagcgaagaccatcgtttcgcagatgtacaagggcatcaacttcgcatcaggcggatcaggcctcggtgacaaaaccggccaaggggtttgtttaacttgaacaaatcagtaacacacgttattattctgaaaattctgaaccatatgacacgtgacacgtatgaccgtgccgcccgggctgaaacgaacttgtttttctgaaggccggggatgtaatcccgatgttccagcaagtgcagtacttctcgaaggtggtggcgatgatgcagaagctgtcaggctcgagaacaaccaacactctcctctccaagtccatcttcctcatcagcaccggcagcaacgacatgttcgagtactccttgtccggcggcaacggcgacgaccgcgagtttctgctgggtttcgccgcggcgtacaggtcttacgtgaaggcgttgtaccggctaggcgcgaggaagttcagcgtcgtcagcatcacgccgttgggctgaaccccgtcg

SEQ ID NO: 2132 - DNA, 1514 bp, Oryza sativa
tttgaggacagtattttgatatcttgatgctgttaaattacatatatataatgcgttgacgatgctttgatcttcagatagcatgtgagaaaatattttcatttggctgttcccttccccagaatctattggaagaggacaaggacctagcaaagcagcaacaggagttacttgatggaatttacaagaagtactgcatactagacagtgacgtgatgaatgatatcaagaacctctctcgccgttatggagtcaacctggccggtgactgatcagttttgaccatccaagagacggactgcttcaaaaggtccagatcagtccccagggcgagcaacatgcattggtgtgacccaataactgcatcttctatgtaaatattttttttgagaactttctatgcaaagattctgtagtgttactgttgttcccgcatcctgacccacccagcaacagtatgctcgttttgtgatgtgtataggagtaacttcttgcgctgcgcggagatgattcgctgctgtcggatgctgtctattatgcatgtctgaaattaacttgctgttgattaatcggaggttacattcataatgcctagtcttgccttgtttacattcattgtttcggttcagttgagagttcagagatgtcctgatggggttgcggatattgttgtatcaatctctcactgagcaagtttaataataggatataaccaaccacaaacttttgtgaaagaaagggagaaacaatgttagttctcgtactagcagtaaatgcactacttatataataagtaagagtaagacaaagagatagggaaaaaaaatagagacaaccttatagtaactaatactccctctatctacttttgatagtcgtattttatcttggcacacagaccaaggataagtaattctacttatcatccatttaaacatgttaccagtcattcctcgtaaacaagcgattcattaatatttacatttctcgatgcccatatagccaatcttgtgtggaagaatgaagagtcatgcattacaaccaagaaagtcattaagatgatagattgttgaattgaaatatgcctatcaaaaatatttttttcagatttagaaatatgactatcaaaagtagatggagggagtatgctatacatgttagctttagttttttgccgggatggccaacctaattttattaaggctgaaaggaattgttacaaattttacaaaattgacattaaactgtaggggggtggggggttgggggtagagaaaataaaacgaaaaacaaatagggccggctgacagggaggttctcagccaacttctctaaaaataccggcctccctccacaccaaatctcatctctaatttctctataaatctctgagcgtgacttttgctcaaagatcctagcattcctctctttccacacaaactaacataccatcatattagttttagtttgagcttgctaagggcaaccgcaatggttatctataggctatctac

SEQ ID NO: 2133 - DNA, 727 bp, Oryza sativa
ccgtgcgcgtcggcaaggaggaggaaattgtcgagcaggcgctccgcgaacggcgaccgcccgagccgccggagcggctcctgcgcctgcgggtggtggagcagctcggagagcgacaccagcacccgcccgagctgctccgcggcccccgcgacggagcccgccgacgcggccgacgccaggcggcccaccagctccctcatcgtcgccacatcctcgtcaagctggaccaccagaggatggaaccggcacggcaggctcgccgaccggacgcggtaggcctcacccttcgcggccgtcgccgccttgggcgcggggaacgagatcgtgcggcggaagccgaccaccatactccaccacctccgtcactctttgatgggatcgatcaagcgaagggtaacctgtgcaacctgtgcgcggatggcgaaggggaggggggcgcgttttaaatgggaggggggaagtgggattcggggtggaagcgtggaacgctcgaggaaggcgtgggcggcggaagcggtcatggcctcatgggtcgtcacggcgcacggccgcgcgagagtacgtagtagacggtagtagaccgcgaccacaagttgtggggagagaacccaagaatggtgtgggtttctggaccggttctattcgattccaccgtgacgcaaggtcgtgcttggcacgcatagcttttgtctgattttaatccttgtgcttttgggggtgcttt

SEQ ID NO: 2134 - DNA, 6557 bp, Oryza sativa
tcattcttttcttggaagtatgccatatgggattcctttttaatttttacctgttggctgttcttgaggaggtaccacagtttgttaatgtaaattttggtatctcttgatgaggtaccacaaattaatactaaaaactgtggtacctcttgctaccttctcaaggaccgtaaaatcagttatatcacaacctaattatatactttagctattttgagttcggagtctagtacctgatttcttgtataacttaatttgttgcgcaggttatttacatagtagtgagaatggctgtaatgcattcgtctttcacctggaagcattggattggtcttgctgtgacatctgctgcatattttctgccgtacaagcaacttgccaatatgtcagagccagaatactctgagaatggagagttaattaatgctggttatgacttgaacgctggtggaatgtccgagtaaggaaaacacaattgtttttaattattctacttgaaaatgaattattggatattttccatggaaaattattaactttcagttgtggaccttgtaaaattcgccacaaagaccttgatccagcttctttaaaatcagttaccaaattttaaagctgaaattacatgaatactcctaactaaaattagagagctttgaccatcacagtgggttgaaacttttagaattttgacatcatccattgatggaatacatcaacttgtacatgcaaaacttcgtatgccttctgctgtataattgaataataaatcgtcatttgcttcttttcatgcagatatttacaagatgtgatatatatcactctctttgtgcagctgatgtctattttttctgataaattttggtggacatatttggtggtaagattcacacacaccattcttgacttcaattatatttctgtttactatggcgattactttttgttgatgtcactattggtgtcacccctgtttgggatgcccccaatatagaataaagtcaatatttataaactacataaacctgcttgttctgtagcatgttacaacatgaaaacttggttgaaaactatttaaattcttgtcctcatcctctttctttatcctatgtttgtatgtttccattatttgattgatgttccagcatgtctggtgaagattctgtgctgaacttgatattatcattcaacctaattatgccaatggcctaggaatgttatccatgataccatgaccgtctgatctatgcttgtaacttattttgtgaccactggttcataaggtggttttacagcggtatatttgaataacagccacactgcagtaccaatttagattaccgtcactgattgctactactgtaagctgttgtgctcttactttcaatcagtttttcctcgcaatcacaggcatgttaggaatgtaggcacatggcatcatggccaatgagttaaaatctctagaaaattattgtttcgatttatttttgttatacaggcatctaactatggccccctctttttgttgttaaataaaattctcaatgcgcattgcagatggtagctacatatgatgagttgtgcacaataccaagaggcattgccaatcattgttaacttgttattaaccacatacctattgattttcagattccagcttatggtggatacaagatttccggtctgttgagaggagcatttttcggtggtagttcagaggtaaaaatagagtgattgtcagtggcagtacattattatcacaaccgacatttggatatgacttatcagtattgtacctcctgtctgcagggcgaagaagaggatgagaagacccgaaagaaaagggagaagatggagaagaaggcatctagggggaagattatcaaaaccaggactcgttgatggcacatgtagtgtatcggggctcgttgatggctcatgtgtattattgtttgaagggtaggtttgctttacatggctgtccaactgaaatgtaagctgtcgggcagaattgtttcatgaattattcgatcatttgccccagcagcttagtagtagcacaaatttgaactaatcctcttaacttatcgataccagcattatcaatgagcagctctcttttgggttagcatttcccaacaatgagatatggcatatgagaattttctagagtcatatggctgtgttcgctaggggagaatggtaacctgaacagtgcacatgaaaaacggagtattccattaacgcgtaattaattaagtattagttttttttaaaaaaaaatggatcaatatgatttttttaaacaactttcgtatagaaactttttgcaaaaaacgcatcgttcagccgtttgagaaaatgagatgggagtgttggaaactttcccctcttgcaaacacagttgttttccaagcatttgctgatgttgctttcaactatcatttgcaacattttttactcctttgtgtttgcaaattacaatcaatcgtgctggtgtttcagttcattcctattccggcgacagagcaggcagtagacggcgccggcgacgaaaaaactgacgaaccaagcgttgttgtaggctgtctcaaatgccttggagacgctcggtagaactccaacattgtgcaggaatcccggcacgatcggcgcaactccggccgccatcgccgccatggcggcgacgttgaaaccgccctggaaatagtaaggcccgtggctgtcctccgagtagagcgcgtcgacgtccagcgcggttcgccggacgatgtagtggtcggcgaggatgatccctccgatcgggcccatgagagccgagtagccgagcagccatgtgtagacgaagctctcgctggagctgagcagccgccatggctggaaggcgatgccgagcaacgcggtgaccagcgcccccttggcgaacgtgaacttgcgcgggctcatgctgacgagcgcgttcgccggcgccaccacgttggcggcaatgttggtcgtgatggtcgcgaggctgatgccgacgatggcgagcaccgtcgtcaccggcccgccgatgcggccgaggagctcgatggggtcggagatgacgtggccgaagatggcctcggtggcggacgtcacggcgaggccggcgaaggtgaacatgcccatgaacaccggcagcccggcctggccgagcacctggtccgcctggctccgcgcgtaccgcgcgaagtccggtatgttgatggccaccgtcgcccagaagctgatgttcgcggtgagcgacgggaagaacaccttccagaactcggcgcgcgtcagcctcggcggcagcgagaggatgcgcccgaagccgccggcggacacgtaggcccaggccagcagcgcggaggtgagcacgatgagcaccggcgccgagtacttctcgagcttgcggatgccctccatcccgtgcatgatgacgccgagctgcgcggcccagaacgcgaggaagcacgcgaactccagcggcgctgcaccgaggcctggcaccggcgcgagcagcggctggtacgacttgagcctggacggcaggaggaggaacacggcgcggccaccgatccaggactcgatgccgaaccacccgcagccgacgagcgcgcggatgaccgccggcaagtgcgcgccgcgcaccccgaacgccgctcgcgcgagcaccgggaacggcagcccgtgcgtgaccgccggcgcggccgtgagcacgagcgagacgagcaccaccaggttggcgaacgcgacggtcgcgacgccctgcagcgccgacatgccgaggtcgacgaggctgccggcgaggtagtaggacggcacgccgaccacaaggccgacccagaggctggctaggtcccaggccgtcatggtgcgctccgacggcggcgtcggcgacaggtccgactcactcgacgacatcctgggcctcgccggtagcatccgcgggcgcgacgcgagcgtgagcccgggactccgaggaagaagaggaagccgcggcggggacgcatggtggctcttcacctcaattcggtggcccaaatggcttcgatgccgcgcggcgagagctctcgacatcgccatggacatggccatggccggtgggggaagcaggggaaggagaagttcttggttgctttgctcgatgaggaggagagctcgagaggatatgggatctcgtcgcttggttggttgcactgcgtgccactgttcaccggggcccactgccttcgacagcgaggaaagattccgttagtgctcggccgccgttggatcctcgctctctgagactgtgactcgcaatctgaaccgttggatgggaggagtattattttaaggacatgtgagacgtgtttggggaaggtgattctgactttggtgagagcgagacgaggatttggagtgttggacacttttgccgtgaggttgattggctgatctaacaaggggtacttgttatgaccatgtgatgcgatgataggccagctttgggttttttttacatgataatctcatccaagctgccatctacatgtagctgccaataggaaaattttgccaacttgtgatttgtttatagttgagtttttgtcatgactggcgaaccccttaaccacgttccctttgagatatctgcataagtgaaaagagaattccaaaatgccatcaggatgagccacatcatcaaacaaatattaacccttcgatacaacaattcggttggagttagacacagttattaagatagtaggtagaagtgaatggtggaggattgtgattggatgaatattagaggtaggtgggaaaagtgaatggtggagggttgtgattggttgagaagagaatgttgatagagaagttattatattttggaacggagtgagtagcaaacaatattattgttgttctagaaccttcatgcaatacccatgagatacttcctccatactcataaaggacaatgtttaagtcaaaacttgggaatataaatcatgaataactctcaagttgttgagtttaaaaatgtaaaaattatatgtatagatttgtcttgaaaaatactttcataaaagtatacatatatcacttttcaataaatatttttatagaaacaagaagttaaagttgtattttgtacaccgtgtcactgttctaaacgactttctttatgagtatggagggagtatgtggtaagaaagatatgagaatgaaaaaaaagtacattgacaaaaaaatcaccaatgaatattcatagaagttctattgcataaaaaataacgagtattaatgtatagatgaatagctaattaacctggtgctatcgattatttcattatgccttaaaattacaaatcatgttgcatggaagacattccattggagcagttcatactttagattgatgtcattttcaaccatacaattttttttaaagtttccaaaaaaatgttcgcgtttagtttgttgccaaatttggtaaataaataaaaaaatcctgtcaaaattttgacaatattgccatattgcctgaattttggcattgaaaaaatttggtaagatttattttggctacaatctgaacagtcttataagatttacgttaaaaattgtatatatacttctcaactggtcatgacagaattgcaatgtgtagaagatgtgagtatttacattattaaatttagaaattgaaggaggtaatggtcacggtaacatatgataaattattttttaaaataatattcttaatcacaaatcaaagatatagatatctgttagtgttatagctatacttcaaaatgtgttaaaaatgtatttgtttttaattattattaaaacatttaggctcattaacacaaacaacatataagcacatctaatagacagagaggttatattcgcacaaacgtgcgactcaacaggctagttgctaatgaatgatccgcaatgagggcgttgaaaaaacatttcatagtgtggaacaaatgcgatgtactacaaatatggcgccccgaactactatgcgtggtttataaatatagggccccaaactactatgcgtggttcctgccgcctgatatacttttatgcacgcgctaattccctccctctctctctcgcggctactccttctcctttcacttatcttttaaacgatttttctattaaaataattttctgatttatgatttaattatatcatttaatctttaccacaagaccttaccaaaaaaaatgaacgttgtttcactccattaagaacattgtttcactccactgcataaatacaacatttaaaactgctaactggagcatcaacaaccaattatatgagacaataagttctaacgagtgaaacaaaaaagacatacgaaaaatatgttatatttgcaaatacttaatgttgttgaagtgtttttatatatgtatgaaacaataagttgtactagttaaaaccttataaaatatttactgaaacattaagaataccatgtgcaacattaaaaattcaattaaatatcaaatatttttcagtggaggataaccatgtg

SEQ ID NO: 2135 - DNA, 566 bp, Oryza sativa
aactacagtcagtgtgaagaatccttgcctccaaagcggtggtgtatcatagctcatcatgttttgcgcctttatcatctgactttggtgtatcagatggcggggaagtagttcctggtgactccggattatctcccaagattcgtgctgtgaactgccttgcttcactgtcaagatcaacccactctggaacaattcttttggcaccctagaaagtcgatttataaccttaaaattagttctagacaagaaacaggaaacaaaatatggactattactgcaaaataattttacctgaagctttggctcctttgtcattgggttgttgcaaagatcaatggtttttgctcttgcctttgtggcatttccacaccaagattcacaccatagccattcttgagggagagagaatatgggcacagtatgctgagcataatttgggagatcctgaatataaaggtgttgcaagtaagcattcacacatgttcacatctgtaaactgcatttgtgtagtttcttccattaatctctgcacaccacagcatgtttctgcaaactagtttttt

SEQ ID NO: 2136 - DNA, 3148 bp, Oryza sativa
ggaggataaccatgtgtgctcttattgtaaaattttaattttaacgaatttaatgtacaattaatcatagattgtataaatagtttaaaagaaaaaaatcgatgagtttgttacctacaaacatatgaagagtactacttagcataaaacaaaaacaagaggaagcagcgagagggcgccgaggatgacaactatgtggcgacgctccggtgaggcacggcatgatcgaggatcggtagcgttctctggggttcagaatcttaaacaccgactctctggatcttttatagccgtccgattaggcatgtacgaaccggatgagcggaaaaaataatccacaatcaaagaccgcgtagtccgttagccgcacgaacaacaccttaaccacgccgatgcgcctgcgctactctgcacacaggacacagcgcacctctgattccgtcatggagaccagaactactctcgacctcaagccagggtgcttcttcctgtacgcggtacgccaacgtggcggtgtcactgtggatgttaagtgcgtatgccggagcctagagacgagggcgtcgaggggccgaagcaggggtcagccacgatgtatgggcgctccggccctgtggcgaagcatgcggcgggggttcggtgaataaaaatccgactcccattgggatatctgccggccgttcgatccggcatgtgcggcacagatgagccgaaaattatcacggtctcgcacaccccgtttgggctgccgtctcccgtgccgttttctatcactcatcagcgcttgacatttcatgaacctttcctcccacaaattagatgctggagaaatacgcatgtacacaccgaagaaaaaatattaaaaaaatgaataatacaagtgaagaaatgtcacaaaccagtatttaacaaccgaatcaatccaaacacaaacaaatcctcaaagcagagagaaaacacgcaagatgtgtacaatttgccatgcattcagtcgtgaacgcgccgccggcgcgcactcagatatggacgtggcagttcacccgatcgaacgagctcggcgacgagaagtcgacgaccaccggcgagcagctcgcgcgcaacttgtagcgccgtgtcctcaccaagccgtaccggaaccgcaccttgcccttgatgtgcacgtccaccggcagcttcccgtcggacctgtccttcttcacggtcgcctccacgccccgcggcagcgccgccctcacggcgggcgcggccacgtcgatcctcttcacgttcagcggcggcaggtcgaacccgggcgccacggcgccggcgaggtacgtgccgccgtaccacaccccgacctcgaccgacttgtaccacacggcggcgcgcttgttctggttgtatgcgcgcagggtgatgtcgaaggtgccgttgaggctgccgccggacgtgaagttgaacccggtcaccgcggcgtggtcgacgtagacgagcagcggcttcgccgggcggaccgtcagccacaggatgacgatgatcaccagcaagacgacaatcgccagcagcgccgccgcgatgcacttcgacgtcgttggccgcggccgccgcgtcgtgctcccctgacgcgccattcttccacacacacacagagtaaactatcgctagcttggtcactacagggaaccagatcgatcgagcttaacccaggagtttgtgattaagtttacatcgtagcgtctctatatatatagcaacaactggacgatactttgagtagcgagaggaggttccacgggctgtcacacaggctgtggttggagtaggcggcggttttggtacgtgttgttgccgacgagagctagctcgatcggtgagacagtgagacgatcgctttgcctctttcctttgcacggctaagcgttcgtcgtgtcccatctcgtgtggtcttttggtttgtaggaacctctcgagcgagcggcagagcgctttggatggagctttggttttggaatccttctggcacactcctgttgcttaggaatcattgtcaaggggagggaaagcacatcgcaaagacagcctgcaaaacgggtgcatatgtatctaggatgaactcacatattcacatatgcgaattttactttgggatgaaaagcgggatgtagaagagccaggaatgtggaaaggcgccgaccggtgaaaaggtcgtgtggcgtcctagtgaattgtacatttgatgacagcccaccatgtgaaacaaggccgccacttcagcactgtgggcctggctcatgctcggcccagcaaaggccatttcaccaggtttttttttttggaataagttcacttggtggcccttaaaagtgatcgaaatctaatcagtgacctaaaccacagtaccggatatctcgacccccaaactcttaaaaccggtgtaatttgactccctcggcggttttgaagggcggtttcgctaacatggcgcctacgtgtcagtgttgaccttgtcatcgtccaacgtggtgtttgacgtggcatttatatgacattaaaatataaaaaatataatttaactcacttgtcaatcacacaaacaaaaaggtgggacccacttacacatggggctcacaaccatccgctccttcccttctctctttctctctctccccttcctcttcccctttgttgcgctggagtggcgggcagggccggagcagcggcggcgacagcggacgagggccgagacgcgagcggcggcagcggcgggcgagggctggaagagagggaggagaggcggcgctgccgagatcatgcccgctcgccgccgtcgagctactcctctactccgtcgctgcctgccgaagcaccgtcgccgtctgacgctatcgccgagatctcgcccgcccgccacccctcattggctacctctgccatccccgtctgaggccattgtgacattccggcttagggcttaatagaattaatagaatactcataccaacaagttgcaacttcttttccagaagccgataactctgaggttaagcgtgctcggtttgtagcaatttagggatgggtgaccgatcgggaagaattgtgttggtctgatgacctataaaaactgccagatgtaagtgggccccgcctgggagaggaggtgggatctttt

SEQ ID NO: 2137 - DNA, 702 bp, Oryza sativa
tccatttccttttgtcgttagttcagcacttcagttccttagatgtaagctaccaagttgtagattattttattatttgtcatgttccataatttgcagggacattaaaggtgcaaacatactggtagatcctaatggtcgtgtaaagcttgctgacttcggaatggcaaaacatgtaaattctctgtttcaaattgtaaaaaaaaaaatctttctcatttgtcaggaataactaaaatttaaagcaaaagcattattagatgtaattccttgtatcatcttcataggaagaaatggtgtattgtgctttaccctttccctcgtgttctcttgcacttgaggactaccacttgtgctagatcaatccattcaataagagataaccattttgttttggtccttaccgtatctgtcagcacatttgctggcttacttggaccaaatggttatgcatgtttctatgctagttactaggcagtagtttgtttaccatagatgtagtgccattttattagtaatataagcttgtataccttcatgggccgactcttatgggccatttggataagtgattagttgtttctagcaagttatatgtttatgggaaggtccttttgtctatagatgtttcttctttggatatttatccgcgcatatgaacttcttttctgccaatccatttttcagatcaatgggcagcag

SEQ ID NO: 2138 - DNA, 2639 bp, Oryza sativa
cttttttagaagccaagagattgtcctggaaattcttccagaaaaaacttgtgtatgtctgtgagcgcagtttatgacctataaaagctgtcagatgtaagtgggcccggcctgggagaggaggtgggatcttttccggaagccgatctctaaaaaacttgtgttggtctgtgagcgcagtctatgacctataaaagttgccagatctaagtggccccggcctgggagaggtgggatcttttctggaagccgatctctaaagaatgggagaggtgggatcttttccggaagccgatctctaaagaactttgaggttaagtgtgcttggcctagaaatctatggcctataaaagctgccagatgtaagtggccctggcctgagagaggtgggatcttttccggaagccgatctctaaagaactctgaggttaagtgtgcttgcctgggagaggtgggatcttttttagaaaccaagagattggcctggaaattcttccagaaaaaacttgtgtatgtctgtgagcgcagtctatgacctataaaagctgccagatctaagtgggcccagcctgggagaggtgggatcttttccggaagccgatctctaaagaatgggagaggtgggatcttttccggaagccgatctctaaaaaacttgtgttggtctgtgagcgcagtctataacctataaaagttgccagatctaagtggtcccggcctgggggaggtgggatcttttctgaaagccgatctctaaagaactttgaggttaagtgtgcttggcctggaaatctattgcctataaaaactgccagatgtaagtggtcccggcttgagagaggtgggatcttttccggaagccgatctctaaagaactctgaggttaagtgtgcttggcctagaaattctctgaggttaagtgtgcttgacctggaaattcttccaaaaaagacttgtgttggtctgtgagcgtagtctttgaccccgacatgggagaggtgggatctttttcggaagccgatctctaaagaactctgaggttaagtgtgcttggcctgaaaattcttccagaaaagacttgtgttggtctgtgagcgcagtctatgacccataaaaattcttccagaaaagacttgtgttgttttgtgagcgcaatctatgacctataaaagctgtcagatgtaagtgggcctagcctgggagaggtgggatcttttccagaagccgatctctaaagaactttgaggttaagtatgcttggcctggaaattcttcccaaatgcgcacgagtgaggacaaagtgtgcagaaaagacttgtgttggtctgtgagagcagcatatgacctataaaagctgctagatgtaagtaggcccggcctgagaaggcgggacgttacagcatccacggcgccggcgcgagcgcgagcgcgaggtgaggcaccggcggtggcggcgacaacacaagctcggcggctccgcctctcccctctccctttcggccctcgcacgccgccgttgccgctccggccccgcccgctgctccagcgcagcaaagggggagagaaagggaaggagaggatggttgtgggccccacgtgttagtgggtcctactatttttttttgtgtgattgacagatgggtccatatatattttttaaaattttaatgccacgtaaacgccacttgaacgatgactaggtcaatattaacatgtaggcgccacttcagcgaaaccggccttcaaaaccgccgaggcattcaaattgcaccggttttaagagtttgggggtcgagatatctggttttgtgatctagagtcatagattagatttcaatcaccaagtgaacttattcctttttttttcaacgtgggagtatcagactgtgttgggcgagctacagtgactaaaagcgagctccacatccggcacctcaagtaatttcttattaaatttggaaggcaaagctcctttaggaaaattattttcaactatttttctataaattacaagtctgctttcattttctgggaatcaaatattatgcttctgtttgtcttatcatttctcaaacattttagtctgttagaaattatcggtaataaatatgagatatcctgcacacttacagataatcagtgagaattctctatcggatttgctagatttctgttaacagaaaacaaggagaaaaaatttcgattttttggccgtcggatttgccttgagattcgtgctggtatgtggaggggaaaaatctgcgtgagaaagcctgtgtacttgcaagggttcgaacttatcacctcactcccgcacctcaaggtgaccagataatcctttggtttcaaggggttcgaacttagcaccttgaacttagcttgtgcacttgccttttttttctcgctcgcacggtggacggcgagaaaaaaatggattggcgccaagattcaaacccaaaaaagggagcaatgccagaattcaaacccaacacacggaattcggtggtgaacacaaaccattaggatacatcaagttatagactaacttgagcaaatgaccatactccatataatactccttcggactgataatatcaagaattttaaaccctgagagtattgcgtaccgttacatgggt

SEQ ID NO: 2139 - DNA, 580 bp, Oryza sativa
ctggcttcaccagagtactcttatataatacatttctaatgcttgaaaaccttgtgccagctttgtaagctaaattgtggcttaacatactacttgttctaagccagtatgtaaatttaataccaccgtgacaaatattccttcactttattctttccttgcccttcttaggatggtaagatttatgttaagtatggtttgcttgggcctattacgttctcagacccctcgagaaccttgcctagtctatatatgtatacaactgtttatgtattgacactattgaggtactttgtgttctccaagcatagaagttttgctttgtgtaaagtaagattcttaattctttatttgatgacagactgatgagtcaactgaggcatctgctaaagatgtttttgaagagaattacaaagaattaattaaatgggttgatgccaaaactacaaaatacggctctttaactgtcctgcgtgagaggcgctgtggaagacttggcactgcattgaaggtatattcttcctataccaattacccattaatattttcatagcattgcaattatgattaaatttaaatg

SEQ ID NO: 2140 - DNA, 1603 bp, Oryza sativa
  unsure (1)..(1603): unsure at all n locations
tgctgtttttgtggtcttgtataatatgctatactgcaagttcaggtttaaatccatattcaagatcatcatggaccctaagtattttccctctgtatattttcactctcatcattctatttcatattcaacttatatgatgattgtctaagacttgcaggttgataatgataaagaaaagggagtttcatctggaagaaagagtatttcagagagattggatgacgaggtaggagcactttagtccttaaggtcctttgaactcattatcttatatgaagtgttcttttcggaagatgtttcttggtagaaagtaaataaattctatatgcatgcaactgatcattaatgacgaatttgtgttggatagattgttgtggacttaagctacttagaaagaatcataacttctacctgttttaagttaatttattttaggtaaaatggtatttctgattgcaatataaaatcgtagggaataatactgtcttgacattaaattgattgatcaggttcgagacaccaagataaagttcctttctggctttaatcaagaaactgaggatgacaagtcttcttggacggcacttgttgcttctcttaaggtagcaacagcttctcttccttagtcatatttatcctatgatttgttatcacactaagaaagaccagacatgattattttattgttatatacatggtgttaaacttaaatgcatcactttgttaacaatatgccaaaaaagtggtcctttagcatccaaaggtcacaattttaattttataatactgaaagcttgcagttcgccttattagcaccaaaggnttaccttcgttcttctnatttagcattccgntcaaaattcaaaacttctgttggttttctcttttttttttatctggaaagaaagatgtggaataccaacagtaccctttgctttcttcctcctacaacccattccctatctcaaatgagatcagccatggttgccatggagactctcgccaccccattgagctcaccaggcatgaccagtcaggtctcaggtcttgagcttgcccagccgctgcagttcgagcctcaatctcgtctgactgctggaaatatttgtagtttgcagattcataacaaaacttgatgtcgactctagtttgttttccttatttattagttttatttatgagcatctgtagtttgcagaattgtgattacagtggtacatgtaatcttagttatttttaattaatgctaagatgttacaataaagaaagacaatgatatcaatgtaatttgaatttttattgcctaacatgttaaattgtgccattttattataaaaattatgagctacatttgtttatattctccaatgtcaattaaatcaccttaaccattattgcatattgcagccagagtatcccaagtatacacctttgcttgccaaaattttggaatgcatagttcagaaagcaacttcagatgataagtttagccatcaaaaagaggtaattaatatttccttttcattttatgtttccctgcatcttactatgttgaataaaaaaaatgttcaaacaattttaccacatctatggctggaca

SEQ ID NO: 2141 - DNA, 839 bp, Oryza sativa
ccccatcccccccccccaacaaaatttaacagtaacaagaaaatgtttcaaaacattccagaagaacttatgctctatccctgtttccacaataacctgattagtacaatactcctctataggactgcaattgcatatgtgcaacctacataataatgatagaagttttggtggtggtgcaatatgcacaaatcacaggataatattagatgttaatgtacacaactctagtgcttacacatgataattcacacttcacagcatttttgactggctaaatttccatagttaccacccatacccccaaaactgaaatgacatggggtttgtttggtgaaagagatgatgttatttataatcaacaacatttacatgccctcaataaagcatgcaattaaaatatgaaatgagtctcgtactcattaacaatataggacacaatacctttttctctagcttcctctcgataaatagaaccaactgcttcagtttctccaataactgcacattgtcatgcctacaccatccattagacaaattcacgcaataaaccatatttttttactgaagcaacaaaacatagagtacgatctatgaaattgtcaaaaacaaccaacataagataactctgcaaatctacaattgaaaagataccaaaaataccatatggtgggtgcaaagaaatgtctcttttcttatgtgtattttatcataataatgattttatatctatcatttatttgcaaattgaaccacatcaccatggcacaatcactaagaaaagccctaaagaatgccaaggaaggctggaccgcgatggataaggaaaaggaaccatt

SEQ ID NO: 2142 - DNA, 1060 bp, Oryza sativa
tgacttacgatggtatacatttggcggtagcaccagccaaaatcttgtcgttgaaaagacgagacaagtgctccatttataaccatcgttttactagagcagtcatcctgatattcagctggcgtcgaccgtaagtttatgcgggaaggataaacgatgtcgtcaataactaaaccgggaaattagaatgggaagatgacaagcagacaaaactgcacaaaccgatgagcttagcagtagcaggcagccttcttaagttcttattaccatttgaagaaataaaatacctagtgaaaaactaccaaaccagcaagtttgctaccaacaatgacaaaaatagtaaaatactgaatccatggtgatgaaaaatgagtgaaaaatagtcctaacaattaaaacggaggcaaagatgggggaaatcggacatgcatccactgcttctcgtaggccgatacatggacccatcctatctcctcaatcaattggatcttcaaatcataaagtcttttctttggttgctcagagtcatcttgaatcatgtcattcagaacctgtccacgaataaagttaagaccagcaaagtagtaggtgcatcggaaaaaaattgggggttaagatggcaagttaacaaaactaagtttagaatttctaggatgtcaagttgtttgttgtttttctttggagaaagtaggcatgccaaagtcaatcttctaatttttatttatgaaaattgatcgtttaattctggtgatgtggtttctcgactatagcattttacatttctgccttgttacaaaacaatatatcatgcagtgcaaattgaatgatattcaataatttgttctcatcaataactatagtcggtgcagcttctacaaaaacacagttgaaccatagcaagtgaaaacggagcctgatgcaaactctactcatatcacgatttaggcaaagtgcaataatcttactgtaatagatttattatagttcacaaaattgagaaactcaacaagatcagtaagttctactgaccaaaacgagttaagggaacagcattttactg

SEQ ID NO: 2143 - DNA, 5662 bp, Oryza sativa
ccacaaaaatacttactgtatactgtatactaaaatttctgagtttaacattgcagtcttctgaattgatacaggactcacagctgatacactgagtgcgacaaaggtgagtcatgtgcggcaaatttgaggatcatgtatattttggtattgctggcaggcataagtctcaccattgagcgaaacaccacattcataagtttaacggctatttatctaaattcaattttgcaaaaatgaaagttttgtttaatggctgaaactgcacagtgctactatgatctcagaaccaaagaaattaattgtctgagtttcctaccagcaaattgatttgttcaaagatttaggtggtcacgggccataataaatcattgagaatatgtcatataacattcagtcatgtatcacaaacaatttgattttgacaaaattaggtaacacataaatcaatgtatgcaaacatccagatacctaacactattgactgcttttttgtttcgagggggctcactgcttatattttattgagcttagctatattgtatttctctaaactgcataaccatctcactgcatagcccatatctatataccaccgtgacaataacagctacatctctacaatcttactactggtaagaaatgaaggattggtggtacataaagtgcctcaagttgattgaaacaagcaaccatttgtagatccaaacaatatcgtcgttgttattgtcatacatcttgtttgtataacttacatatctttcagactcaaggtggcgaagtttgatctctaaaatagcaatcggtgttttctgcactcgaatatgtaaataagctgtagtgtgtcagatattacaatggtgttcattatagagcacacttgccgacaacattttgcagtgggcttatctatgaatattttttttattcatctgttgcatggttaccagtgtgctgtatgtttcattcaattcgacctggatttgtaggcacgtctaaatggttcatggttcatgagcacgtattgtaaacatgagttggattactaatcctaaatcttgtcgattaggtatgtatggatcaagaattggatttggagatataatcaataaccaaacaagtgtagtgaaacaggaagttcattatatgtattactattgattccttagaaaaataagatcatataaaaaacatgaaacattaaatattaaaagttattaaagatagcgtttagcacgggcgtattactagtgaaaaaaggcccctaaatatccatcatctaactctctgccaccgtacatgaaaaaaataacatatgtaatttggatttcctatcgtaacgcacgagcatctttactattcttaaaagaaagagaaaagagagagatgaaaggaaaatgttcacttgaggtctcttatcttgtcgttgagtttcaaaactgtccatgaactaaaataccagatataacagatccctaatcttgcaaaaccaggtcacattacgtctcaaggcactattgctccctggttttagtgatgcggtggctgagtcagcgtggggccatatgggtcccacatatcaaccgataatcttctcccacgtatctcccctttcttcccgtctcaacccaaacttccagggcagccgacaagaggtggggagaagagtggcgactgacggctgcatcatggacctacatggtgaagagcgcaaagaagcgaagtaggaagggctcctgacacgtcgtccccttgggttacactgtcacatcgttgcatggcagctcgctgcgcatctgcgccgcgtccgtatcgtggtcatatgtcagccacaccgttgagattggcgagaggatctccaagagttgggagatggagtatcgttgcgacgcctgagcatagtcgcgagcatcactgactccatgagtgttcgtgcatgcacacgaagaggaagccggacactgaatcgcgggagaggtgtgtggtggccgatgaccagcagggagaagggtggcggtcgttgggcggcggcggtaggtagaagcctgacgatgggtgggagaaggctggcagccaacaagaagcttggcagcggcggggagaagggcgcatgcgtcggggacgatgcgaccgcaatgtggtgtagatgaagttgacctcgaagacgatgtggcggaaccgcgtgtgtgcctctgcagacgagaggcggagctcggggacacctaaacacatcagcttttgagcagctcgacggggggcgactatgagctagggggataggagcttggccagtgtgatgaggcagaagcctcagcccttgtgcgtgcaggtgaagacgacattgcagttgtagttgagacccgcgcgcgcaaatccatgatgtgagcgctcccggccattgggagccacgtcagcggcggcctccgccgtcgagcttttccccaccgaccgacacccttctcccaacccattggcagatgccctgaaggtttgggttgagatgggagtagaggggagtgaggtggaagaagattgccggttgacttgtggagtccacgtgggacttagccgccacatcaataaaaccggaaaacaatactaccttgggatcaaaagtgatccggttttacaagattagaggagggtttaggaccgtttaaaactcgacgacaagataagggaccttatatgaacttttttgggagatgaaaaaattccagccccaggggcctgtgcatatgacccataggcaggcgacaccgcggcggcagagcgctgcacgacctccgcctccccaatccgccccgtctccttgcccgccgccccccgactcccgtctcctcgcattcgctcaccggtgagcatcctaatccatcccatccggcctcggcctcgaatttcgtctcctcgcccgccgcttgcgccgatccccatcctgcgagcaaggtggcgcccggcgtcctcctgcttccaccgcatcgtctatcgccggtgaccatccctccctccctatccacacctcatcaggtattctgcgttatccctcaaaaaagtttgggggttcaaccgaaaaccgacccctcaaccgaaacagggttagatctgcctctgcccagttgcacctactttcaacttgttaattttgatttttgtttttagcacatgtaatttggttactgaatctcatccaaacacccttagaatagttgcattagaacggaaaatgtaagctcacataatttgtactcatcctaactcacataaatttcttaagaagaatctataccacaaactactcatagtcactcaaaaaatctttttattaaggtatatattcttataagaagttttcattccataaaattttctaaaggacatactgtgacacttggcattaatctaagggtgtgtttagatccaaactttgaatccaaagtttgcaaaattccatcacatcaacatgtcatacacacacaacttttcagtcacatcatctctaatttcaactaaaatccaaactttggatggaactaaacgcagcctaatttaacatttttttctttattaggttataaattttctaaaaaacatattgtgccacttggcattaatctaatttaacattctttatcaggttataaattgaaaccatcgaacgtactttgtcttcccgtttctaaaacattgcgatatatctataatattttaatttcaaaaataatttagactaacagtatagatatttaaattaggtaattaataaattcaaataaactatagtttagaataaaaaacaaaataatatatgccaagtacaatctaataacaatagaatgttagagacaatgtgaattcaatatttttataaagtttattttgggacggaggtagtagtaaattagccgggaaggcacactctggttgatctaaccccgagtcaaaaccatttctctacctggcaaactcagatggcggagctgaccacagccgctgatgtcaccgccgccccgccgcctccacctgggccaactccaccaccggagcccgtggtcacggccacggtcgttgccgagcagaaggtctctcctactgctcctccgctcgatgtgccggcacccgcaccgccgccgccgaagaagcgtaaggtggaggaggcggggttccataactccgcctactacaagatccgggccaccgtcgccgacctccgtgttcgtttcgtgcaggtctgcgctctccccgcaaaatccctctcctttttttttccgctactggttactttcgctactggttacttgcagtgcttgtgtgtgggggatggcgtgttgatctccgtaaacctggggttttggggaaaaaaaatttaagcaacgacgctgcttaggagacctgccaaactgaactctcgcaagacttgtacaattgcacttgatatgtaacatgggatttcgcataatgatctgttctgagttacctactctctcttttgaaggtttacgaagctactgatttccgaaacagtgatgctgctcgcgagattctgaaaggtaaaaaaatgtctcgaatttatgtcttgttagaaagtcactaattgctccatttagttggtaggaatcaacctagggctcgtgaaaaaaacatgaaaattgaacattggttggtccaaatatcataattttgtgctttatataattccacccagtgaaattttcggtgctgctctcctgtctgttactgtggctgtagccggggaggttacttgggtgaaggtggagcatcagggcttatcgcttccattgtgaatgctcgaatggtgtaggcaggaggcagttgaggcattgtagtgttgtgtttagttcacgccaaaattggaagtttgattgaaaatggaacgatgtgacggaaaagttaaaagtttgtgtgtgtaggaaagttttgatgtgatggaaaagttggaagtttgaagaaaaagtttggaactaaactcggcctaggtgtgtgtggcgagttggtgactgggagctcctagagggactcatcagagctgaggtagggcccacacggcggtgccacatcttcaatgggaagctgctgctttacataggaagtggtggagaagtacacttgttggtgattttgagtgaatgagtgagacttctatgtgaggattgaatgttaatggaggaaagtgtttaataacatgggcgggattagggtggaataatccaacttgcatgtcagcacttgaatgtatagcaggaggttttatagtcgtagaagttaggatgctttggttctgacccttgatggcgatgcattgcagctgactgtggtgataatcaggtagcagaaaaaccatgtgcaggagaaccgtgcacaaatggcagaagaggagagaagcaaacgggtactttattcaggcccatatatggacaagaccaccctcctaaataaccaaatcttatgcgtaagaactcagttaattgcctaactttaagagctatctcatctaaagaagtctgtgctaatgcatcctcaactaaatggcaacttggctacaccagctgtagagtgccttggtcaacatggtagataaatgtgtagctgcaccagctataagcctggatcaacatggtagataaatgtgtatcaatattcaata

SEQ ID NO: 2144 - DNA, 6719 bp, Oryza sativa
  unsure (1)..(6719): unsure at all n locations
attcctgcagcccgacaattagtgcaaatgcttttccttaaacctaacgagaaaaatcagaaaagcatgttgtgccaacacataaagccttgagttccttcagaaagacacaggacaatatggtcagccattcctttatctctatttgaagtttttaagtttctaacttttttattaaagcaaaaaactgtgtggatccctattacagtgacttagaacttatccttttccatattctgttcagttttgctaattttggaacataaggcaaatttcctatgcagagagattatagtaaaacatgagcgcaactcctcgagtgagccatgaaagagcacccatcaatccaaatgttcagtgctcaaaatatacactcatatcatggtttatctagacaaagttgcctcgtaaaaagaacagcggtcagttttagtttctggaaaggttcaggacttgaggttggggagtaacatgatagtattagggactggtcgcataccatgtgtactccatcccctcagctggtgcttgtacgacacagtgagctccagcagccatagctggtgagacataagcgccaacgccaataatgcttgaactagtaccaccaggagcaccgacagtgtttaaagcaggaccattgtttccagcactactaataaatataatacgatgcttgtctacaacctgtgaaacagtataaagctccagttaagattttacagagcattctaggcatggataagaaataacaccacattaaaggacccacctcactagcaagatcaataaatctgccatagtcaggaagaagggtaggctctccatagctcatgttaatcagatcacatttgtgctggataaacaacaaataaaggaggcattaaagaaaaaataaagtaactgaagttcaagacgtgaatggtagtgaataaagaaaaacttaaatatcaagtagaacaagaggtaatacatgttttgatcgaatcattgatcctcaagcactgagcacttagttgggatgtatttacaaaataattgcattgaacagaacagattcaagtacattttgttatttattctgatgaattgatacaaaaaaaactaaggaagcgtaatcacctctactgcagctatcaaggccctaaccaggcctgtccctgtctccattgatcctaaacgggtatcgccaatcttgcaggaaatcagttgtgcacccggtgcaactccattgagcaaaggttcctgtttaaagacattgtcaacagatcagtgccattataattttcataaaatgaaaatcaaagagtcaaggacatacatcaggatgaaaagcagctgcaatgcccgcaacatgggtagcatgaggagagcaatcagttactatactaacaaggtttccatcatcgtaaatgtttgctacaaaagagcaagcatctaatttgctaaaaatcccaaacttccgctcaagtctgcagataattttaaataaatcaggaacacaacacattgaagataacctttcagtttgtacatctaacatggatggatggaataagataagatacaagatcagcatcttgtactctaaacaataagtgaaacatgggtaatacaatgtttatgcacttcataataaagtactatttcatatttgatcaccgtcttctaggtctctgactctacatgagatgcatgcagtttcataagttcaaattgggcagcaggtccagtcagaagaagggatgcagcaggaacagaattataatcgtataaaactaagcgagagagcacacttttgattaagggcttaaaagaattagagcttgcatttcagagaagtattcatgtgcctacaacacacacaaatagaaaaccaacaaataatacatctgggataagaaatgagcaatgaaccatgtgtctgcaaggaaggttctaatttacaacatcaataagaaaacaagattgaccatacctgtagtttgtcaatggaacaaaatctgcaagttttccacaatttttgttgccctcaaggccctgggtatcaacagcaaccctccacacatcaccatcgtgccatgcaacaatatcaattaccggccccctgtcatcgtaaccctacagaaacaaaagtaagacatataaagtagcagacgttggctaaaacttcacctcatgctatatgctcgttttccttacttctgcttgtttcctcaggtactcaagcctgctttgcaggtcttcacgagccattttttgtttggcgtcatcagatttactgtgtttctgcaataattttttaatggggttgagacattcttgcagaaagtgctcacaattttcatagaaggtagtgcaaagcagcaaacacttccccttaattaatacattaattcaaacattagcaacacataggccatttcacatttacttttatttacatcctacacttcaatcatatgctatatcacaaaagttcacaataattgacaacagcaaccgtgcaaactatccataaagaaacagacgaaagacacagggtgaatgaaaactgtaacaggagtgaacctaaaattcctaaatgcactcaaagaaagtcatctccaaccttttcgaattcattcagctgtttcaaggcctcagatattgcttcttggttgtgctcgtcccatttcttctttctttctttctgaagtcataatgcgtaagttcttacaaagatatcttgttacaaaccttcagaatgcaggcaccaagtacaaagtttaccttcaaacgagaggtaagtgtgtccgtgaagagttcatagactaatttacagccaacatgccactcttgagaagggttcttccatgagggatttatagtcagatgggtgcctgggtgaaagcagagttagcgtatcagttaaggcaggaactcaacgttcagaatatggtatttctgtagacatgggcccctgtaaaacacagttgatatagatgatatctttaaaacaaatagaattgatatcagaattagcatgctaaagtttgataacaaagaaaatttccacagaaactatcattaaagggaaaaaatcatgcgccaatagcttgaaattctccacgctatatgaataatataaataatgcagacctaaacggtcaatacaagcaaaataaacatgcttcaatagcttgaaattctcctatgcatgaataatgtaaacaaaccaaaaaattataagaccaacctgaagcaccaacaatagaaccatcatcatcagctttcaccactttggacgtgtcaacatcaccactacccgtgctgcacttaaacacatgtatgtgaataggctgttgaagaagcatgtcaaaagaaaaccaacaagcttcactatttcagaggggttacagcaccagtcaataacatcaaggatcttgggctttccatctgaagtagtctgcaaaccagctgcanccggatcaactccagaatctgtcacacatacaagtcaattggcaaccatatcttttttttttcgaaaccaatagacctacaacaatgaaattataataatatatacatatttgcatgaccaagtcagatatattgcagatcatccaaggactcaaacctctgacaagtaaattatatatcaaccttcctaagaagcatgcatgtagttcagtggttgtaatggcatctgaatagtaaagctttctccacatgtataattgactgtctactagcggtatagtgtcaattctgtgaaaacaaacccagttgtctttcttatttgaaatagagacatgtgtgatgtggcgatgccctatactccaacatcaattggacaagtaagggaaatttggttctacaagtgaatgcttctacattcacatcaaaacagattctattaatgccacatcattcccacaaaattcagttagctctttgatgagcgatcggtctcacacgatgaacattgcatcgatgggcataaattgccattatcaatagtaatgcagtatctacacaagtcgcaggggccatcgaactgagccagtaaaacccacagcaacaagctaaactagacttagagtaccgaaccactcaacgaattccaatctccagcctcggagatgcataaacaaaaccttaacgtggtcggcgaagagcaggggagaggttgctcaccgaagatggcgatgagcgcgccgcggccgtcgtactcgggatgcgcggcgaggaagcggtcgacgccgatctccttcttcggcatcagcgactcgaggaacgagggctcggtgaggcggaacccacccgctgcagcggtcgtcccctcggcggcggaaggcggcgaggaggacgaggaaggcatcgctctaggcgcgacgcccgcgctagggctcgggccgcctcgagtcgtagtcgaagccgccgcgacgttggaggctgcggcggggacggaccaggcggagactgcgaggaggaggcgcaggtgggcgaccggtttatgtagcgctgcggctgctgctgcggtcacggagctcctcccccgcaagtgccacatgaggtggcccgggccgattcactcacgtttatcgatttgagttcttttcagtctcagtttgtcttaatttagtccggtttagccggggaatctgcgtggaaagcacggctttaatttgacacgatgatgaggcaatgagtgtattgagtggactaacttttagctgtgacggataaagttggagactgctacactcactgccgcagcaatggcgaattggggctctgctcgccggcggcggagggcggaggctgaggccttggacgctagctgctgccggtgcctggtggttggcttgggccttgggggtacagcagcgtggctgatgctgggcagatatttcccgcgtggctggtgctggattctctataaaataaagaatatggtttcttaaagagttcagaacaaatattaaatcctaagtatgttgtgtttatggtaattttggtgatgggtaggttgagccacggctaataagccgtcgaaaaataaatgagacaacccgaaaattttaagatcagacttatacttctattctaaaatgtcaaaagccatggccgaatattagaaaacaatgaaaaaaaaggctaaaatatactccaaaattaacttctaaattctggctacgtttgataagccaataggcagatagtgatagatttagtgttttcgttgcaacgtatggaagctttgctaatgtttttttctaaaaaaagaagtcaagcatatatgaccttgatggaaccgtaactttataggaaaactcttccttccttaatagaaagtaattagttttactcatcttggtttttttcatcccaaatataagaaacaactactactaacgcaaaaaaacagaaaaaaaaatatcacatttttatttgtatcactctaataaatataatatatgtatcgagggtgaaagatttaaaaaataaattcatgggagaggaatatggtaatatattacatgcatacatttgtgtcttatattatgaaatatatatatatatataagttaagcattagtatattttaggtggaggaagtacttctgagttcaatgggtgtgttcggctgcccaactgcagtggctatggtagaaattatgtgttgctattgtagctactggctactatctagtagtcacatcgaacaggcccaatgcacataaatgaaacttaatccaagcactacactgcaacataggaaaagagtggtgtaatattgtaacaaagcaaataattaacaaatttgcttacagctaatctgaatgtatagtttatagttttaatttaactgagatttatttgcaggtttaatatctagtggtgctcactgttcgaaatgaaaatcccagtatcggttttcttagccgatagcgtttcgttcttgtagagtagataattggattttgattgagttatttttctaagggaaaaaggaaaaggaggattcaaaatccttttttcttctgactttcccaaacacaaaatacctccttgtattcgcactctcaaatgagagtggaagaaattcgactttcatataatatcttaatagtaacccacaatagagctatatttttccccaacacaatagataactgtaatccctctacccacaatagataactgtaatccctctcccctcgagaggcgcttccatgcctcgcctgcttaatttggagtagcttttacctgagaaattatcaattatcgtagatttatcaaactctgcaacgccctttttttggtgcgtctttcgaaattcctatcttagaaaaatgagcatcaaatttccacgtatcaaatacacaaactacaaatgttttggaataccaacaccaaagtatcttacattctcgagctttgttgggtgccaacttttacaaaattctcgggctgccagattgctaatactagctttcaactggcagttgccaataaactttacagcgtcccaggaagaacatcttaatacacgaattgggattacagtgttctatgtatacaagttcttgaaaaactaccaactagaccccttcgtgaacctattttcggcagttagccctacaaaatgcaaaatggcaccaccattgattattgatcatcgattgattcgcacattatggtatctgcacttcattgcccccgggggg

SEQ ID NO: 2145 - DNA, 671 bp, Oryza sativa
ttaccatctggcaagcaaatcatagcactaactctgacgtgagttaagtttaggttctgagatactgtacatacctgttagtacttgatttgttttcatatttctctctctgacaccctgcagttacaaattcaaactagaggatggtgctgaaataaagccccgtgtgcccctacttaacaacagaatatatgataacaagttcgagtctcagtattatagaatatcagattcaaacaaggtacatttttttttcatttttatacatttgttcctttaatttctgtaccacttctatgatagggagatttaaattatgatttccagttactgatgattctttgcctgtagcttctgttgaagcaaaggctggattttatccattatctaaaaaaagatttttacccttctttttccttctgcatctagattggtatatggcatatcttagtccagtactccagtatccgcattatacatagcgttcccaattattacattcttttcccaagagtagatataatggatgtggtaccaaatgaagaaatacagcaccatcaccatgcacactttgttgcatacattttaaaaactttatgtactagaactatctactccctctgtctcaaaataaactaacttttgtacacgaatctggacataggctacgt

SEQ ID NO: 2146 - DNA, 879 bp, Oryza sativa
atggagcaattggttccatttgaggagtgcctgcagctgcattccactgatagctctgtcatcaaaattcctgagtacataatggtgacaaacaatgggcgcactttcaagttagtaccttgtctgtttaagctatatgattttttgccactcttcatttcagtaaaataatactagtaaaatgaacttattggtgttgaccatatttgctgagatctcaagttcataagaacacacacatgtcatatacacttcgttatataactcatctacttcatagtccatgattgtgtatattcaattcacgtcctttgaagttgatcaatgatgcttaacttccatgcaagtagcaacctgactttgctgaaaatatattttgttgaaagagaacttcactgaaaaaatacatcaccactagagcatactccctccttcccaaaataaatcaacatttgtacatgaatctggacataggctatctccagattcatgtacaaatggttttattttggtacggagggagtatataacttacgatgtctcttcagttataaacaggatgtatgtcatgtcaaacgacacaactaacaggtgatacaaggactaatccaattggactagcaatattattagtaaattgtctgatcaataatgtatgctgcttattctgtcaagcgccataattttcatgtgtttttcctttgccttttgcagcattgttgtaaatcctgttaatatcagcagcggccttcactattatgaagtttatggtatagattgcaaagcaccatggcgtggacctattttccgcgtaccaatcactgtaataaagcctattgctctatcaggagagccacctgcattgacactttcaaatct

SEQ ID NO: 2147 - DNA, 6314 bp, Oryza sativa
  unsure (1)..(6314): unsure at all n locations
taccactttgaaacggaaccaaccctctctaatacccgcccacaatgtttttatctaaattaaaagaatttagtcctatttttctgttgagttgataaaattacccccataatcctttgcatcatctaaattagtctcagctggctgggaggctagggttcccggttcccctcgcaccgatccgggcaccaccctcctctcgcgccgccctccctcccctcgcgccaccgagccatggccgtcctctcgcaccgaccctgccgccgcttgtttccgttgtggcagacgaggaggaggagaccaccacgctgtcttcccctcgcgccgccacactgtgccgcgccacggccctcccctcgtgcagactcggccgtcgccctcctctcgcaccaccgagttgcggccgtcctctcgcgccgacccggccgccgcccattcccctcatggtagatgaggaggaggagaggagccgtgctgccacccctctccacgcgccagtccgttgccacccctatactctagctcactaaccagcttctccgacggcaccacctctcacctcgcgccagtcgaggggcagtttggtcatcaaagttgggagaaaagggacaaaatgggaaaaaaaagaaaagtaacaaaatgattttgatttactagaaaggaagaaaatggcatttcagtgaacttctcccggttgaaagtggtattcgggcggatcccaattgtaggatggtattcaggcgaagccctgttttgaagatggtataatggccattttctcaacacaaggggaccagcagggagctataaatgcggagacgaaagatgatgttgtgcagacgatgccgacaccagaaagccagctcgagccgtggcgggcctcgtcttcgtgctcactcctcactgtgcgtattgaatcctatcttactataaagttatcctccactagctccttaagcttaacatgcaaggatgccacatcatcatccactaacaaggtgctacatcatcatccactaattaacaagatgccacatcatcatccactaacaatcatcacatttaaacatcatgcaaacatgctatatctttatagtttttataatttaagagcttttcaaatacaaacatgttaaattatcatccaacataattcacataatgtttcaatatatatctttattatgttttatgatatcctatatacttatatagttcatcctcagttagtgcttaaatgattaatctatgatccaaattatctttcttcatttttcctctaattaagtcatatcacatcaattgtttttagcttttagatgattaatctacggtccaaactatctccctatttttcttcttccataaagtcataccaccttactttttacgtttgaatcaacattttacatactatttaaatttaaattatcataaaccacattattttacttaatatgatgttatctagctatttttatcataaaccataattttttattttccaacggagaaacggtttgggttggttttgttccatgggttgcacggtttgagcccaaaccgtgaacaggcccggccaggtgatcagtgatctaacgtgtgccccggaaactacgtaatggacacaagatacacctccataaacgcacggcattaacgcacgtcagtttccttttcacccctcccataaacagttgctaaaaaaagaacgtttgaagatttcagaaccggaaaaggcgcgcccctcgatctaccaacggaagcccagtcaggccaccccccgttttcggcccgcccgattcttgcgccaccacgagacgagacccagttttccgccacaaccgcgttgaatccgtggtagattaacggatccaccgtatcacgagttcatagagagagatcgatcgatcgatcgatcagaactctgatgatctgacaaactccgagtcctatactcccaatctctgatacacacagatacttcccatgaagagattccccccatcccccagcgtggccgcgcgcggcatgcacgaccggcgggcgcacctacgctacaaagacgccgcgcgctacgtgaccgcgcggcagaggatggtttgggttcttctcgcggtggctcgcgcggttgggcgcggatgccggccgtgatggaggagccgatcgatcgatctgtataggaggcagcgggcggcggcggcagaaggggaggagaggatacgcatcacgcgtgggtgggtgggtgggttgagatgggagggacggacggggcgcgagtgcgagcgggtcgcggagaggcgaccgctataagtatcatcaggccccttgcccccgcgcacgcgcacgcgcacgggcaaccccccctgttgttttctctcaagccctacgaagcggaggcggagcccctcggcgcgatcgagtcgacgccgcgcgccgtccccgcattgccccaggtaagcccgatcgatatatcgttgctccgccgtgcgtcgtcgaatcgaaacatctctttttttcgatgaatacattgatctgggtttctcttctcgacgaaactcgccgaaaagattgatcttgttttcggagaaggaatcgttctcggttgtttgaactgtatatatatatatcttttgttattctttactagggaaagattgtgccccccacggccccgtgatcttacgaaagattgaaactttattagggattgtgagttgttgttgaagagatggcgagctacgacgacggaaccaatgtaagtcgtaagatttctcctgcgcatcaatacgaagaattagcagtttactgcattgcagcattgctaattgctaacatataacattgatcgtaaatggctttttccagctcgtggacgatgaatacgatgacctggatgatttcatcgtcgataacgacgacgacgtggtgttaggtgaggagcagcaagatgaatttgaggaggaggaagaagaacaagaggaagaggaagaggaagaagagcctccggtcgggcaagtggagatccttaccctcagggagcaattgaaggcggacatcaggagaaaaaatcaggcacaacagggcgccaccgccggcagggctagctgctcgtcgtcggtgcagcctctggccaaggataggtacgttgcattgcattgcagattgcactgcatgatgtttctgctgccttatctttttttttaacatgaaaattatagtttctctcccagttgttaacagaaataatcgcttgcagatttggtagcttctttgggccatccagaccttcacttgctcgcagagtcatcgaggaaggctgttcatcaataatcaaagaaaaacagaacgtaccatccaacgtatgtactcctgaacttaatcttgctgaaattggttcatttttatttttcttaaagatccagcaaacgtgaaactttgataattgaattccaacgtaattatttgcagaaaagcagtgtttcttctgcttcaaaaaaacaaccaatcccaagcgggcagcagcagaaaccgaagtttgttaaagaggtatggatcatttaggattaaatatcaccaggttatgttgcttgcagcccttaaaaaaggattacgatgcattagttttgacctgtgattctgcattggtcgtttggcatttgcaggagaaaagaaaggtcgatgcactccgtcagaatcgggattattcatgtctgttctcggatgatgctgatactccacaggctacaaaggaacaacctgacaacatgcctgttttgcctatgaaatatggtacctttttaagcttttattatgaatacatatgatatgattcctacttccttccattcctggacaaatttctcacttgtttggtattacagatgttggagacattgcatcaaccagcaaacttataagtcagaccgacaaagtatcaaaagacagcggattgaagggaccttccattcagagtcgtgtaggattagtcggaaaggagcctcatccaaatacgaagaggacgatcgcttcttctgccaaaaatggatccagcctgcctgccatgaagaaaattcagagggtacagccatcctcaaatggccagaagatgcagcaaacactgcagagcaagaggcctcaggcaatgttgtcacaaagccacgggcagcagtctctgcaatctcggaagcctaaaccatctctcaatggccagaatttcaggcaaaaggtgtcagccccattagcacaaaaacatttggctccttcctcaagacctaaggtagcagcatataacgatttttctctcgtctattcttgctcttagttcaacttaggatagaactaccaagatgccaatcctatccagaatttagatttgcaattaagaatatcagctgttcaggaatatgcgtttgaatcttctctatgtttgcagccatcaagtgcagttcacaacgatcacggaaagggaaagacaaggcgtttagtcaaaaggaaatctaaggaggatggatgtgatgaagaggaagttgactataaatcaatcatcagaggaatgttcaagtacggttgcttcttgtccaatctgttaaataatttgttagttttttcactggttatcaacggcttttggtcttcttgtgctgttgtgcagctacaatcctgcaaaattcgttggtagagatgaagatgacagagacatggaagccaattatgccagcatacaaatggaagagagaagaaggtacttaaattccacctttccattgatctacacccctttttttttgtcggcaacaatgcaatcctgttgcaaaaaacgaccacctagctagctaacatttttccgttgctttggatatgcagtgcaagacttgcaagacaagaggacgacgaggagctccgccggatcatggacgaagagaggcgtgagaagcaggagaggaagaggaaaaagctagcgcaaaaggcagtagtagatgccagccaggactgaactctttgccaagccagtagtgtagtagttcgttagcaattcagttatggacaagattagatttatctcgttagtgctgattagttgtggtgatgctcctagtttattagccatctcgctggtggccacttgaacagatcaaaacaatagcttttgtaggtcaatttgcaaataacacaacgttatttgcatatctcannnnnnnnnnnnnnnnnnnnnnnnnnnnnnntatgggtacggggtaccattgccactactacatacttctcttattgtttaggaggcgtgcgcgtgtgtttgtgtgtgtgtggggggggggggggtcgcgattttgctaagggctttcacaatacgtctatgtgtcagtagaattgagtgtgtcatgtctgctggaaatacttcctctcgacgaaactagcgcaggcgccattgtgttttagcttggagcctcatcatgtcttgggcctagcaagtgtgtatcctgcactgctactaccctagacacatagagtggtcttttgtagtagatctgtggaaacctcaactacgaccgtttggtaaggtggctggaccgttaccaccaggtagggtagccaccttgaccatgttggcgctaaagcctctagagtggccttcctttgtagatccgtggtaaatcttgacaatgaccatcgggtagggtggttggaccatggggccaccatgtaggatagccacctttcgaccgtggcagcgctctttaacactagctcactaggaggggttttgggcaatctcctttaccatagacttaacctctaagggccatgcaataaagtcacgtgaaaatagaagctgtgttctttttcacaactccaaactacaagcttcatcgttttccatttgcacatgcttcccgaattgctaaacagtgaatttgtgcaaaaaaattctatataaaagtttcttaaaaaataaaaaaaaatatttttttaagtttgtaataattaatactcaatcaattatgcactaacaagacttcattttgcgtgctgctaatatgctcctccaatataggttcaaacggatgcactcggacatcatgtcgatcccacattgaattaatgtgtatgtctatcacaagtctttccatattaaataccacattaaatgtatacgcctaccataagtttttccctattagatgtgcatgtcttttataagtctcctcttgttgaattagttgaaaaaacaggtgtcccatctaatctgacactataatacaagaaaactagctgataccccgcgtgttactgcgggatagctagggctgcaggaa

SEQ ID NO: 2148 - DNA, 2785 bp, Oryza sativa
ttcaatgctatttgtacatggcatggcaagatatacaatgtactcatgctacttctccagtagtatacagtgctatgtccagtcttcctctttcacacacaaaagattcttaaatcatgcatacacacaaaaacatagtatcattttcacaagttacttgtcttctttttaatataaaagggtatcattttgtgcactatacaaaaagataaatagctttcttatcattttacaatttgtttgttgttggtgtaaaacacatataatcgtatatctacacaaaatcgtgtgtaaacatcattttacattctctacatgtacactagtcttctatgtcagtataagcaacgcggcaaagtgaaaagatgtgataaatgtatctgccaaatcttatagctgtataaattagatggacagtggacatgcccagagatgcaacttcacatatctgcctttagtttttgccttagactttaaacatgtggaaatagtctacacgatccatatgttactttcgattgaaatgaagcatataatccatttgcatatgtttatctgacattcataacctattatgacatatgcttatctgacattcataacctattatcagtaaggaatgtaaatcctagttgacatttgaagttttgaacacatgaactttacaaagttttcattcttctcacatgaaaaacctatgcaatacattgtcctaaatctcaccagtgttaatgttgtgaaatatattctagaccacaccttttttcatacaagctatgcattgcatctttctttggtacaattaatgaatgatgtttatcatacctctgtaatccgtttagttcaacaagtcatgagatgcgcctcatgttctgttctacatttttcagagatcaaggtagtcatggagctagccaagaaaatgaggcatgacctcggtgccacttttgaacctgctaagccaccagagaagcctttagctggagttgtgaaggatgggccagtggaaccacctccatctgcagaaaacaatcacgctcctcagacaggtgagactacagtatgttcaaatattgtaaacaatattgtgccaaccaaccctaactcagatggtgcggcagagaagatgggggaaacaccaagaagtgagattgcgcaagggtcttgtgtgacaggtggatctcctatcggctggaattttcttgtgtggcctgggggtgaggtggtttactacgggcggacaaaagaagtgtttcgggcgggtcaagctgaaaattaaaatgtggtgttcaccctgtcttctgactggtaaagtggtaatgtatcattcaattgtggtaggacgatttatagaatgtggtgttcgcattcagtctttctgaccggcaatgtgccaatgtatgtactattcaattgtgcgaggaatggaggatgaatcgtagtagatcttagcattctgttgactgaggtaatgtactactgtattcaattgtgggagggtgatttttgctaaacatctgttagtactatgtactaactgatttctgcatgacattctggtcttgtatgagatgctcttacgatgcaccatcatcatgtttcttaaacttgcatgtagggatgaaaactgccgcagatcctgaggaaggaggacgaactgggttcaacgggttaggctgcgtccaaacgagattaatttgattaattaagtattagctattttttttttaaaaaaaatggagcggtccattagcacatgattaattaattattaactatttttttaaaaaaatagagtaatttgatttttttaaacaacttttgtatagaaacttttttgcaaaaaaacataccgtttagcagtttgaaaaacgtgcacgcggaaaatgagaggggagtgttggtaacttgctctaaacagtccttatctcttcattttctctctccttccttctctttctctatcacctcttatctgtgtgcccttcctctctcggcggtcacagaagcagccaaggcaacggccaagaaggacacgagcaggacatacagagcctcggatgcggtccgacgattcatgggtgcaagtcttacccatagttattaggatcggaccggacatcgaatcggtcgtagtctcggttcacggtttgattggttcgaccagttgaaccgccggcccaacacggtttaaataaattgggacacataatctaaccacacaagcatgcattgctcggtggtggttgagggttcgaacccctcagcccacatttttctcctattttcttccctctcccccacgtttcagcctgcgctttgtcctttctcacctacgttcccacgtgcgtctagtttttcaccggttctttccaaaaatcggcagtccaattggtttttcaaattgattgcacgccatatctttaaactgggttttttcaccggttcttcccaaaaaccggcggtccaatcggttttccctgggttgattgcacgtccaatctttaaactggaccggaccggttgagcccctggttccagtttattccggtcggactgccggcccagtccggtcctaataactagggtcttgccccgtgtgacaacgccctctccgccatgggtcgagtgcatgaccattgaggagaaaatggccattataccctcgccccccgtgcgacaacgccctctccgccatgggtcgggtgcatgaccacaggggagaaggccattataccctcgtcaaaacggggctttgctataataccatcctacaattgggatt

SEQ ID NO: 2149 - DNA, 881 bp, Oryza sativa
tcaatatcttcccaaccgtaaatccgtttgactccgttcaaattccaaaatttctcaaatctcgagatctatctaatggcacgcttagaggtcattaatagagctttattttcgccgtttgttgagttgtcccgttttgcgtatagtttcggagcccgaagacccgcagtgcgaggatttcgaggatcaagctccagatctcgagcaaggcaagccacctttgaacatcttgagcctatatttgaaatctaattatattgcttgcaaaatattatgcattgataggattgcacttaatctgttgttctgtctgcaaggcagattggcagacctacctaacttgttgcatttgatccttccattgttaattgctatacaatgtccccttgtaaccatccagttgcgcctcgatattcgtgcaccctgtgccagtatcgacggtcgccttcaaacttaaaatctgagtaacaacttgggtaaaactggagttttacaaaagacttggaaaacccgacacctgggtcggtgcttgcgaactaaatgaatttccaaaaccgcggaccgggaaacgtaccgggtgtacggtttcccgctctcgcacttaaggaccgattccttggaatttcatccaaacataagtcaagtacgaccacatgggtggaatgggacacccctggctgagtaactagcttatcaggggagccttgatgccgagagacatgtggattcgccggggtagtgtcggggaggacccctgggcttcctggcgcagtatggtctgggacctaacctgttgttggtctgggacccctctcgtcggcatatggtaaacctgtgtcggctttggaaatgccttgtcatgaaagcttggaggtctcccg

SEQ ID NO: 2150 - DNA, 1027 bp, Oryza sativa
ggtgtttttccttttttttatgttgtctagatgcggttttttctacatctaaatgtagttgcgcttagcgcgtctgtagcataatcgttttcgcgatgcgtactatattttcttctcatggtattgttttcctcaccaaacctgcggtggctagcctaggtgctaaaaggactttctcaaagcgtatgtcgttcattatatattttgacatgaggggtttggtcactggtggggagggtagggcaagaagcatggcggacctaggctcattggccatggaagagaccaagaagggccttggccatgcattaaatagaaggatggtgttgtggcctagagggagaaggaaggtgttttcgtcatgtactcttcttgcctgatatgtaatgtttctcagctgagaaccattgcttacatgtcgctaacttttccgatcaggaatggttaaatatcgaattccaatctataatgcttctccaacagttagagattgatcagtaaaggtttgacatatggatgaataatggtttcatgttagttaggctttatcgggatcattgcttctatagtagtaagagcgagtacaatagcagggtacaagtcagttgtaagcacatatggagaagagaagagaagagagataaagaagacgggctataaacttgtagccagttgcagcatggactataatacattgtgcatatgagaggtgggaccatatattaatggtgtagtatatacttataagtaactattgtatgaatgagctattagattggctataaataaattgaagctagtagttggctatactattaaacttgctctaatagttagtattattatggggaatgtgtaagccacgagcacggagtagcgcttgcatttttgttgtatatctcgaggatcacaatattcttcaacctctgtcagctcttaacatgggattcaggcgcagccccccaccgttcctcgccgtggctaacaaaaccagcaacccattgttcagggggctccagggaacaaa

SEQ ID NO: 2151 - DNA, 1259 bp, Oryza sativa
ttcctgcagcccaggcgttggccgtacgcagctcgccatcgtcgccctttaaagtgcgccattgccgctccggtcgcggcccctccctttcccaaaagcaaacaagggataggtttgccgttcagcccccacccagagccagcggactgcacctcgcagtccggcatggctggacagatgctaccgccgattgcgcttgttgctgtggccatctgtatcaccgcggcggcggcggcgaaggtgccggcgatatacgtgttcggcgactccacggccgatgtcggcaacaacaactacctgaccggcgccgccgtgccgcgggcaaacttcccgcacaacggcattgacttccccacgtcgcggcccaccggccggttcagcaacgggtacaacggcgtcgacttcttgggtacgtacagcttcgccgcccgtctttcctgtgctgtattgcctcgcgactctgcttgccatgcgatgcgagtatacttcggcacttcgcggtatagtagcggctggcatcgttgcatatctgacaaccacgtatatagccggtgattgtttcgttttttctgcatgttttttgtcaacttcggcattgcaagttttgtaacggtgctagagttgagtaggggtgaagactggagacgattaagtcttcgtctctatactatttccgcggtccaattaccgaaggcaagaagtggaaattgctttgaaaacggagagattgtcgcatactccctccgtcccaaaaaaaaccaacaaaggttgtgccatactacctttgtaaaaaaaaaaactacggagagtatgtttagatttgtttttgttttatggatcatatcttatcttaatataacaatattttgagagggagtaaatagaacataaaaaatgttttgaagaagaaccccatacttcagaactgtgaagtgcgcaacgccagggcagtgtgccactgtggcgcacacattccagaggtcgcctatgcttaaatcgatagttggctcgttgctgcccgaattaaatttgaaaatatattgttaattcattttatttttagaaatattcgagatttattttttaaaaaaattataccgttgatcttgcacaatcattatgcgaatgtgaggtggtgcgacttcgcgggcggtatcgcgcgagactgcgcggtcttgcgaaatgaaagaacgataccagatttcaaaatggttaattagtgattaattattatgattagcaattattaagtaatcatt

SEQ ID NO: 2152 - DNA, 4650 bp, Oryza sativa
aacaagagcaagcttgcgatgaatgaaacggttgaaaagacgagtttgcactctctgaccttgaagttgttttgagaatgccagccaaagatatgtccatgaaatatgctggaatccatgatttacgaatgtcaaacctatttgacagccactcattgtcctccaagtgaaagtccaaaatgatagatttccactgtgattcgaactcagtagcagtttctgatctccaaacacatgacttcatcatttcccttaaatcgcagtcttctctccatagtggtccgatcttgtctgacattttttccatgatatgccacatacacaacctatgcaccgtggttggaaaaactttttcaatagctgctttcatgctggcatcttcgtcagttatgatgagtgtaggggctttccctcccattgctcttaggaaggtcttaaacaaccaaacatatgctggaatcttctcatttgctaagaatgcagcaccataaaacacactttgcaagtgatgatttaccccagtaaatggtgcaaaaatcatgtcatactggttagtggtgtacgtagaatcaaatgatacgatatcgccaaagtgactatagttcttcctgcttgtagcatctgcccaaaacacatacttcaatctgccatgttcatccacatcaaaatcataaaaaaaggatgaattgacctcattttttctacatagctgggccacaaacatttgagcatccgcattcttaattttctttcttaggtcccgatagtaattctgcaagtctctcttagtgcatccaacattctgaaatcccccatcactcacgtgaaggagcctatatgcctgggaggttcctatgcttgctctgctgcatgtgaagagtgtagtttttgccctctcactaacttcacgatttgatcttatcaaatgcagcttatctggcgatacaagtccatgactatggtgctcaaccaaggaagctatcgtgtacttgttatcagaacatagcttcacgtaaatgtgtgcatcacatccacatctagtttctttcaatttaatcttttttttcttcgatggatcaacaatctccttatcattcacatgtttccatccttgccttgagcacacaaagtgcttgcactgaaccacgccatccaacttcttttgctgcccaatacgcactgagaacccaacttggtgtgcatatgacttgtaaaatttttcaacagaggcaatatcttcaaatgtcatccctaccgcaggccttatcttatcatcacactctggtgtaaaaacggagcactgcaaaatcacatatacattgcaataagcattttaaagcacctcagtcataatttttaaattgccagtgtacttacattgagtggaattcttgatattttttttggtgtactggtgttgtcatcctctattactggagaagttatatcatcatttgaataaatatctgagttatctcgcacatccaatctatttattgcctccatctgcaaaaaaaaaaacagatagcaaacaactgagattaaacctttaatttccttgagtgaacaattatgttggagttacctaccttaatatgcagtaacaacaatacagtgtacttgccaggttatggaaatctgtagctagtctgaacgaaaattagtgcaatctaatcttgtctcttgatgtatgcaatatggagcagccgcacgccagcaccagctatccctaactagcctgtatatgaacgatatgaatgagaagaaactaaaaataccgtagcatcaggttcgaagtagtggaatgattcgtctcttgatggtgtagaatgattcgaagtagtcacaaggttcggatgaacagaagacatctgagagcaaaacaacgatccccttcgcctcgatgaaatattttgccggcggcgcgccgcgcatggaaccacaagaggagctgaagaggcgtagcatatcagcgccgtgattaacgagatcagctgaagaggcggtaccagatgggctgttctgcaaaacagaagtggaggaggcgggcgtgtattcgtaaaattgccacgctaggagacttggccgtaggatgtcgatcgaacggatccggacgcacgtgtacacgagtgcagctgtactcccgtgtgcacaggatacccttcctacttataattggcttgctatttgtagagttatgcatactattgccaaatatagtcttagtcaatgaacaactaacattaacaactcctagtacctcgaggggcaagaggattggagcactgtaaaaacactaataatagtcatgggtcgtgctaatagaaattctcattttacaagaagggcaacaatcatgtttcttccgccttacacacttaattaacattggtcacacgacagcggaacagctagctcatggcattcggtccaagccaagtgcacctcatatgtacgcgtgacaaagagggtagcatatatgtctggctcaaacctcactagcaacgcccgagatacgaactcttttgcttgccctgttagaactcctattctattgcatatcaacatacttttgtttgccggttcattctatttatcctcgtcgacatcacatatttacatccttcagaaatgggttaaaggacggtgatatgaatcaatgaccaggtcgtcatagagctaggttagttggcatggagctcgagaagaacggcaggctgtttggttgatagtcgaattttaccatgtcaaatcttaggtgtagcgtaatttcttatacagtgtttgattgtgtgttacacttggagttaagtcacactttattagtatgttagctcacacattatatatactcttattttcaagacaaagtttatcacaattgtgactaaccgatagtgataaagttaacctccatccaaacagtctcagctagttaaatgaggaaatgaacataatagatagatagatagaggatgaaggaggaggagaatagttatacacggaagtattatgaacaagataaaaattaagttttagttcctccatcccacaatggggttgatcgtttgtgctactttccagctgcaggcatctggagcaacaatagtagcaatcgaaaaattaattgtggctgcagcagctgctacggctgtgctgccacagctagcacaaacaaacaacccaaatataaataactttggatggatatgacacatactaaggctatgttctttgcccagggttcccaacccctcttcttcgttttctacgcgcacgcttttcaaactgctaaacattgtattttttgtaaaaagtttctatattaaagttgcttaaaaaatcatattgatccatttttttaaaaaaattagctaatacttaattaatcacgcgttaatggaccgctccatttttcgcccggagggaatgagtttccaacctacatgaacgaatgcaacctaatactacgaatctgaacgaactattcgcttggattgagggccctcttgatgcttaggttaagatttagttaaacttttaattttctaactatcaataatttttgaaatgcttagtttgaaaccaaaagaattgttcagcatatatttgtcttaaaaaacctataatcatcataaaatttattagatcttaagcttattttgatataaaattgatattggaatttttttatgctttaccaaatctataaacgtcaaaaaaattattgaagagaataatatcgaaaataaatatgtttttattgaagggtataatattgtaaacttgttttcgatgataaatatttaggacgtcgaaaaatgatgagataccaacatcgttgtcattgatacatggttatttggccttagagcccgtatataattttctcttttcaaaaagaaaagaaacattatacttcattcgtcttagagaatttagattaataagacacgtcgtattactacgaatctaaacaagataaatatttctatgtgccatccaaaatccttatatttcagaaggaaggaaatacaaacgtacacgatcaccacgcgcacactgacttaatgtacacatttacatccctacttatatgagcacttttcaaagactgtgatgtgtcatgatgattacaatttcatatactttttacacttgcaagttggaactatccaaatttttccataaaaatgtaggaaaacgtgttcgcggtgagcgtgccattgtgcatttgtgctgccaccacattcacacgactaacatggttagcgaatgagaaattgctggacaggttcacacgacacgagtgcactccactagtagtggatggttagcgaataaagagaagagcggacggcgttatcaaatccgtcaaggaaaccacatctgaagttgtgaacccccaatccaattccaatctccccctttcatcagcgccatggctctctcctccttctccatgtccctccccttcgccaagctgccttccacctccaaatccacccgcttccttcccatccgggcctcctctgccgccgccgccgcctccccttccttcgatttgcgcctctattggacatccctgatcgccgatgtggaggccgagctcgacgccgcgatgcccatccgcacgccggagagaatcca

SEQ ID NO: 2153 - DNA, 991 bp, Oryza sativa
tatttttggttgaagtttttggcgagggttagttttcaaaataagttttttaaaaggaccaaattgtcaaaaaaaaaaaacggtaacaacctcaggtccacggcatatgatccatatccatgttccagctcttggtcagcacatacactgtttaaacgcttgcacaatcacggccaaatccataacaacaaacgctagcactacgcttgagctcgcactggtagttcacagcatggagtctccaacttcaccggttaccttctcgatgccgctcatcctccagccattggcctgcggcgctaccgttaccatcgtcaacaactgcaccttcacggtgcgcgcgggcgccctcccaatcgtcggcggctaatggctcacctcaccccagggctcgtgtgggccgtcaacgtgttcccccggcgtcaccatctggcgagcaccggatgctccctcagcggcagtggcaacacggtctttgcccaggccagctccaagtccggcgactgcggcggcaggctgaattgcaccgtccctggcaccccgccggacggccggctctggagcagggccataagggcgatggcctagggcccagccaaaatggaggctccgatccaggtatataccctatataggtatttagcccaatagcttagaattgatccttctcactgattagaattgatgatccaatccattgatccttctcactagatcaggtgatgatccaatccatcgattctcttcactgattcgaattgaactgttcttttaatttattttttgttccccattaaattacctagattagggacttagggttctaccattctggttcaaccgttcaagggatcaatataagtatacaaccattcagtgcaccataagtccataagctaattaaattaagcgtatatggtggattagttttcattaggcctaggcccttgattatatagatttttccctcactgattttggctgcaggaat

SEQ ID NO: 2154 - DNA, 2372 bp, Oryza sativa
ataaaatcaatcccatccaaattcactacacgatcagcagcaaaggaaatgatgaaccttttggctgcaggatcctccgctttagttctggtggtgaagttgtggaaattgtgtgttccaacatattttttgagaattctattaaacctctctttgacttcatgagtgtaagaaaatgcacttctcaggggcatctcttctagactgctgccttcataatccacatcttgtttcttttcatcttcagtaacaacatccatagcttgtttctttccatcttcagtaacaacagtctcaatactacctttcttttcagccacaaatgaaggatcaacatcaactgaatctgaattcgtgttggaatctgaattcaggatggggcaaacagtctcactattgctagctggtacagcttcagaacagagagtaccacctgacagttgaacatcacatttttctgcaccatttgatctcatttcagtgatttgggtattggtttcattatcagggataggtaaatcaacactacgatcgccagtgcttgcaggatcacaatttgcatcctcatttgaacccactgcagcttcctcccgggaagcctcaacagatttctcctcctgaagggcaggatcgggtaccttaccctcccggcccatgacaccgggcaccttcctacccctctctgagcactcaaggcacttcgtaagctcgctcccactcccaacgctcgccatgacggcctcacggtcggggtgcgcgctggggtcgagcgcgaacacgggcagcaggtacacatacctccggcggtcgcagaacttcttcgcgttgaacgagttggtgacgcggacgtagccgaaggcgcggatctggggcgcgagctgcgcattcaggcgatcagtgaagacgggcgggtcgacgtagaagcggccggagacgacctgcgccgcggcgctgacgcccttgtcggtgcgcgccgcgcgggcccagtcgtagcggcggggcgcggcgcggtcggcctcgggcacggcgccggcccggtagagcgcctcctccaggtccccctcgatggtgcgcgcgcccgggttcttctgcatgccctggtaccccgcgccgcagtagccgagcaggatggccaccttgcgacgcttgtaccggggggcgcggggctgcgcgccgtcggcgccagcggcggaaggcgaggtgggctcctggtcggggtcggaggaggaggacatcttgcggcgcttggggtgaggcggggaggccggtggcgaggcggcggccatcggagccgcgggggttttagatggctagggtttgggtgcggatcggggcaaagtgaaggggagaacaaaggaatcgaatcgggtcacagtgctgcagtttagaaatggggacatttcatttcatcaagaaaaaaaaaaggaaaaataatacgggaggcaaatttgcctaactgggccgaattaaaagcccatgattatatagaccgtgggccgcgaaagaacggggaggaatactcttgggattacgaaggtcggttgttgacttcttgttggcttgtttagtaccataccgattatgttggggaattatagatgcggaaggcgctataaaacgaggaggtgagcgatcgttagaactcatctttgcgcttggggcaatgacgcagctagtgaggttataccgaggcgcgtcaattgctggttgaaaactatttccaaaccccctttgcggcccatccgggcctcagagaatttctggaagggctccctaactagggtaaagcccacaattctaaacttaagtttgcatttggaaagttatcccaaagttaacgcaattttgaattcggttttgtgatatccaaagctaaatactctctccgtttctaaatatttgatgctgttgatttttttaaatagactgctcgttttattcaaaaattttaagtaattattaattctttttctatcatttaattcattgttaaatatacttatatttatacatatatagtttttaaataagacgaacggtcgaacatgtgctaaaaaatcaacggtgtcaaatatttaggaatggagagagtatcaattttttattctaatttgtgatgctacgaccaactttacctttcatacgtataatcactcttaacaaccaccgttttttgacaatttggtactttaagaaaacttatttcaaaactaaccctcgtcaaaaacttcaactaaaaatagaccgtggacttagcgtcaatcccgttggtgctatggtccaacgtctcagcgccagtacgacgctaaaatttgccacgctagcagagttgattgtggacgtggtacataataagtaggggctgcaggaat

SEQ ID NO: 2155 - DNA, 1248 bp, Oryza sativa
cagcgatccgcgcggcgtacgaggcgctgcctgccgcggccagggagcggctgcgcgcggtgtacttcgtgcacccgggattccaggcccgcctcttcttcgccaccttggggcgattcctcttcagctccgggtatgtacatacaacgaatcactccgtgtgtgctgcactacgattcgtgggtgaggcgctggtgtttaccgtggtttccttggaattttggatcttgcaggctgtacgagaagctgaggtacatgagcaggctcgagtacctgtgggagcacgtgagcaagggggagatggagtcccggaatgcgcgcgccggcatgacgaggagctcgagcgccgcccgctcatggactacggcatcgaggctactgaccgccggtgcatgttcgacgccgcgtccatggacacctcggcgtccctgcactcgctccggtgcatctcgtaatcgtggtggccgctcgactgtagcatccgtagctggcctcgccccggtcctatattcgtagctagcgaaggcactgccgcactgtcgtagtttgcaggccctgttgttcttcgttccatctgtacaaaatagtagtatttgtggaagtaaaagagataataaagagaaacagtttgaaatgcttccctcgttgcagcttccacacagatcttatcagcatagggtagagaaatcaaaatccaacttaacaaatcaaccagtgcagtaattcgcaggtcctcatttgccatttttaactatcgtggagtggtaaattctcaattatcctcgctgtcaaccttttaacaaatgaaactgtaagcaaaggactacttggagagataacgtgttaaaaaaaactcttatagttttatgtttggaaaaaaaatgcaattgccttattacagaagtgtaaaaacctcatctaagtatttcttcatggtcaaattccacggggagaaatgcaaccaagcataactatgtatactgatatagataagaaagcaaataaaaacatcctaacaatgaaatgagtcaaccatttcccaatgtccaatattgaccagaagcacaatgggatagcatagaacaagttctagctagaatgaaatggatggaagcaacaagaaacatatagaaagttataaagcatagtaaccatttaggatagtttcagcaaacaaacattgcagaagcatttctcaggcgtcataacttgccatgacactgcctccaaataagtaacatatatcaa

SEQ ID NO: 2156 - DNA, 2842 bp, Oryza sativa
attcctgcagccttaccacaagggctccggcgaggaagacaagaccgccgccgccgccaccggcgagcacaagagcagcgcttaattggggcgtgtgtgagaccaggccatggttggaatttggaagtgtttggcgtgtgttagtttggtgctttttctgcactgcagctttgttaagttcgtgtcaagattggtcaaggcctggtcagcgaagcccgatcagtgatcgaagtttgtgtttcgtgtggggtacgggcttcagtttgctatagtcaagtactagatgttgagtttgtttaattattattggcactcttgtattggttttgggctgggcattctgccttggtattaatgatttctgcccagaatatattgttgccttgtacagttgtactgtactactctactggggtacactgcattgtgatcacattttctactagatcttctcaatcatgtgcctcatgtattggtccgctcttggttcattggtagtgtgcattgcgggccagtgtgaaacgagagtaacagacaccgcgagccaactggtacgtggattgactggcggaccttgttctcatgggcttcttttgaaactcttatgggcttttcagttggcaaggcgtaatattttcttgggccatccatctttggatgggccttgtaatcgagaagtgagagagaagacaatatctgggcctcctctccgagagacggatattgcagcgtacgcgaacagaacaagcgtgtacactttggcgcttgcgctcaagcagcaatgcgggtttgagaacatgccaaccaaacacacgccccagcgtgtcatgtaccaaacctcttggcgacggaatccgcacggtacacgagcctgcacgcgctcccgcacgcgcgcgcaaaggaacagaggagagaaaacgacgtggtggctggtaacttcgtccgtgccagcgctcttgggcctcatggtcacgttgatgccaaagcagcccatgttctacgcgatcctacgacggcctagagctctactcctagatgcgagaagatacagagagagacatactggaaatcgtacgaccgtgtgccggtgcacttgtcgactgtcgaggcttgtcgcgcgtgcgtgatcaacgaatcgagtgctctggcctgcacgtagaattgaaaatagtactactagtaggaaggatgaaaaagacgagagttctagtaccaagttggtggatacgattatgtgcctttggggagtggagaaaaaaaggcgcaataaactagagtttgcaaagatcccgcttaagtactctctgcactcgtggtgccaactcgatcaaaggattaaactacgagtactaaccaccatatcgctagcgtacgtcttggagaatagctacttgcacacagtaaaaaaaagaagtgatgcaatcattcaacctctgcagtggcacggtaaacgggtgaaaaggtgttcgtgcagctgtcagaaaaatctgaaagtgagcggagactgattagggcatccacaatagttatctataggctctaagagatccatatcaacatattttcctacttgaaagagattaaatgaagagagatagttatctacaggctctaagagatccatatcaacatattttcctacttgaaagagattaaatgaagagagagaacaaagctatctactaacctggagatagtatacagagaaaaacgagacaatgtattagagagctatagatacccatgtagacatactattgagatggtttactattaatctagtctattgctgagagatacatgttttatagatagcaccttactttaacattgcgggtgctcttagagcaagtttaatagtatagccaactactaactctaattcatctatagtcaatctaataactcatttatacaatagttatatactataatattaatacctggtcccacctgtcatacacacactatgtcttggagtccgtgctacagctggctacaaatctgtagcccactgctcttctctctttatttatcttctttaaatatgtttgcagctggcttatagcatgctattgtacctgctcttactgcccgagtctcaaaaggaaaaggttgcgctgcccactgctgtcgttttattttcgttgctttcaacaggagaaagattgaaaaaaagccatgctgtgcatgggatcttctttttctgcctgggcaaaaaaaggtgcatctggcaggctagcttcagttgtaagtgatggtaagaacaatacagtatgaaaagaactaaacgtaaagatataattattgggtgcttatttaagcgtagaagaatcggccagcgcaaacttgtgtgcccagccataaggctgcctattcatcccactggagcattatcaaatgcaaacatcgaaagtaattaccgtatcattggattccggctgcctttctctatgcttcaaggcttgtagacgtgttaaggttcctgcctgtacaaatgcatcgagtggttggtagaatatgttcctatggacaacggggttgatccaagtaatcggttctgatcaagctaagttacccccactcagtcccggcctcccggggatcgattttctgtgaaaagtagcagtaattactcttgagagacagagtatccaaaggcacttagaacatcatgccgatataattcgcctgtaggaccaccagggagcatgagatcgtggcgagtaaatttgacggggtttgctggacaagtagactgagggatcttcttggttttgtcacaagtacatgtaggagccaggatagtaggataccttgatcgatcgactttcttcgctgt

SEQ ID NO: 2157 - DNA, 676 bp, Oryza sativa
cccatgtgggtgctgcatattcggccatcaaaggcaggaagagcgcaggattgaccctcatgacagctggtaacacttccttgaagtccaataaacttataaggactcaacatcatatagtctccttaaccataaggcggagcatttcaattgaatgggcttggtatcatatacatataacccaatgctgccaccatatgaatcaaattcccaacccaaatagtttactatctgcaaggaaaatgtctaaataatgtaaatctaccaacagcacgaaatttcatatgagaattgggaaattgagtgactaatagaccaccctatttagagataacggtgaataattgagtatgtaaataaaatctccttgcctactccaacaggcctataggaataggagtgagcagaaatgtagaattacacagtgtgctgactaaacgaattcaccgttttaatagattcagttatgcaagaaaaacttctttcccccataaacacaatccaactaggcaactagtataggcaacgatagttgcacaaagtctagctaataaacccgctcacatattttttttctctgtccataaatccacgagcaactgaagataattctcacggctaatgcccttcataccataggcgcgaccaaaatccaccgctaaggcaaagttacaga

SEQ ID NO: 2158 - DNA, 1626 bp, Oryza sativa
agaaagttactcttccaattccctgcgagctttggatgagaccctgaggcatgccgaagaggaaaggttgtctagagaaagagccaaagtttcataggcattggcatagaggttccatctgacactacagtgaacacagcttgtaaaatacaagggtctcctctccaggtggttataatttatcagatcaatgcagaatgttctgggcaaatgctgcttgcagatcaaatttttgtggggaagttctgactttggagttttgctaactgaccgttgtttgtcgatgcagttcaggcaaatgtcctgtgttgatccatcataatagatatagttgtgttgaagtagcaggtacattaggtacatataggtgaagtgctcgtttcggtgctagtatgcaatgtactgatcttctgtgttgcctttttcttggcctccatacaattgaatgaatgagcaagagtgcacttggaatgaatgtgcaactgtgcaagagttgaaagagttgaatgcagttcgtggcgttgtattgagtatttttccggtgcacttgaatgaatgtacaactgtgcaagagtggaaagagttgaatgcagttcgtggcgtagtattgagtatttttccggtttaatagggaggtatatactccctagtatattctagggagtacctcatggttacttctcatggagtacttcccaagagctataaaaattccagagagcaaaataaattctgctaacaaaattcaaaaatcagaaggaaaattgtccactgaaatcttgcctccctctctccttgcacaggcaaatgagtcatgcattcatctgatattttgacgaccgtgatgaaaccattatttctgttaagagattttttttctccaactttctgagggtttttgtattttgtaagtttggtgctgccgagtgcacatgaagtgtcctaccttggcgtacatccagttcgtgtcagcgactttcacgaaattacagagggagttgtgtacttgtgttctggtacaataccttgcacttctgtaaaggaactcaattacacttggccccttgaagcatggcacaatttgtggaattctgcacttacaatactctgaccgcacctatagatagaaaacgagaaaccatgtacagtatcaaacaatcaatcacacaagtagctaagcaatctacgggagctgtacgctagcaccaaaatttaccagcgagtcagcaacccagcttgtattccgtagctcctgtacaaaagaatatcatgatttcttgatttcccagcggcgtccccgtatgacatacccatctgatgtctggtcgctgccttcccaactgtccacaacaccagctgagcttacgtccctgcggtgccgttttcctctaccgatcccactgtcactagagctcccgcatatgagaggatcatcgatcccatggattgctctctgtggcgtggaggtactcacccaattgtcatcacggctttgcccgaacttgcccttcttcttcattaatttctcaaagcgcttcccgactggtcgcactgcttgcttcatcgtgaatttgagatcttttatcacctaaagataaagaaaaacacaaaacataataagaatat

SEQ ID NO: 2159 - DNA, 3549 bp, Oryza sativa
gtgcggcaccggtacgcgctggcggaggcgcacgccgcgctggccgactcgctcgcgtcgatgtccgcgtcactgcacctcgtcctcgcgcccgcggtcgccgcggggacggccgtcgcgctgccctccgcgcgcaaggacgtggacgccgcggccgaggccgctgcctcgccgccgcactcgtcgtcgcacatcaacttcgcgccgtcctccggatccgagtcggggtccgtgtcctcctcgccgagccgccgcgtcgccgccggccacgagcaactctaccaaccgagcgcgctgccgttcccgcattatgcgtacggatacgggtacgcgcccgagccgccgttcgggtacccgccggggtcgctgcagctctactacgcgcggagccgcccgcccccgccgtccgtcgccgtcgagcagcgcgcccccgcgtcggagcgcgtctacttcggctcgttcgaaccggcgcagtatcacccctacggaggcgagaccaggagggcagacagggcggccgcgccaccgccgtcgccaccgagggcgagctcgtgggacttctttaatgtgttcgacaactatgaggtgtacgacaactactgctacgatgctcccggcaccggcgccacgacgccagcgccgtacacgccaagccggagctcccgggaggtgcgcgaggaggagggcatccctgagctggaggaggacgacgcggtcgtcaaggaggtttccagcgagtactccgcgcacgggagcggcggcgctcgcagccgacgcagctctatcggcggcgtgagcagcagcattgccgaagtcgacgaagaggagaatccagtcgtcgacaagggagtggtcggcggcggcgtggcgcggcaacagacgcctgcgcatggcaacgtcgccgcgtccgttccgactccccggagagccgccgatggtgcagacgttgccggcgagatcaaggcgcagtttgtccgagcggcggacgcggtcagggcgctcgcgccgattcttgaagtcgggaggcggagctaccatccccggagctcagtgtaccatggtgagctatctctgttctttgtataacctacgcatgcatctcccgattacctcgtgcctgatcattggagccattgtttgattgctgttcggaaacagtttcatctcggatggtgtcagtgattgcgctgccgcattcaggatacggaggcagcgacctgttggatgtcggaggaggggagaaggtggtgggagcaaggaacttgtctttgactctgcaaaagctctatatctgggagaagaagctgtacgacgaggtgaaggtatgtatttacagattgaaggtgcccaccttgttaagtaggagtagtaccctattttgctgtatgatgcagtatattttttcgacagtatgatgtagagatatgttgaaatatgctagtagcatgtataatattagacgccatgatattgctcttcaaagtgttgtaggtcaggatgcaaaattgctgctcgctgagtggtcccatactcccatttgaaacaaccgagtacaggtcctgactagagagcaataccattcatttcactgtggcaagtttgcacagtgacaacgtccttaaccagtcaccaatagtcacgcctatgtagaaagatggatttgagatcttagcatggcattaggtgttttaaggctgaatcttgttgagatgttcatgcattatgtattgcccactcctcccaattccaacctactcatccccaaacaaaagcatacacccctaacagtgttggttattttagtactgttgcattgggtctatcttgaattaggtgtgctgcttgattaagaaaatggctcattgaatagcagagttgaaagtgcctttatggggacctaacagccagatttggaactgttcttttacttgctgtattctaagttatgcattttcttcataagcctattagtgagatttatttagtaagaacacttacgggttggtgccttttcctctaatggcaattttatcaagatgttgctgccatgcctttttaggttcccttgtagcataacaggacaatattatattttgttttcatatcattatcaccctacgtgtaaactaataatcctatgaggaacccatcaatgaagaattactgctcttacattggggaaatcatgttgtttgcttgagctcacccttggtagtctctattccgtattgaatgttttggtgctgttttcctcttccaggctgaagagaaaatgcggctcctgcttgccaagaactctaagaggctgaaattcttggatcaaaaaggcgctgaagctcccaagattgatgcaactcgtaatttggttaggaagctatcaacaaaaatacggatagctgtgcgagttattgctaaggtgtcgaaaaagataaacagagtaagggacgaggagttatggccacaagttaataccttaatccaagggtacactctattctttccctctgacatttattcaaatagtctgatttagctttgtctttacccattattttttttattttgtaatgtcagtccacatgtgtagtatgtctatcagaaagtaactgccttaattctgaaggtaattatgtaccagtgcactaaattgatctctgtagaaattgacacattttcataacaaaaatgatttatgcacatttaagttaatcaagttaaagcatcacaaacagtcatgtgtacgtctagaattgcttttttttttgggtactctatggcaaaagtgtatttgacgatacctatgttgtagaacaatcaagtggaatactgaacactccaaatttattttctagatattcttgcatttcatattatcttcaaatctagtttgtgtcaaaagaaaagtcttatagccatcttttacaggtttgtgaaaatgtggcaagataagctgaactgctaccacatccagtgtcaagcaatatcagaggcaaaaaacttggattcaataatttctggtggaaccagtcgagatctggcaatggagcttgaactagagttgattaaatggatcgtcaatttttcctcctgggtgaatgagcagaggagcttcatcaaggcactgaatggatggctggcactctgtcttaactatcagcaggaggagacggctgatggagttcctccgtattctcctggaagagtgggcgcaccccttgtgtttgtcatctgtaatagctggtcccaagctatggatcggatttctgagaaggaggtgattaccagcatgcaagctcttgtgtctagtgtacggagcctatgggagaaacaaaatgttgagcaaactgaacagctgattgcaatccgggaaagagaaaaatggaacaagatattggaaaggaagaccctggagattaacaagtaggccgacacactcaacagaaagctagctctagtaccgggccggcaaagccttcttccaacagcacaaacgtaccaggtccattttcttgaggcaaacagtgtgcaggttagttgggctgcaggaat

SEQ ID NO: 2160 - DNA, 2420 bp, Oryza sativa
aacaggctagtaacagattatttttttaatgggccaccttctatgtattgtatacttcggggcccacaggtaatccgcgggtaatttttagtccccgcccccgcccccgaaaattagcgggggcccgccctgccgcacccgcgggttagaatttccacccgcccccacccctgtaggggcgggtccccgccgggtccccggtcccactggggaaattgctacccctagcccccacgaagtcggcaaaacgtacttctacgaggttagtacaggttcgtgcgccgggggacgagcccgaactgaagctcgtagcgaggcgagtacagatttgcgctgtgcgggcatgtggcctggcatcaagtgatgcgcccctcgcgtgcctcccggctgaatcgattcctggcgcccgtgtcctcttgctggtacaaaagccgaagcccctgccgcccatccaggctccccccgtacgtgggacgcgggcacatcgggcaggatccgatgtcgccgactagtttatccgcaggctcgcccgagtccccacgacgaggcgaggccagaggctcgtcgtggtacaccagatgcaacggttggaacacgtcgtcctccttgatttcgcaaccgttccacgtcagaacagtgctggaaaagaacggatccatagagagttcttcgtggccgtcacgatttcgcggcgccaaattaccttgcccttatggttaggggcggcatcttgtgtaccgaaagtcaataatgactcgagctaaacccgtactacagactagagtgtggccccaatgcgtttcgcaggacaggacgggcgaaagaaatcaaaaggccgacatgccaccgacatttccccccacgaaagctatcatcagctatcatcaaagcgaaggaaagaaagaaaaataaaaggaaaagaactggctggaaattagagaagccccggacgactcgatctgggggtggcaaattaatcagtgtgatcaacagggataacttatcccgtccgaccaaatccaccaaccaaaccaagacccgatttgttaggctgtgaaagacggatcagtgggaccctgatctacggaccccatatgtcaccgtccaggtctctggatctctcccgtcgtcctaatcagacaccgcgcgcgcggtgccgtcgctctcgagccgtgtcccgctcccaactcgtcacaaaagcgatcacagactcttccttcctctgctgggagagaagaaaaattggccgcgatgatgccgataaagaggaaaaagggatgagaatccgatggaaaaaaactgatgttaatctatcgctactgctgcgcactaagacgaatcgtatccgaacaagaaacgcttacgttactgttcctaaatggatcgctccgctcatcacttaaccaaaaatcgattaggaaattgacggacagcgacgcccgaagccaagtgtctcgtcgcgtaggcgtcgaggcctcgaagcagagggagcggagaggcggacgcgccgcccacgcctcctctccctcggtgacacggccgtctggctccacatggcgccgacctctcccgatgcgtccacccgtcccgaggcaccgccacgtcggaaccagccggccgccccacgcgattgccgacacgcgtcgcggcgccactggctcacccgctgcctgcctctgcctgccccccatctcgtcgccatttcccgcccacgcttcttgtcctcgcgtcgcctacgcgtacgtacgatacaaacgccgcacctttcgatcccctccgctatataaggagggcatctgcctcgccaccttcttcatccgaaagcaaaagcgactcgtcacagctcaaacaagtcaagagcgaatagttcttgctgatctgttgtttgattactttagttctcgagaggctttagctgaatccatcgatcgatcatggaggatgagaggaacacggagagccaccagggtggcgaggctgcagagcaggtggaggtgaaggacaggggcctcttcgacaacctccttggcaggaagaaggacgatcagccggaggagaagaagcatgaggaggagcttgtcaccggcatggagaaggtctccgtggaagagccaaagaaggaggagcaccacgccgagggcgagaagaaggagagcctcctctccaagctgcaccgatccagctccagctccagctcggtaagtgcacacatgcatgatctagctttaattagttacagactttttagtaattatagaaggtttcatgacctttaatcgttgtgtgcaacagtcgagtgatgaggaagaggaggtgatcgatgacaacggcgaggtggtcaagaggaagaagaagaaggggctcaaggagaagatcaaggagaagctgcccggccacaaggaccatgccggtgagcatgc

SEQ ID NO: 2161 - DNA, 3808 bp, Oryza sativa
aggttgaggactcctagacggctaggagtcgttcctgagccaccgatctacttgtgattggccgggagaagtttgtgaaggccagatctcatcttcgcaagggaagagatacctcttagtggaaggaggagtgcttagtgcaacctatcgaggaaagggttagctaagacccagctcttagtgagctcctcaacggatagtagaatcccctcaaggatttgaacatcgggatcaactttgtgagctatatcttggtgatatttcttcatccctctcctctagctttgcttgcttgtgccgctattggtctagttgccgtttgtgccttgtttgccctgttatagacttctagatctagagtttttatcctgtgttcgctgctctgtgcattttcggaagttccgaaaattccagcctagttccgaaaattcctgcttccgcttcatttaagtttttaaattagcctattcaccccccctctaggcctaattgaccctttcagtaaagggctaattgaccctttcagtagctaagagtatgtggtcgtcaaatgttgtggcaagataggctttagatgttttactcctttccgttccctgtctcctttctctttttttccctttcagttggcatgtaaataacttttatttctatgtgctcctaaaaaaactcttaaaaccaagtcaatttacctctaaattaaagtggtttggataacgcttatgtggcactagacgcaaaaataatgataataatattaatgggagccacctgtcagtaccagtttgaaaaaaaaaactaaaacaacttatgtgactatgtgagacccacatatcacgcttcatcccttcctcggtctcttttacctcctctctcaaagaagacttggaagcaaagtggaggcggaagcgaagattgtaggcacgtgtggagaaggaggtgagacggtgctcggtgatgcgctgtgaaaaactcaaggcttgacacccttccatggtcttcctccacaccatcataggtcaaccctttcttcggttcacgtaaaaaaattgaaccagagtttcaggttatcgggtatccatatgtatagagaaaatccatgaaataccatcgacaagcgcaacttcctaaaaatgtcatcgtacaagcctatttctcccagaaataccataatagtcaaacggttgttaacaactcttcgttaagttgtatgaaaagacattcttaccctccagacaaccatttgctcacacaatatcattttgtattgtttgctcacacaatattattttgcattgatccatatttatgttagcttccaaattcacggacatcattattttgctatcaatcaaattatttcataatgcccctgtgtcgttgcctgccacctcctcgcagcccgtcacgccgacgcctgggaccgtcgggcggacgcctgcggccgacgcgccactgcctgggagccccacgccgccacctgggaaccccgcgtcgcagcctcgccgtcgtcgcccatcaagagagttaaatcgggttaggtttaggtttttatcttttcataatttttttcctttaccggtggattgggatagaataatttggagtgagagcaatttggttattattgtaaaaaaaaattctaatagtgtggactaaacggtatgttgactgtgatggtatttctaggagaaataggtttgtacgatggtatttttaaaaagttatgtttgtcgatgctatttctagaattaaaatgcttgtcgatgatatttcatgaattttctcatctttataagttggtgccattaactcttggcaagcgaggtgctactgaagtaactgaaactgagcttttgctgctgcccggctgcttactttgctctgctgccttgctgctgttgctgcctagcaccgctgctagtggctaaatggcccaaggccagctactgcagctcgctgcgctactaccacttgaattgctctcctagccggcaaagcccaagcagctagctgctagctggagtacttttcgagaatgggccaagccccagtatggcaggcagcggctgctctactttgcttcttgctctgctcatttctttatttctttctcgtttttctattttagaaaaagtccactttgactcccttaattgtacgccgaatctaattcgtacccctcaaccagaaaaccggataggacgactcactgaactattgaaaacagtgcaatttaactccctcggcggttttggaggacggttttgctgatgtagtgctgatgtggcggtgttgacccggtcttcgtcccacgtggcgcctacgtggcattagaattaaaaaaaatccatgggacctatttgtcattaaaaaaactgggtgataccgcaccagccggaatgcctaccccgccatgccacacgcggcgaccgccgagccgcagtagtggaacagcgccgccaaatcatcagcgcagcaacggtgacgttgacgagccgggcgatgagctcctccaaatcatcaccgcgccccggcgccgtcatctccatgcccaccgccgcgtgtggcgccgtggcggcggcgtccagcagcagctagttgttgctatgcacagcgacggcatcgttgaagcgggctatgagctgctccatctccatgctcgccaaggccaccgccgtcgacgtcgggccccacaatatatatttgtgtgtgaatgatagatgggtcccacatatattttttaaattctaatgccacgtaagcgccacgtgggacgaagaccgggtcaacactgccacgtcagcgacacatcagcaaaactaccctccaaaactgctgaggaagtcaaattgcactggtttcaatagtttgggagtcgtcctatccggttttctagttgaggggtacgaattagattcggcgtacaattaagagagtcaaagtggatttttttccttctattttccctctaattattctgggccatcacagtgcctctcggcaaccttgaggccgtctctgcaccgactcagcccatatcgtttcccttcatcaccaacgggcatagctgcgcgcttgtcgcatcttgcctaccatcgatgggtgggtgagatcaatggtggcggagggcggcagggctcagatcgtgtgggtgggccctaacgctaacgcaacccgacggccaccacccaaaatatttcttctcgacggcagcgagtttctcctccgcttgttattccctccttccaaatctagcacaatggttgagcttgtgctcggggcccactcatcgagtactcaagttgccaccgcctcactcctcggcggtggcctacttgtgttccttcgtcgtggctcgagcgaaacttctagagccacacaccccactctgattaatctcgtcgacgcctcactcctcatagcagccaactcactctcctccgtcgtggcttgggcagagcaacctctagagcctacgtcctcctctgactaccctcaccatcgccaccgccactagaccttgggtcccttagctcatcatctactgcctctctttcggcgctaaggtgctgatggatgaccatgactagcacctgctagagctcctcctcaaccgacgctacggtttttatatttttctaagagcggcaaatccaagctagacacctgccccatgttgactcaatgggtcaatcacggttagtttgttacttcagcaaaaagtacttcccaatccaatcagtttgcaccagtttttgaagacagggatgtattatattcgattgtatgattgagagagaagatt

SEQ ID NO: 2162 - DNA, 674 bp, Oryza sativa
actaaacatgcacactgcctactgacgaaccattgcatgaacattttaataccaacaagatcaacaccatttcttcatcaatcacaaggtggcatcccattttgtcagcgaagaaagatttgactcatgcatctcagattatgacgggaacgcgtccatgcgtcggggaactaaggaccaatcgtaatttatgcttcgcatgagaatgtgatgagatcaagagggctaaatcatttagtcgcggattctacaaagttattgttcttttgatcatggtttatttgacgaaaagaaatatcacgcacctgccattcttgcacgccctgtaagctctccggatcgagcttcttgacggcgacggccatgccggagccgctccgcgcggggctcatggtcctctcgtccacccaccccttgtgcacccgcccgaacccgccctcgccgaggacggtgtccgccttgaagttcctcgtggcggccctgagctcggcgaacgtgaagatccggaggttgggcgcctccaggatcctcccctccgcgctggcgtcgccgccggcgttcgtccggcctccaccaccagccaccgatcgcccgccgccggtgcttgtggctgtggcctggctcggcaacttaccagttggtggccgccctgggctcatcgcgacgcgtgcatt

SEQ ID NO: 2163 - DNA, 688 bp, Oryza sativa
ccccccccccccccttttggctgtagaatcaaggcggagacgaaagctgtgcagcgtagccccaaaaatctgtagccatgttgtagtttaatctgtaggtgcagagagactagagaggaaattaaagaagatcagattcatcaccactggtactcctagcgatgcttgcggctactcccaataccaaatccccctcagatctccacacacacacagagaccaagaagcacaatcccatctaaacctgatattctgatctgcccatcccccaaccccaagaatccctcacccaaggccggctacaaccctagcttggagcttcaccttaggctctataaatagagcactctgtaaagggtcactaccttattacagtgagactgtgggaatagtagtagctgcggctgtggatgcacagcttgggagaaaagcagtacaggtcatgtgggcttatcaaaggggcgcttactgagagttctttggcattctgtccacctccttgtcgaatcctcagagacagaaatctcatatctgttgatcttggaggtgggcatactgccaatggagctgtgtaggcctccctttgtaaaacccatatgactcaaaatcaagagagagagggtcttgttaattagatctgattagttctttggaaaccctaaccaagcctggttggggctgcaggaat

SEQ ID NO: 2164 - DNA, 665 bp, Oryza sativa
ccccgcccctgcaggacccgcctcaccaccgcggcgccgtcagccgccgccccggagaacccgaagccgtcgtcgtcgccgctgccgccgccgacgccgaccccgagctcccagccgagcggcacctcccccgcccccgccgcggctccccacgccagcgccaggagcagcgccagcagcagcgcggacgacgccgccgccacggtagcggctctcgccatggcgcgcccctgcttcttgtggtggtgggggattatttggtgaggtcgccttcttgctttgcctcgctctcgctcgcttgctcgtggcggatagcgtaatggttgtggtagagtggttggtggtcaccggccggccgccggcgcgcgggggatttataaaggagaggagagggggaatgcgtatgcgcgtgagcagcgctgcggcgcggggcgaaccgtgcgtcgcgttaggtttcgacttgtgtcacggaagcaggttggacctgaatacctggctgggtggctgacctgagtacctgagtatccggcagcgagaaatttcactcactcacctaatacgctggaccttcaaaaattaccattcaatccgtgtgtttttttaaattagccaccggagatgtgaattctttcgttccgtgctattcaattaatccgggctgcagg

SEQ ID NO: 2165 - DNA, 657 bp, Oryza sativa
cgcgggccgcgccgatggcgatgcgcagccggaggctccacgacagcggctgctgaggcgacgcgcttccgccctctggttgacacaaaaagattgtcatttttcagctctcgttctaccgttcagttacagtgtgttcagaaaaattctggtttgattttccgatgccagctttgcaatccaataatgaagtaaattccattgtcattccaattccaacctggcaacccaattatatctatatatctatactcttcatatcaagctagcttttgatactctattcacctgtataaattatgcactatcagttgactctgttctcagaacatccactaatcccctctccatgtgaagcagaacaatgatctcaatttgtccccttgtgaccaccatcaggcatcgttaattagcagcccaagtcaagttgtcagctcttaataatcatggccataccgtcatggatctgaaagcaccatgaaaccttttgtcttaaagtttacttactgcgtggctcacttctgaagaggtggttctccaagctgccttgggccatgtactcgtacacaagcagtagctccttgtcctcccagcagtagcccagtagcctcaccaggttgggatgtgaaagtctccccagaaaattcacctcggact

SEQ ID NO: 2166 - DNA, 1779 bp, Oryza sativa
  unsure (1)..(1779): unsure at all n locations
gtttttgttgaccatattggctttggtgtttaatctgtctctgaatgccagccagaggaaaaccttgcaattttgcgggatggtgtggagccaaatataatctgctggagtccaaagtgacccatggaaggacatcatccgataggcatttgctgttgagactttgggttccgggtatgaaaactctcttgcgtttgtgttgtctgggtaggggtggtggttttgcagtatttgcagcagttcatgcagctctgactctgcttggtaggataggtttggatggagctggatgtgccaggaattgtgcctgtattgcgattcaaccgtgcaatccttgtgtagggcaaaagagaataaaactgggaaagcgaactctatgtgcgctgggatagccacttatctttccaaaagagggttgttttgccgttgccaagttttacctgggtcgagtagcttagaatctggaattgcgactggatgagtttccaagttggtgtatcactggctctggggtttagctgtattgcgttttgcagatatctttctctaaaccagatagccattggatcatcttctgctgagagtaccttgtttgctagttttaagagtaacgctgtgttatgtgttcttaagtccttgatccctaatcctccttgttgtccctgatataggtctgatactctgatgtaatatcattcatgatttgtgtctattgccaaggagcaccacatgcttgtgtacgttgccagttcacggagtttctaaatccaacaatatcagaaaagagttgcatgcagcctcttcatgaataatttacaaacttatcttcaccgcatctaagcaaatctctattgaatagaagacactgcagcttaattgctgaaaagttctttnttccagcatggccctttcaagttcaggataggacaaaatcttgcatctattatattgctcagtttgacaccctgtcaatagaatcatcaatttcttctgaggtttttgcatgggtaaacagaagttgaaaaagagcttattgtttgcactgaaaccttggcactcttaataacggtttccatttactgtttaccacagatttggccttcccatggaatctgatgaagatgctaagaaggggtatgctgattttgaggagagggtaaagagaacgatatatatcgatcacctttctcctcaagtcacaagctcagtaattgaagcagctatttcccagtgtgcacgcgttgtcaatgtggacttcattgttaattacacaatcccatatgatattccttctgctgcgttggtggaactagatgatgaaatacaagctaaggctgctatcgacttgatgaataatttccctttcataatcggtggaaagccaaggcctgtaagagctatctatgcaaagcatgaaatgtttctggatcggcctcctcgccctggaatcaagaaagagttccagtgggtgaaacaagaagatggaatagagtatgaaggaatgaacaaactgcggctccttgcaagaaggcaggaaacagaaaatatggcactcataaaggtaagttggatgacttttgagttttttcggatgagtgacttatgtattgtgctttatgtccactaccatgaaacagcaaacttttctgcttaactccctatgaaactgttggtagaacaatagctcagaattcactcagaagaatgctcaagggaactgggggcaggctccttgatagcgcatagacaattggaacctagaaaatgtcaacctgaata

SEQ ID NO: 2167 - DNA, 991 bp, Oryza sativa
attcctgcagccaaatgtccaaaaatactacgtagccaagatgctttattctgtttccactaagtatatatagtgtataaacatatcaatatatatttacatcattatcaacggcatccgcaagatgttaatttttccccctcatctagaaattacgctctatgtccatatggcacaccaaagatttctgtgtttctttcccgagaaatcggtcacatgaaaggattcaagtgttccgttcggacatcagggaagaacgatcgaggatcagaaaagaccaaagcatatggtgcagcaaaagcattgcgtatgcccacgatctgcagcagctgcaagcgccggtcgctcttacgctatctcactctcggagacgggtggccagcggccgggccagcccagtccgaccccggccgcggcgactggccgtaaccgtgcgcgccgccgccgccgccgccccgtgccgcgggacgcggggacgccgagccgggggcgccaccgccgctgccgcccctggacatggactcgatctcctcgaggacggcgacgacctccctcatggagggccggttcttgtggtcggcggcgaggcaccggagcgtgagctgcgccgcacgctgcgcgcccctggacgagtactgcccctcgaggcgcgggtccatgagccgagccagcttccggcggtcggacaggaatggcttggcccagtccaccaggtggtgctgcccgctgggccgcccggcgtcgagcgcgcggagccccgtcaggagctccagcagcacgacgccgaagccgtacacgtcgctcttcacgtacaggtggcccgtcgccacgtactccggcgccgcgtagccgtaggtgcccatcacgcgggtcgtcacgtggctgctgccgccggccggcccgtccttggcgagcccgaagtcggagagcttcgcgtggaattgctgcacgtacgcatgatcaatccgcgaggaaaaggggctgcaggaat

SEQ ID NO: 2168 - DNA, 1467 bp, Oryza sativa
gtgaggaatttactttttgtgatatgatggcttttgttttgtgacaaaccaattatcttttctcttgatcatctggcaaaccatgaaatcgtttgtcttgaacccaatctttatttttgaccaatggtcctttcctgagatctgctgggaaagtataagctttttctgcctttcacagaagctatttctccctgcgcattttactctctttatgatagctcgatttttttttcatcttacaaataaaatgatgtaatgtgcattccagggtcgaacagtactctctttatgatagctcgatttttttttcatcttacaaataaaatgatgtaatgtgcattccagggtcgaacagggttgaaatgttgttgaggaaaatgacaaagcaaaatagcacgtgaaggcgtgaagcgataaatcagggagatggcagccccactgcacgtttttctagtggaggcaaacctacctacaagatgtaaccgaagtaaatcatatccttggagaaacattatgccggtatgtaacactacgagataactaagcgttgtgtgatcatgtatttggctcatcgggattcaaaattcagacttaacagtagtatactccctccggactgataatacttgtcattttataaaaaggtaaagtcaaactttagaatatttaattatgaatcatttctaaaatatttgtctttcaaatatggtgactacatgtatagattagtcttaaaaagtactttaataaaatcatatatttgttaatatttttatacatattataataaaaaaacaatggtcaaacttatttttttaagaccgtgcacttgtataagactaagtattatcaacccgaaaaaagtatatcggctttactccccatggtaaaatgagggagcaccggtcctaagtgacttaaaaaaagtatatcggctttactccccatggtaaaatgagggagcaccggtcctaagtgacttaattaggcggtacctatcgagtaccgattcctagatctagcctttagctggttgtatccaacgatagcatctttcgcttttttattgaaggaattgtctggaattactcctcacggtgaaaacttgtagtttggtcttaactgatagtgtcatggcaatgacggcgcatgtacactttgttacttttttaaggtattgtgtcacgccccgaactagtcccgaccgaaactagcccgtgacgctccaaattaacctgttaatcgatatcagtcccaggaaacagtgctggtatcacagggagacagaatatcacagcaacagatgtctctttattatagagtagatgtacagtcatgttgggctgcagacagatcccgagctcacaactgcattacaaaaggaaagcggaagccaggacttggaccaatcaacacaggcgcgacttgggaactaggccgaaaccctaaaactcatcgtagccggct

SEQ ID NO: 2169 - DNA, 920 bp, Oryza sativa
ataagattactgcaaattcattgataagtgcatatgccaaatgtggaagactggatttgtcagtaggtttgttctttagtttggaatacagaaacttggatacttggaatgcaattatcagtgcttatgcgatgcatggattctatattaatatgcttgaaatgtttaagcaaatggaagaagaaaacattcagcctgatgagttaacattctctactgtgcttactgcttgcagccatgctggtcttgtcaaggatggttggcgtatgttcaattccatgacctcagtatattcagttcttccacaggaagagcattatggttgcatggttgatttattgggtcgtgctgggcatctggaagatggatacaaatttataaagctatctaccttgaaggataaatccactatattttgtgttttgatctctgcttgcagaacgcatagaaatacacaactggcacttgctattagcaaagagctccttgagcatggaccacagaaaccaggtatttatgctctgatttcagaagtgtatgctcaggaagggcagtggaatgaatttaccaatacaagggccagagctaatttaagtgggttaaagaaacatcctggttctagtttcattgaattaatggagcaaggcatgtgttagcgaagagcctgcggacggcatgctactctttatagtgtgtaaactatacattatgaccctttttaacttcttactttacaaatgggcccatgagataactaatagcaaactaattgcaggaatggactcctccctttgcatgaagaacagaagcgcacaactgcccatctcgcatctctctcctctcaaatccttctcaaattggcctgaaatcaaaggtttttccgtgggacgtgtggacatcgtctaggaaggtactctccc

SEQ ID NO: 2170 - DNA, 1370 bp, Oryza sativa
ggaggggaaggaactggggtttaaagggggcggcaatgtcggtttgggaaccgacttagggcggtcaaggcgcgagctggcgctcggcggtcgcggccaaagcggcgacagggaggatgacgccggcgggggaaaaaggggaaaaaggagggggagaaaggggcttgcccttttgccgattcgggaaaaaggaggaggggagcgggggcgacgcggcagagggaggaggggcgctgcctccgtcccttggcggcttgcgcgcggagtggcgggggccgggcggtgacgacggcgatgacggcgggcgatttggagcggcgcgacgacacgggcgacagacgcgtgcagaggctgacggcggcggcgaccgggcggtcggccactcagcacgcgcgcgtggcttgcaacgggcggcgtccgcgcgggcgcgcgcacgcgaacacggcgtgcgggaagcggcagcgagggagcggagagggaggacttggctcggcgcgggcggcttacgcaggcgcggcagagcgaggagaagggaagggggcgctcggcgcggcggctcacgcgcacgcgcgcgggcggagcggaggaggaggagcactcggcgcggctctcgcgcacgcgcgcgcggcgcgcgggcgaggcggagcggagctgagcgtgggggaaagcggagcgcgctggggaggggagagggcgagagagagagagagggagcgcccgggagagggagagagggagatgggccgagcgagattcggcccttcgacccgggggaggcaaaatagacttttgcggaggaatttgatttggaaggatttggattcggatttgaactcgacgatagatcggggattgagatcttgagatggcacggacactagacaacaagcaaagaaacaaatttcgcaattagggtttttaagagataattttcccgctaggcgccacgacggaacgggcgctacatattgcttacggaaagccttcattatagtctaagtgttgctttggtcgagattaaggatgaagaacacttgtgcctgtagtttgccacggcttgttgttatatcatttttttagtttttaaaaataattataggctatagaataactatgtgaagaatgtgagtggttttagagtaattgaattatcgtgatataattatctaagtaggcagctaaatagctatattctagaacagagaagatcaattaaagcttaatttatgttgaaaaaaaaaatatcaactctatgagcatacagatgtactgtatgtggtacctgttgattctatccagccaatccgatatcctaaacattggtagctccacatgttagtgttctctgtcggatcagggctgcaggaatt

SEQ ID NO: 2171 - DNA, 2148 bp, Oryza sativa
acagaaatgagcttgcaggttatgaaaaataaacgatattctttggaagcccgtctaactcggaaaggtgaggtacctctatacaaatgatgaaatcttgaatgcttgactttaactccaagctctgtgccaacggacttctaaccaagcccaaagaatacatgatagcaatcataataccctgccaccaagttaaaaatactatagatttgaacgaaagaaattttgccaatggctttatatgtgccaattcgtccttagtagccgtgtaccactccaccaaacagtatagggcccaatattgactgaagttaaggacagcggcaaagtatgggtatctgcagtttgaacaaaagcaatgaagttgaaaaaatggataagcatgcataaaataattcattgaagtggactgctagatgttcacatatattctggggataaagacaaggtgataacagcttatgcagtgacacaggtagagtcatcaagaagattgcattactcttctatgcagttatctgtctctgcattattcctattataaaatttttccaagcattatgaaattcaaattataaaggtgaatgccttttgctttgctgaactcaagacacaagaggtgaaaatggaaaattgtcttacccgcatctcaaattgaattctccatcacaatatgcaccaaaaggttgaagaatcagggataggctagctgtgagggtctttataatcacctgcacaggtacaaagtacttaaccaatatgctctcaaaatcataaattccatttcaactagctggacaagtggtcatacatattgaaatataccaaatttgataatctggtaaaacctcacacccattctccatggtttcaatatgtaattcacagggaagtgatggtgtatgatccctttttcagaagcaccatgcaaaagaggttccccagaatctccgccaccctccctcttcaaaaatgcaattgtcctttcttcaccacctatatacaaaatatatacattttttttcaaattaaataagagcgatagatggagagcttccaaattattaatgaaccggttccatatagtatttttatcatgttaatcctactttccttgtataaaaaagcaattaatgggaaaatatacatagggatgcattgtttgtttgtccaaggtgacatttttagtagttatacacaggttcattttattaagcctcttctctcgggtaaattccctcgaatagaatccttgataacaacgatactgttatctcaggaatttaggcagatagaatggtggatgcctttgcataaccttatcgaacaatagttccagttgttctggggtgaatatagactagctgtatacatggaaaacctgtatccagttatggaggtacatattatatataaaggaccataaatgaaatcatgcctcattccaatgccaaaggtctgtttctgttacttggtgtgttgaaaaatttatgaatgcccataaattggtcatcctgccaaagttttgcccaaattgaaagcacaataatatgtagctagtcattgacaaagtccatggggttagacaggccacaaaccaaacataacccaactacctgcattgttttaacatatccatccccacgttccctcaaaatgggaaaaaaagattggtgcatcatagcaacatcataaatgtgacagatctattgcaaaaagagtagaccgtagatcaatctttaactaaatgtataagtgcaagtagcaccctgagagtggcaatgaaagttagaatgtctaagaaaacagctcacctaaacaagcagtaatatatcttccaaagcaatacatagcaaatgcttcataggcgtcacgcaggatgccacagtacacgctagtgtcaggatttaccaatgaaacatactgttgcagaggagaagcaaagatcatcaaatacgcaactaaaatatctgaagagccctaatccaacaaaaaaaaacagaagttgctttggagatattaccgactcaactgcatagcaagggaccatcaagataacaccgagaacaaatttctgttcctggaaaaacacaaaaacgaaatggatattgtttgcagacatgacaaaccttagtattgataacatgg

SEQ ID NO: 2172 - DNA, 714 bp, Oryza sativa
gtggcgtgctatcttggcatgaggtgggtcgggtaaagatcaagcggtccacgaccgagaaagcgtgcgtggttgtgacatgttcctgtacaggccaccttgcctacggcccaacgagaacttgatggagctcctcatcatgatcgacggacggcccccgcgcatcttgcggtttggcggcaagcagcagcactagtatggctatcgatctcgccagccatggcggagctcgccattgaagagggacttcaaaatccacacggaattaagccgatttgagtgggatttgtggggggaattgatgaggaggatgagaggaaccgatttttacattcaatttggggcgagagcaaccgaggagggagatcaagagagggcattgttgcatgagttcaccggaagagagaaggatggtggcgggcggaggtggaagacgctcctggcgagcgggccccacggtggaaggatcttggtcggtgcgtggagtggctgaagcaagggcatttgggtcaaaccaaataagcaaaacaatggaaaatatttgcaaataactgaaattggctaaaatgccagtgtggcaagatggggacgtttgaagatggcattataacgaaaccacattcgaagatggcattctggcgaaaccccaacccgaggatggctaaatgtcaattttctcctctagcatagtgccatgccactgttccagaaatg

SEQ ID NO: 2173 - DNA, 664 bp, Oryza sativa
ttagctatctacgagtaacgtgggggtttctaaaaaagggtcctggagtatagtgtaaagaaagccaaagtttcactttccagttcttgctatcttttgcttgaactctgaaatttgtcattccaagctctttgatatgcagagcatacttcttatgacaatttatttagcatattcctaccttttcttaaagtgtaaacttgtaggaggttccaaggaaattcttttcaatgcccgattccagcatgtttgtctaattcgtccaacttgacaagcttgtaagtacttctttcttaggtgacattttccccctgatggttggcaaggccaagcttgtcatgataatttgtgttctaaatacacatatgcagacgaattggtgatattgtaaacgggagctcttcgctggcctttatcagtaacctgacgtctttgaatatcctgtatgtgacatgttttaaagttttattaaacatcttacagctttatacattgaaaacttgaatctaagtggggatcttttgttctttcagaatattgaggaactgcaagatatccgatcatctcagaacagtaaatttctcttagcttggaagaataaccttggtgtaagtttttcttgacataaacccacgtctattgctatggcctattattctcgtag

SEQ ID NO: 2174 - DNA, 631 bp, Oryza sativa
ctttgtataagctaatgtccttctttttttttactaacgtggcaattccatctggtcaggtgaatacaatcttgtttctagtcatggcgaagcaggcctacgcgacgagcagcctcgtgataggatatgcactctgctcgagcttgctcgcgatcatcaacaagtatgccatcaccaagttcagctaccctggcctcctcactgccctgcagtacttgacatcagtggctggtgtctggaccctcggaaagctcggactcctctaccatgatcccttcaacctccagaccgcaaagaagtttgcgccggctgcacttgtgttctaccttgccatcttcaccaacacccatctcctgaagcatgccaatgtggataccttcatagtgttcagatcgttgaccccgcttttggtcgccatcgctgatactgccttcaggaagcagccatgtccttccaagctcacatttgtgtcccttgtcactattttgggaggcgctgttggttacgtgatgacagattcggggttcagcctcacagcctactcatgggcagtcgcttatctggtgactataacaactgagatggtgtacatcaagcacatggttacaaagttgggcctgaatacatgggg

SEQ ID NO: 2175 - DNA, 603 bp, Oryza sativa
tttttttttatgatgattgatggagcactttctgttgcactgtcaaatagttgaacagtatttttgcagtaaatattgatccaatcccatgttttgactaatcaattttcagttagcaggaaaaaactggattaatagtaatcatacctcgtgtgtttggctaatttgtttgatgattcttgtgttgtttcaggaacctgcagcaaaattacttgactggccctgtgccatcattcattgggaagcttactttcatgcaatacctgtaagagtttgatttcaagttatatattcttctacatcagtctgttggagctttctcttagacatcttctctccttgttattttttcgtttatgaaaaaaggaccttatcaatcaattcgctatctgggccccttccaaaggaaattgggaatctcacggatcttcgatcattgtaagagatcttcttgcatgtcttctcattctcaacaattgattagtgtctgaagtaaattaattgcatatattctcaaggagaagttctaaaaaaacattactcatatgcaagtcttgtcggtgcaatttaccttttccaaatggtgttcataaccttaatcca

SEQ ID NO: 2176 - DNA, 669 bp, Oryza sativa
ttacttgcaaagcattaggacattatgtccggaaaagttagagagaggtgaaattttttcaggaagaggaaagaatcaaagaacaaatttggttcgtcctggagatacaagatggggttctcattttacaacattagctcaattagagacaatgtgggattctgtggtcaaggtgttagcaatggttcatgcagatgagcgtaatcctagtcgagccggtggtttggtgcacaaaatggagagcttttcctttgtgttaaatatgaagttgatgttgaaagtatttcgtattacaaatgagttgtctcttttgctacaaagaaaggatcaaaatatagttcaggccatgcagttgcttgttgatgtgaaagcgcgcttggtcgccttgagaaaccaaggttgggagccgttatttgaagaagtcaaatcattttgtggcaagatggggtcgatcaaggcttgatggcaacttaatcacacttgagcatctctaccgtgttgacacttactttgcagctcttgattctattatcacggaaatggatcatcgtttcaatgaggtatcatctgagttgcttgtttgcttctcttgtcttgatccaagagagtccttctctaagtttgatgtttgataagatcgcacggttgacggatatgtatgaccaagac

SEQ ID NO: 2177 - DNA, 567 bp, Oryza sativa
catatttgatctgttcatgttttactgcttagtttacatgtgtagatctaatgatgcgttaatgctagtatacatctgcaatgccatgatttatttatggaatatattaaattattatatgcctataatctcaacagccccaagtgcaaaattaaagctaatccaattatccaaacaagctaagaaatggatttaaacccattctgaaaccgtcgtcaaaccaaaatcaaaattggatgctgttgcctgcttgctgatggccacactaccaagttcaacggccgcggccgacgcgttgcctgccaaacagatgcagcacgacacggcaaggcgaaggaggggggcgaaaaacgagggcaaagcagcgcgcaccaccgcgttctacccggccgccggcgcggggtacacgacaatgaggtcaaggtcggagaaggccgcgcgcggcgaatgggatggacttgggggcggccgccgtacgttctcctcgaagcttgcgtggaggcggccggcctcctgctccgctgtggcttgacgtcgcggtgtgacaccccgcgcgcgcgcgcgcgc

SEQ ID NO: 2178 - DNA, 505 bp, Oryza sativa
cctattttgtaccctttattaacatatttgtttgtccaacttggcatctgcatagggtgatctgaaagaaaagaacttcgatgtaaggaaaacagctggcggaaaatcttttattgcagttaacaaaagatacaacgcaactgtgtcaaaaaacttccttgagatacatctgttctgggctggcaaaggcacttgttgcattcctactcaaggttactatggacccatgatctctgcactaagtatcactccaagtaagctcagtacccgaattagttaacttgaagaatgtatgatagttttttttttctgattactgaaacacgttgtccagattttactcctactgtgagaaatggagttccaaaaaagaaaagtaaagctggtgtaattgctgggatagtgattggtgcgtcagttataggatcagcagccttacttgggatctttgttttggtaaagaagagaagaaaagcggcaaggcagcaagaaggtatcatttaag

SEQ ID NO: 2179 - DNA, 554 bp, Oryza sativa
ccttaatgattaggcttacttggagtaatgcttaatgctgagatcaatggcccgtagtacctttgaataggaatgcaacaagtgccctttccagcccagaacagatggatttcgagaaagtttttcgacacagttgccgtgtaactcttgtaaccaccagtgaaagattttccaccagccatcttccttatatcgaagtccttttcttttaggtcaccctataaaaatgtcaataatccaatcagataaagaagaaaaggatccagtaaatatttttttctgtttttgcttttagtaaacactagcatattgcccgtgcattgtaacggtatttttaattaaagaaaattatcattaacccgttattatcatctcttaattgctgtacaaatctgttactgacatgtggaccctttggccccacgttgtccttttttcattcccgcaaaaattagagagttgttaggagtattttattcttttttctcttcaagaaaagttaggaattggttgtggggtggtagcagaaccaccaccaccactagtccctttta

SEQ ID NO: 2180 - DNA, 13852 bp, Oryza sativa
tagaccaagtgtagctcatatgaatagcttctgatctgaatgattatcccttatgggatactccaaaataaatataataattgaatcccgactggcgcaagtattcggttgatagcccttacggggaataataattggtccagtctttgagcatagaaaatagactcatgactatgaatccatgtggaatgtatccggaacaagtccaaattggagatataatcctcacgcttgagttgatgagcccctgagcatatagcttgtccttctgtcatagtcaaaattgtctattggcaatagctgacgcagtcggcatggagatgaaatgaccaacatgaagacgaaattgctcatcagaagtaacggaagacgtcagtggtagtaaagatgccatcaatcaaatgtaataaagttgcataaccatggagacgaagaaaccagtcggcaacagtcaggtcagctagcagtgaagatgtaggcgcccaacaacaacgaaagaacagtcggtggtgacaaaagcaaaccgacgatgaagacgtagacgcgcatcaacggtgatggcgaaatccaccaatcatgaagatgaagaaaataatcggcggcgacaaacgcatccgacggtaatgatgattagcggcaacagagatagccgactatgatgatgaagtttcccatcaacgacagcagagtaggctatgttgaagaggcttgacaagatgttgatgaagatgatgatgtcggtgatccagtcaatagcgatgtagcagccgatgataacgatgagatcctctatcggcagttgcgtagtaggccaaccgtgaagacaaataattggaggagagttgatgttgttgcccaactcgtctaaaccgaaatatttgaagttgttgaagtagaatgtctgctctgaatcaaagatgaagataatgactcctggagttgactcgttggttgatgaattgatttcttcagcttgacataaaatttgtcaaattttgagccttgtatttgtgtagcccccgactctttggttagttgggaaacaactgaacatagagtcgagaattatagcttcttgtcgtcgagtagtcattgcttgattgaagatatgtgttgaagatgtccaagtagaaatcctgaatattggagagcctcttgttgtagtaaaataacatggcatcgcatgccgagatgtcgaggctcacaaagacgtcgtggttggtgaagtagcaaaacttgcgaagtagcagcaatagagtttgccagtgccgaagataataaagatgaagtcgctctaccatgatgacaaagttgcattgccgtgatgaagtgaacacgagtcgtcggcaacagaagcaaactggtagtgaagacgcgcagttgtgaagataaaaacaccagtcgacggcggcataaccagtcggcgacggaagatgatgatgtccatcagtagtggtagcggtataaaccagacgtagaggcgagggcactagtcaacagcagacgagatgaccggcggtgaagaagataaggccaatcaacactggtagaatcatgcagccatggaagtgcagaaactagtcggcagccatggcaaacgtaggcagcttgtgttgaagatactgatgcctattagtagtgacagcgatgtagccagccgtgaagaagatagcatcagttggcgttataacaggccagccgtgcaggcggtgacaccagtcagcggcggatgcggcggccggtcggtgaagacgtagacgcccaacaacggtggcataataggccagccgtgcaggcggaaacaccagtcggcggcggcgaaggcaagccagtcggtgaagacgtagatgcccaacaacggcggtcataataggccagccgtgcaggcgaggacaccagtcggcggcggcgaaggcaagccggtcggtgaagacgtagacgcccaacaacggcggcataaaggccagccgtgcaggcggaaacaccagtcggcggcggcgaaggcaagccggtcggtgaagacgtagacgcccaacaacggcggcataaaggccagccgtgcaggaggaaacaccagtcggcggcggacgaggcggccggtcggtgaagacgtagacgcccaacaacggtggcataataggccagccgtacaggcggaaataccagtcggcggcggtcgaggcggccagtcggtgaagatgtagacgcccaacaatggcggcataataagtcagccgtgcaggcggaaacaccagtcggcggtggcgaaggcaagccggtcggtgaagacgtaacgcccaacaacggcggcataataggccagccgtgcaggcggaaacaccagtcggcggcggcgaaggcaagccggtcggtgaagacgtagacgcccaacaacggcggcataataggccagccgtgcaggcggaaacaccagtcggcggcggcgaaggcaagccggtcggtgaagacgtagatgcccaacaacggcggtcataataggccagccgtgcaggcgaggacaccagtcggctgcggcgaaggcaagccggtcggtgaagacgtagacgcccaacaacggcggcataaaggccagccgtgcaggcggaaacaccagtcggcggcggacgaggcggccggtcggtgaagacgtagtcgcccaacaacggtggcataaaggccagccgtgcaggcggaaacaccagtcggcggcggcgaaggcaaaccggtcggtgaagacgtagacgcccaacaacggcggcataaaggccagccgtgcaggcggaaacaccagtcggcggcggcgaaggcaagccggtcggtgaagacgtagaggcccaacaacggcggcataaaggccagccgtgcaggcggaaacaccagtcggcggcggtcgaggcgagccggtggtgatgttctgactgatccattcctggagcgtaagagataagcttaaagccatgaatcccttttatgcatatctggatctggatcctgtagaacaaacatataggatgagtagtatctgatataaatataatactcgagaaaaaaatcaagtattttaaaatatttataaatatgtatttctcctcttgtcaattttgatttccccgagcagatgattcattacgtttaaacgctctgtccgactagtcatagcccccaagcaacgggagtcggcctaggcacttcccagacatgcatatgagtgacatgagttcgccattaatggaacaaagtttcacggattagaatttactactcaggtacttttgcaattattaagagcaaaaaataaatttatctcatctctatgcttttgatttattccgaataatacttagcaccttgcgttactcggtccatccaacgagcccccgggtgctaggaatcggcccaaaggcaaccatccattggcaaaccaaacggaaagcataggaagatagaactccataactcgataggtacttttgtactcagattatgtcacaagcaatcaagataaatattatgaaaattgtttaaaaaatacgatataacatctatagcccccgactcactattcaacggcgaaccagttgatgtagtgaggcaaaggaaaagacaaaatatcatataaagaataaaataaatgatgacttagctttgtcgtattccctcgatgacagcagaagtagccgatgtgggaataaagcagtccatcaatagtgacaaaaacaccagtcggcgccagtggaaccaagccagtggtgaagtcgtagacgcccaacagcagcagcataataggctagccgtgtaggcagaaacaccagtcggcggcggcgaaggccagccggtcggcgaagacgtgaacgcccatgaacggtgatgtgaccaaccaaccgtataggcgaggacaccagtcggcgacgacggaggcaggccggcgatgaagtcgtagacgcccaacagcggcggcataataggccagccgtgtaggcggagacaccactcggcaagagtagtgccgcagcattacatgcaaacagcagaaaataccaagagattaatctgaaatttaaagatcaatctaataaacaacaataagttgaaagggaaaaaacccggcgaagtcggagattaaattgttgaactcgccgagattgatctccttgatcggactgactccgagacggagaaaattagtcattggtgttgcactgtgttgctaggactgatcaagcgatccatagctcgtcatgtataaagttatggatgtacatattgcccgtattctcggcagcagatggctgtttaattttgatcgatgtccggcaaacaaccacgtacagctcccgaatatatgcaaaacaagcgacaaagtttatcgttagcctgttattagcaagtagagagataatgactatatatggatcaatttgccctgtacgtatccagcaatattgaatgcatgtatggctggattaattaatccatgcatggcgattgaatcgatacgtcctgtacatctccagcgatctcgtctcgtgaactttcgtgcatgtcctgccagcccacgacttggattcgctacgagtggacggcttcgccttgcgtagctgcggcttaccatgcccaattgagcacgttgcgccagcatcaagcaatagagaataaaaagaagaatagcatcaagcagtgactagaattaatccaataaataacggattgggaagaaaaagctgatgacatcgaagattaaatctatcaagttcgccgagatcaatctccctgtcaggattggatcttggagcaacagtggtgccggtgattcctgagataagttccatcgcacttcttgatagataactcggcgttcccctacctggcgcgccaactgtcgaaacatgatttcggcaataataaaaaggggtagcgcacgagacctaaaagtggatggatgcagagacaaaggatttagacaggttcaggccctctcaatgagaggtaataccctactcctgtttggggatttgaatccgccgggtgtgtattgatctgacgatcaggttgtctcatatgccccctagagggcctcctacccaccttatataggatggggggcaggattacaagatagaaaccttaaccaatacggtatcggtttcctaaatctactttacaatattatcaaaccaggactttaggccgttccgtaatatacaaggaaacgtaacacccaagtcatgatctgttacatattacataaatataagttatcccctataactagtcggataaccatgccgtgtgggtatggggtacccataatctccacaggttaattttcactcatgctctctcctctgttaccttgacatacttgtttgaatggtgaaagcaaaatgccataacacttgtacgaacacttgtttttggttgcgtcagccgaagagcagcacacgccgcgccgccgagatgccgcgccctgcgcctataggtgccgctgtggtgtttttttccattttattttttttttcgtgtgtgaattgagggcaatttggtcatttttatgattataacggtgtgcaatagacggtaggttgacggcgatggtatttctgggagaaaaaggcttgtatgatggtatttcttgaaagttatctaggatcagggtgcttgtcgatggtattttatggattttctctcaaagttgtattaccatctcctatccaaggacatcactccaagcaaatacactcagattgcaggggttcccaactcctttacttcgtttttcgcactcacgcttttcaaactgctaaactgtgtgtttttttgtaaaaagttcttatacgaaagttgcttaaaaaatcttattaatctatttttgaaaaaaaaattagctcaaacttaattaatcacgcgttaagcgctatttcgttttgtgtcggaacacagcctaagatgcagatagtgggaatctaattggtgcaagtctagacaaactgggcaaactaacttttaggttctagtttatttttaactacagtttttcagattttgaaaaaaaaaactatttaagatatctttttattctataaaataggagtacgctgcagctaggccgtatacgaaattacgaacacaaacaggtagtacgaccttcaagggccaaggccacctcgccggcttcctcgccctcgcgcgcctcctccgccgcgacgccctcctgcccgacggcgacgtcgacgtcacgctcgtctgcaccccgcgcaacggcgccaccctccgcgcctccgacgacgacgacgacgacggcgcgtgctcttccgggatggccttccacgcgctatgccgttcgcgccggccgaccacggcgcggcctgccggacggctgcgagtcctccagcgacctcccgctccgggagttcatcacgctgctgttcgaggcgttcgagtcgctcgagcccgccttcgatggcttcctctccggcctggttgatcaggagggcaccaccgtctgcgtcgtcgccgacgggttcgtcgcatggacggtcggcgtggcgcggcggcgcgggtgcccgcgcacgcgttcctcgtgtcgtgcggcgcgctcggcacggccgtcctcgtcggagacaacgaccagcgaacacgacgccgtgctcagctggcttgacacgcagcggccggcgtcggtgctctacatatccttcggctcccagaactcgatacggctgcaccagacgacaaagagctcgcggcggcgctggagtccagcggccgtccgttcatctgggccatccgcccgccggtggggttcgacatgtatcaatggccagttccgcgacagtggtgcgggagggtccgagcagcgggcgcgcgccacgtcgttcacgggtgggcgccgcgggtgagcatcctcgcgcacgcatgacgcatccactggcgcgttcctgagccactgtgggtggaactcggtgctggagagcctgacatgcggcgtgctggtggtcggctggccgttgtcggtggtggaaagggtgatgggggacacggcggaggcggcggcacgggtgagggaggtcaagaaggtgatggagatggcgtgggcggagggcgagggagatggccattccccatttcatatcataagttattttaatttttttctagtcaaatttctttaaatttgatcgtgtttacaaaaattttagtaacatatatcataccaaattagtttcattaattacaatattaaatattttgatagtatgtttgttttgtgttaaaaatgttactatacttatcttgccatcttagtcgaattgtcaaatgtttttgttaggatacttgtcgttgtcgaatgttaagtgcatccgttgcttcctttcaaagtttgtatcaaacgatcttaatatatttccttggagaaaaaagtttaaaatgaaaatagaagttgatattgaaagttcctgacctcaatcgaggaatactccttcctgtcactataaatactttgttgctctgtttttctttccctccccctgttctgctctgttttccattccctctcctgactcctgttctgctctgtttttttattattgttagatcgagtcattcgcatggctgaagattctgtggtcaaaagcgtgaagttgagctcgatctgtgcaatctgtttgcacgagagcacgtcgcacgggacgatctgttgcgtctgggaatgcattcacgcaaaggagtcatgcatgcagggccaacgtgcgcatgttcttccgtttccaggaataacaggagtagaagaatgaaaattatgctagatgtatgcagcacccaaatccttgtttttttgtgtattgtttccaattctaataagtggtattagagcaaggcgatcgaccaccctaggagcaatgtctgctacggtgagtcgtcatcatgggtgttgcaacgacttcggcggccgtgaggacattgtcgagcgtgcgatcgattgagaagagcttggactcgatcgtctaccccattctcacgcgacccaactacaccaaatggtccatggtaaagcacattaacttgcctccgtaggacttttgtggcaggtgtttgaggcaaggaccgatgaattccgcaatgactacaccgcgctcgttgccatcctccacgcggtcaccggagatgttgacgtcgctctcccttaagagctccatgagagaagcctaggaggtgattcgagcagtgtgcgtcgacattgagtgtctgaagaaggcaaatgctcaaaagcttgatcaaaactttgctgcgatcacctttaatgtgggaaggagcattgaggatttctccttacactcaccggtctcaccaatgagttgtgcatgcttggatatgacatcactgagaaggaggtggtgaagaagttgcaagtggtcccccagtaccttgaacaggtggcctctccatcaaaactcctctcaatcttgatctaagcataattgagcagcggaagaagttggagtctgcttctaccaggggcaacatcagcacccttcttcttatcgaagagaactgactcacatgcatttcaaagctccccaagcaggataaccaatggatggtggtcaactttggggcgcccaaccacatgtgaggaaaccagtccgcttcctccaaccttgatggctcactcatctagattgatgtggcacattcatcttcgactacaagactgagaagattgctccttcattggtgtctactacatccctagattgatgacaaacaccatgagtgtgggctacagggctagctcgacgagatcagatttgaggccctagtttgaggcggagtcatgcgtgtccgacgcagaaaggtatctccatgccaagattccaagcaccccgaaccagctatatatgctcgacctcaccattgcgcaacaggtgagccttctggaaggatgcccagaggtggtacacacactttagtcacctcaacttcccgatgtaatagaagctagccccagaaaggctttgaccaactctgcaacaggtgcctagctgacaagtagttagaatgttctcgaaacaaacatagaatagtgcaaaatgcatcctcaagttggtttgcggggacctttgcaaccaggccatgtctgtgatgcctagtggtaagaagttgtctctattgcttgtcaatgacttcagcaggttcatgcagattgagatcctcctgtcaaaggactatgtgctggtttcgatcaaacggatttgggcggcagcacaggcccaaaatggacacaatttgagctccctcttcactgagcatgggggagtttacatcggcaaactttacagagcactacactacaaccggagtttgatactaacccaacgcaccgtattcactgccaaaacggtgtgatagagcagtagaaccaatccattgttgcgtcatttgtagtatgctcaagaccaaggggctcctaggttatttctggggcagcaagaggattggaggaagaagaggaggcaagggtaatttcgtctggaatgacattatagcatagacacattaattgaaagtggtattttatcaaatcccttttaagtggcatttgcgtgaagcccacttctgaggatggcataatctcaagattctcatattgatcagcctgttaatacatcacttccatgatttcgtggggacttttccccaattaggccttgttcgtttaatcctcaccaatctcttcctgatggggattaaacggataaggctttacatggaaaacacacatactcacacacccgtgcaaacgcccataacatcgtttaggaaacatgtttctgctggccgagagcaagatcaaatgaagtaaatgagtaaggaccaaggaaagcaaacatctcttctccagcattgggtagttctcttgtaaccggcacgacctgcaagcattgtttgtgatatacttgttagataagaatagagaagatgggaaatcctcaattgccaattgagtgtgtggtaaatcctcaacttcagaactaaatttgattctcttacaggacaaataatctgttccaaaaatcagtaaagatgatatattattggtcaaaagagtatatagtttgagctacttggttattagaagcctatgaagaaacttcaacatgaataatccagtttcgtagtggagatcttttagggcttacatgggaagagtgaaatcccagcacatccacatggattgactggaatttcaggtctgccaagcaggtcctcaaggaatacaatcgaatataagaaatgccctttactatatccagtttataatgcatgaagcagaagtttttaataactgaagtaagtaactgcccttacattagtgggtttactgaatgaattttcgtctgacagatttttggatgtgagaatagtgattgttgatttccgcatattgaccaaagcttcaagaccagttgtggatactatgaggttcacagggttggacccaatgtttacaatctgcacaagaatatctgtaaatcagtatgaggttttaaacacattcttccgacagtagaaaccatatctgcgtgagattttattgaaatatgccaatgttcaagattgtggtccatatgtaaactgggccatttcagtaattatagaatcaaactactcaggccatgaagaaattggaaactattggttttaccttcactctcaagaagctactgttactggctttccaggttattgcagaagctgctaatgaattagaatacatggagttgattgtcactggatgcagcacagcaccactcgattcgcggaaaattgtctgcatccagtaactaggacttccatactgtttccatgagttgaagacgacagcagctgggttccacctgattggattaattcagatacagttatagtggaaggttaacaacacaagaaatgtagaaatcataaggccatcgatactgacgagagatcattatcattcatgaagagcggtgcatagctggccatctgaacaacatcactgcaaagaacaagtaaatagccatctcaatagtcaacagagtgatctttgcgatagtaatataatttataggataaattccttatatgccactggcaatagagaatataaccatgtggtgaagaaatttgtgtgtgcatgtggggaatagatcgatcacctattcttctccagtccagtgaggaaagcagcctcagccagtgaggcaagaagagttcctctacctacaccattacttgaaacagcatactcactgacaaaggcctgcactcagaccatattcagaaatatatttactgtcaaagtgtcaaggcatctataatgatgtaaatgagcaagagaactattgtaaataaacctgcactgaaatcatagtactgcaaaggcatctaggttgatgtaagcaataaagataaccaatgcaggttacaagcttctcaaaacctgttttttttttacttgtaatatttttgctttttttttttttgcattctaaactgtttggatataatgacaagatttaattgaacaaaaaaacttattgctgagggagtacagactataccgtaatagcttgtacacatgaaaatagcatagtacattatggtacaaattacttaggcttctcatattcctgactttcctttgttttcagagtaatagataaagaaaaagaaaacaaaaactaactaaatcaatccatctaataaagatccataaagatatgaaaacggacgcatacctttgtcccattccgaggcgtgctgtcaaatttgttcctcatagaaaacaaagtattagaatccccgtagacctgaaaagaacatatattatcatattttcagaaaatccaagaatattaacagcaataaataagagaacagattttgaacattaacaacaggaattacaagaatgttgtggtttacatggaagtcatatatgtcagcaggatggtcaagtggtttagatgaaccatcacagtttgagatgatttgaatgtctggataagcctctcttatagcacgatggaacttgaggtaattacctgttcaagagaattgaagaatacctacagtttaagtggactttgtgcagtgccacagaattatgatgacatagagctactcaaaatcaacaaaacaaacttgtttaaattaggagaacaagggcagaatgcagataaaaatagagtaagaataaattgcattgtatttttttatgaagatccatgtgagaaaattattgaattaattctacaaaaaaaaattcttgtattgatgttttttttgcaaaatatgcccaatcataaaaataggtgtttatattttgtgtttaaaaactacaggaaaaggttgagtaacttatctgcttataccaaaattatttatgtttcctttttcttgacaaagaatgagcttaatccttgtatacataaacataatcaacttgtagtgggaaatagatttaatccataagaaactaactgatatatttaccatggtaaaatttttttgtacagtcttcgtttccaattgtaacatatttgactggaaatggttcaggatgccccattgcaactctaagagagccccatgttgagttggtacttccccttgcaaattctaggctgtccagtatatcctggagaaaagacaataacaaaagatatgagcctcagttataacttatccaagtctggggaaaatatgggcaacgtgtggtgagataattagttgttactaacttttatccataaaaatgaacaaatttagaaaaaaaattgtaagtaatccattaataattttgggaaaaaaacaatctgaacttaacccaaggtgttgtatcaatttgtgcagtacatgtaaataaaccaaagaaccatcttaataatgtcccaatattgattatgatggataaacatctaccatcatttgagcagacccatcatatatataatagctgtctcagaaaggattgagcaacaaaatttctatttctaatccttgatatatgtacaggaaaagtgagaattgctacttccaatgtatttacaaatggaattcattcactgcatcaagatatgtctatgctggtataaaaatgaattgggagctcaaaacatgcctttacaaatggagcaatagccgtggtattaatctcctcattgtggctgaaacctgacatttaagaggcaaaattatttcaataaaggcagacggtagtggtgatcaaagatgcaataaacacaaaaataattaccattgttgaacacccagattggggcagcacccagatcctcagaaagcttagatgttcaattcaaaggaaaatatgattatggaataatcaagaaaatgtagagctgaaataatgccaattggtacctgaagaaactcataatatccaaggccatcatcagtccaataaccccagacatcaccaaagtgtccaggcctctcctcccacggaccaacagactcacgccacctgaatgcatttcttaaccactggccttcaacaaagcagcctcctggaatagttcccttcaatctagttaactgtccaaaatatgtctgatcaaatatgtgcaacgatggaaagaataattcacataccaggaaacctcatgaattgtggttttaaatccaaaagcattgatacaagttctttccggaaaccatgaccctgtacatacaaagaaatggaagttaaatatggaaataacctcatggcatacgtcataagcatgactactagaaagagatcaaactcaatggattaacaaacaaataaatacagacagaaatg

SEQ ID NO: 2181 - DNA, 3258 bp, Oryza sativa
tatttattgcaaaataatttggggaacaactgtacccccatgtccgcccctagcgggaaccccctccccagctctgtccaatcaattttaaaccgtagttttgcagcataagatattttgagaggcatttgaaacattctaaaaattccatgacttatctagaagccaaccggaaaatattccacttttatggacaaagctaacccagttcaaatccatccaagtttcctttttttattcaatgcccccttaagctctgttaatgcacaacacattccccggcctctctcactgaccagctggtccaaatgtccagggtggcctagttggaggcgtaacacctttctcccagccacttgccaagtagtgtgaagtgtgaatacggcgtcttgcatattttgcatggagttatttcattctataaacataatacacaagtatatctgtttccaacacatctgcaccttaaatgctaaccagcaatgacagcacgcagccaaatccgcacgatcgggtcaacctattgcgatgttgtccatgtgattttgggcctttccttttttgcaaattgtttgatgggctttgagcctttccttttttgcatattgtttgatgggcttcgggctttttcttttttgcaagttgtttgataggcttatggccatcttgttttcctttattaggagatctaccatctcccttttccatagatttgatctggtatctttcctttttattaggccattttttccagcccacatgtccaatatttctgaaaatatagataaaaaaattctatgataaactttacacatataaattttctatagaagaccagtctggaaaggagtattctagcttaccgcaagaggaaaataccatcaaccagggtggatgaagcctgaaggttatgtctgtcagggttacgggttaggcataccctctacccttcgatatacgttgcatatcgatatggcatatccacgcgcatgcggatatttcctgtttacagaaggaaagaatcctactcggacagaactgggtcgttgacgtatcgtatagggtctgatacctccaagttctacttggagacctccagatccgcgatataaaaaggacctcccggggagggctcaagacattaaatctcagagccaacacaaccaacgcagcctacgaagccggaatctgcgaggagccaagtcatcaagcgctagtcgaatcaacttgactacgatctcgtcggatccgacaagttccattgtcctctttgtaacctgtgttttccaccatataatcccatatcaactggattagggctattacctatcaacgggcctgaaccagtataattcttgtcttttaattgcttgatgtcgtactacgtagattcttgtaccaacgtaccctaataccctctatatccggtctacgggtatcacctgtcgacaatgtcatcgagcgagaaatattccccaagaagatactgcggggaccactccaaccactactgcaaactggcgtcaggtcctttggaggtccacacagttgtacaaccatacccataagatttctaactttagaggggtattttagtaatttctatataccattgaggtaggattgtacatgtacctccgaaggctatataagctgttcctgctagatttaagatatcaaaataccatacgacacacgggactttacccttcgagctcatctcacttttatggtaggcgaggaaaatagtactttcccgcctattcctgatttgtccatgagctaagatcacgacagtttgcatgaagaatgacagatgtggtattttcagaacaaaaatgatgtcacctgtggtgttacacgaaatagggtaattttcgtggtattttttgaatttggcttttgaatggtgctatgaaccaaatttttctcaagataaggccccccaatactcattaattaataagatgagagaaataattttacaaacttttatgctggctgcaccaaccaacatgggttatgtcgaaacatgatttcggcaataataaaaaggggtagcgcacgagacctaaaagtggatggatgcagagacaaaggatttagacaggttcaggccctctcaatgagaggtaataccctactcctgtttggggatttgaatccgccgggtgtgtattgatctgacgatcaggttgtctcatatgccccctagagggcctcctacccaccttatataggatggggggcaggattacaagatagaaaccttaaccaatacggtatcggtttcctaaatctactttacaatattatcaaaccaggactttaggccgttccgtaatatacaaggaaacgtaacacccaagtcatgatctgttacatattacataaatataagttatcccctataactagtcggataaccatgccgtgtgggtatggggtacccataatctccacagtagcccctgagaccttcacagtcgaaaagataatcttctctcgaaccagattactccaaagccgagtgcttcaatcatctttgtcatggtctcccgagtacttttaccaaatctgaagactgtggagggctggaaaataaagtcaggtgcaccgactagatgcacctaataggtgtagccctcgactatgcggttaagtgaacaaaccaagcatatagtcaaggaataaataatccaaccaaccgagtggcttcgataattatagttaaccaagcgacttgatattaatatgtagcatatgcggtgtaaatccctgaataacatgatccgagtgatataccaactgctttgtaaaatatgatgagtgtaacctaaagttggctacattattgaaaattcacatagcaaaacagctataaaaaagcttgtatgttgtgaataaagaaatttccaaagtattgggcatacgccatgcgcacactgttttaacagatgtgcttaagtccctagaagacacatggttccaccacacctggaaatatatggcatatgtggtataaaatccgagtaaataaactcataaaggatttaccaaccgcctgaaaaatgaccacaatatataatcagcctaagccataatattggtcaataaaaatgcacacttacgtggcaaaaagcaacgatattgtatccaatcaattgcttaaaaacccaaacagcaccatgactatattaaaaagtcagcggggcagctatataaagctttactgtttgacaccttttaagatgcatt

SEQ ID NO: 2182 - DNA, 25513 bp, Oryza sativa
atcacacatacgtaaataatatcgtcatggtttattcagggaaaatcataactccatcagataatttgtgcagaacggcagaaccttattaaaaaaaggcatcagtgacaacaaaccaaacattttctgtcgaagaaactaaaatgatcggatataatactttacacgtgcattggggaagaaaacaatttgcacccataacccagtaatataagtttcatggtcgggattgtatactgcagacgtcgcaagaagagtcgagagggcggaacagcaggaggcggcgcaggcgcagatggcgcgctggcgccgtgattgtttccgtgccggacggagaatagtacgatgcttgctctgttttgataggatctgtttataagtttgttacgattagtttcctttcaattagcatccgtttgttacattttgtatacctatttaaggcaattaatcttagaataaaggcaagcaagatcaaagctatctcctcatctccagcttcctctgtttctcatctctttctgtcgctgtgtccatcacgggtcgccgatcattctcccccgatccgccacaacccatttggtgagctcaagcgcctcacgcagacgagcaccgtggtggcgtaccaggagtgttttctggcacttaccagtcgcatcccagaccccctcaccgagagtcagcaagtgcaacttttcatcgccggtcttcaggatgatatcagcatcgacgttgaactgcagaagcctgatgatctccaggacgccatgagactgcctcgggcgtacgagtggaaggccaacaaacccggcgcaccgccgcggagggtgtttgctcgcgctgcggccgccatcacaccggacccaccgccagctggtggctctaccgccgcagactccattccccgacagttccgtcgactctcaccggccgagctcgctgaactgcgaaagtggtgctcccggtggggaggataagataaggatgactttgagtttggataggtacgattattgcggattgactacgtaaggttccgcctgcaaaaatcatatttttttaggtggagcacttaagagttctgcctataaaaataaaggtattttggtctgcgtggaaaaattgattttcgtagatggacaacgaaatataaaaaggcatccaaatatctctttctcattgtaatgcaccaccaatagtgagctatcttgttgcgtaaatctgtctttatgatcctcatagctgaaaagaatctttcaactgatgctgttgccactggaaggatcaatgtaaacccaatgagtcaatacactaatggaaaagtcatgttctttctggactgaaccattttttcagcaatttttgcaagatcatggcagtcattgaattcaacacatctcctgatgttgagaataaaggtttgaagttgatttctcaacatcaaacagtcaactgtcataaaatcaacagcgtaaatctcaacaaatcgaacaaacttatgcatatcaaacttagagaaggagttgcttggattaagataagacatgcacaccaataaataaaaagaaacttaatgaaatctatgattaatatctcccataattacatctagagcaacattgaaaatatcaactcgataataatgaaggtaagtcaccttatgcttccaacgtgcagatttaccgttaactccgatgagatcatccatatttggcactccaattccatttgcctcacaaaagttttttacttggttgaaaagtagtgcccaaccattatccctcatgtcttagtagtcgtgctttcacatccacaatcagacccatagcttcaacaatgttttgatctctattttgcaaaagcaagtgatggctcacttgtgatacttccgtcccaaaataaaaacatcatttttaacctatcccacacgtaccaatacaaaatcagaaagactcgaatgccctctattttagcaaattccaatgcaattacaacattttaataaattcatatgcaattatcccccaccataataaataccaatgcatttatgtactaatttcgcaaactgtaatacaatgatttttcttcaaatataaagtctcttctgaaacaaataaaatggttaaaaaaaatataaggatccaatcaaaagctacacgtagtacaaaggacgagaaagtgcttgagctgcagtcacatccacgttatttattgttttgctaattacaacatgaatttcaataaagcaacgaaaccacagcgggcatgggctagcctagtaataagagcatgtccataagatgggatccgcaatattgtgttctttttgtctataatagatgctacaatatgtatggtttcttctcgaccttaaggtggagcccactaaaaaaaactctattcacctacaatttcaaaagctgctatatatattgcaaatgcataaaatacttttttatttcttatggtctaactttaagctcaaggttacccttagcaatattctcttcttagctactttcccaatgatagagataaaacaaatatattactttatccgttaaggttattttacatgcaacattgtggatgtgctaagtaataacaaatgattcgatgtagaacagatgtgcacacttatggccacgcacgaacttctcatcgcaattatagcgccattattaattaattatcaaaccaaaaaaaattaattatagcatcaaacttatggttaggaccttatacgtcgtcgcagcctcaaacttaacctcttcctcaggagggagaggtggttcactcggtttgccccatgaaataaagaaacattgcatcgccgtcaactacagtagtgcacatgcttttcatattttataatttgaaccatcgaaagcgtgtggttttagtgatgtagcaaagccaactaccaataaaggcccatgaaatttttggattgttggaaatttggtcataattcagcatattttaatccaaaatattaagacaataaacatagcatttgcaatatgagttgatcagtgatagtgctagttgtatacaatatgagcatacataaggtaaaataagcatcaacatttacagagtaacacaatgatgccattacgaagaatattaacaaacaaacatctaacggaatatggagaatagaaatataccccgagaacgtcccaccactggattttgaggcagtattgcctccgttgatgtcgttcacctccttgtctccaatctctgttgacatgttagcgaaggcgtcgatgctgcagcagcagtagtcgcgaagaacaggagcagtcgcacttaaagtgctccccaaaaacatgatcgcttgcctacccatgcaggttctcaagcggacggagtttcggaggcacctgctcgtccccgtacacctatgcgtgccggtgaacggaaaaagggaaggattctgtagcacaggaacagagggaggaacttcggaagtgtaagagacgttgggaagaacttctgttcatccttctggtcgctgcagagtatatatatgcgagcgcgagagtaatgttcgggatcatcaaccgatgatggttttatgggtggtgcatggcgtacaaatccatacgccgtgatgggggttcaaaagttgagatagagtggaggataaatgagcttatgtacgacaaataaatatgccgaacaaatttagggttttaagcgacagccacactcgaggatttttgtgtagaacgaaagtataaaaggagggaacacgagtcaaaaagatgaagcgggttttaattcattcgcaaggttccaagggttcggggaatgaaacgacattgcgacaaaaggaaaggattttgggatttcgattcgctttgcatcgaagcatttagcaaaaagggaagacgtcgattggaggacatcctttaggcggaacgatttaattgaggtaatccaacgattcaaggaagggacggggtattacaattgtctaggagagttgagaggacagagaaaggatttcgctctgtgaggcgattctgaaagaactactgggttcgagtatttcctgatattcgaacaattggttcgggaggggttcaattgagagggaggagtatcgaactgcggaattcgaatccgaaggaattatgacaagagttgagattcacaaggatggattaaccgagatctttggcacaaatcccttttggccaccaatttggtttgaaacaatccgtgtgttagaagtataatatgttagttagagataagagtcaaatacagatatagagataagatatatcctagagatagaatcctagagataagatagagtcctagatatagaatcctaaagataaatctacatttacttgtattatactctaagtatctatccctatgtactcctatatataccccatgagagagtcgatataatatatcagaaaacattagaatacaataaattagatttttccacatggtatcagagctctagagaccccgtcgctctattagtcttccgctcacgctgccctggggagatgacatctttttagtctccctggggcgcgcatccatcaaccaccgaaaaaaatttcatagattaagtaatgattagtattagattagatccttcgttagctagccacataaaagccatgatcctcgtgagcagaagcagcaagccagcaaccactacgcatgcatgcatttgcaatggtcggcggctggcggtcgccgagatcaacttcttccgccgcaacactcgtgtcttcgaacctacaccgacagtactgatcatcatcagctgtacaactgcgcaattgtcttcgccgacacaacatcgccgatggtcttcatcaacaagggaacacgccgccgccgctcgtccacaaggatggacatcccgcgtcctctaatagattaatctgcaagacgctttatcgacgacatcgaccgcgccctctacgacgacaacgaccgcgacaccgacgacggcatcgatcacgtcatctacgacgacaacgactacatcaatccggcatcaccattgtgatgaccgctacatggcgcgaaaggaccaaccgaagtggtggcctcatcgccaacgacgtcctctgacatatgcaagacgtcttcaatggcatcctctgacatctacaagatgcaagatgctaacaattgcagtttcgtctttacaccatggcgtaaatattttttctttcgccttcggctatttgcggctacatcaactaccatgattaccatgaccacgactactacatgatcggctacatcgacgaacgtctacaacgagaatcatctacagaaacttcagtcaaagcgtccgtgtcatcgctattgtccatgacacttccgctatgactgcgggagggaatagagaagagtcaagggacgacacagaaggggacgcaggcaccaggtggaggaccgtccatcagagatgcaatcgatgatggtgattcgaaggaggtgaagaaatagaagattttaaatccagtcgcaatcgttcgcttcgctcccgttacgactgagggggaatgttagaagtataatatgttagttagagataagagtcaaatacagatatagagataagattagccggcaaaaaggggcagctctgcggtggtgacaaattccacggtccagtgacggggtgaccagaatgaagctttggagagctgttttcgtggtgaggggttgtttcctcccgctttcctcatcacttggatcagggaggagtgtcgtctctagcttccagacgcgccgcggtgagacaacagcggcggcggcgctccggcgtttcctggccaaattggatggggtgatacggaccaggcggggctaggacggctcgggcgcggtggctcactgcttgagggccgggttctgtaggacggacggtcgagggcgatgtcacgtgtaaacatagtggcgcggcaacgggtggccgagcacgcggcatgatggtgcagctaccacgcacgacgtctaggcagtcagcacaatccttggtgccaagcactgggcttgctatggttttactatgggaagtccacggcgagaggactggccccaagttcccgcggaggcagcggaggcggcttggcgtgaagccgggctgatgcatgcggctggggcgtgcgagcgcagcgcacatgccaatttgacagcgccataagcgtagcggctgcgtcaacacaggaatagcggcacgtgggagaggagatggctggtgactcgttttctcaccgcgacagacgggaagcggcaaaccgaggttggtgatggaggccgagcggcgggccgcgggcggcaatgcggcatggttcggaccttatacaattaccggacacaaattaattatcagccaaaaggaagagaaattaattgtcaattatttttaaactggagaaagtagcatttgacgtcacatttatttatagaagctatcttcgtcgtcaggcgaccgagcaatcactatatatattcatttgaaactttccagctcgtcgcgcgagtgttcacggctgtggcgtctttgtgcacactcgctcgaactcgcggttcgtcctgggctcccggcggcaacagggcgatgcgttcgccaagcaggccaagggagaagactctagcctagctgggcctggtgaaaaggaaagaggaatgtgacctctgatgggctgggttggacctaacagatggtgggggaaagaacgaataagtctacttataatccctcatatctacacgagtttaattcatatccctaaaccaaatcttcaccaccaacttgaaaaaaccgttcaagtgacatcccttagtaggctcataccaagtatacatatacgtatcataataggacactccagattatgggtactagtcaccaacccgtgcgttgaacgggctaatattattgcacatccaaatctgcttgtttaatgtagaaacttcagtggagtgcccaattagtacaacaaaattaatgtaaatatgtattaacttaaactttagaattccaaattcagaagtactatttatgctcacattgaactctccatttgttatcgttattaacttaaatcgaaatattataatttaatataccgaaataccttagtgtgcagccttagttatacaaattattgctttaataatatcaagatatgaacaaattttccttagtctagtttagaatttgagaactaatatacccgatataacattagtttgcaggctcaactattatattttcataatttaacaacatatcagaattcgtatttttcccctttattcaattcaaagatttagaatttttatagcaagatattgtagattgttgtcttgatcgtagattatcataatctaataattccacaaattgtcttaataaatatcgtgtgataattagtttgatctcaatcataaatttttcatggtttaaaaattcctacaaatatatagttgaatttggtttgtacacagagtcatagttttcccatgacttgcatcatgttgtattttcacttttgcgtcatgttagtggccttaaatcctgtagacctaattaattaatattctctagggttagagttaatcatgggataaaaaaaattaaaaatagatatagtttaagataagcacgtcaagaaaatagaccaacggtataccactgtgcctcacgttaaattaaaaaagaagtctttttctcaatacattctactgctacaaatatgatgctcagatttttatgattagcttgtgagttcaaagcaagtgcctaatagattgaggatgtggtgcttacaatcgaacttcttaactgcaattagtcaaactgacagaaaacttttatgaattaattactgatatgcagtgaccacggatggacttatttggggcaagcaaactttgtaaatcaacatctcaatacataaaagttataatatgatcatataaggtaaataccaaaaattgttggcctgcttaccgggtcactgcatggatgagcttggctgcacgtcttccgtcgtgtcgcgatgcgatgatcggccttgcgagcagaacgtccaggcgggatgaaagaagtccgctcgtcaccatctccgggcggccatgccagcgagcggaactggagtgcaaagaaggaagtcctcacgtttacgagcaaacatacgtaataagggatgagatcgatacattaacatgtgcaaatctaaggttggatctaatctagatatgattggactttactgagcccacggtacataatatacggttagaatgctaatcgatggctatatatttctagttaacgtgagggctcgtagaaagtgtccaattagtataggtaggtatagatgtgtatagatgtgcaaatctaacgttggttctaatctagatgtgattgggctttacagagcccacggtacataatatacggtcaggatgctttaatctattgaatcgatggctatatatttatagttaacttgaggactcgtagaaagtattcaattagtataggtatagatagatagatagatagatagatagatagatagatagatagatagatagatagattatgacaccgttttacttgttgggaaagcagttaggcaatacccagcggtccatcctaatcgaacgcataccgtgcaagctgaccaatcctggtggcggtaaaaatattctgcacgctttgttgatggtttgaaacaaataactcaactcggaaaaaatattatgcaaaatttacaattgtttccctccaaaataacctaactttttgcgaatttgggtccacaaaacgtgtttgccctaaaaatattgaacaatattaaagggcaaagagtaaaatgtgtcgacattacgtgggcggcgtgttgtttgtctgatctctgatgacgaatagatatccgagctgaataaaaatgtcaccatagtatagaactccccataacttaagagttagtaggattgtcgacaaaagtaggaggccatgtccacaccgaagaagcacgttctcttccccttcacgagcaaaggccacatcgctggcttcctctccctcgctagccgcctccaccgcatcctcccgcacgccaccatcacgctcgtctccaccccgcgcaacgtcgccgctctccgcgccgccgccgccgcgccgttcctcgacttccacgcgctccgcttcgacccggcggaacacggccttccgcccggcggcgagtcccaggacgagatcttcccgccgctgctcatccccctctacgaggcgttcgagacgctccagccagccttcgacgacttcgtcgcgtcgaccgccgccgccgcagcgcgcgtcgtggtcatctccgacgtgttcgtcgcgtggacggtggaggttgcgcggcggcacgggtgcggccacgcgttctttgcctcgtgcggcgcgttcggcagcgccgtcacgcactccctcttcacccacctccctctgcgcccggaggagccgagcggacgtgtgtttctccctgagtaccccgaccgaccttgtcatccacaggtcgcaggtgcccaagtacatgctctaccagtacggcctgcccgctgccggtgcagcaaatgacggcagcggcggccgagcagacagacggttcttggaccggcagctagctcacggcaacaacaccgacgcggtgctggtcaatgccgtggcggagccggagccggccgggctcgccatgctgcggcgcacgctcagagtcctccccgtctggccaatcgggccgctctcgcgcgaccgccgcgacgcagccaccgagcccaccgacgacaccgtgctgcgctggatggacacgcagccgccgggatccgtgctgtacatctcgttcggcaccaacagcatgatacgacccgagcacatgctggagctcgccgcggcgctggagtcaagcgggcggtgcttcctctggaagatcaagccaccagagggcgatgtggccggcctcaacggcggcgcgacgacgccgtcgtcctacaatagatggttggcggaagggtttgaagagagggtgacggcgagcaagagaggcctgctggtcaggcggtgagcgccgcaggtgaggatctggcgcacccctcgacggccgcgttcttgagccactgcgggtggagctcggtgctggagagcatggcgcacggcgtgcctgtcatcgggtggctgctgacggcggagcagttccacaatgtgatggtgctcgagggtctcggggtgtgcgtggaggtggcgagggggaacacggacgagacggtcgtggagaggaggcgggtggcggaggtggtgaagatggtgatgggcgagacggcaaaggcggacgacatgaggcgccgggtgcaggaggtgcggacgatgatggtggatgcctggaaggaggagggagggtcttcctttgaggcgtctcaagcgttcttggaagcaatgaagctgaaatgaagtatgccattgtattgctgtaatcatgatggacttgttttatcttttttttcttccatgttattgtgttattatgtttcactcgattttcaataatgcaattcttatctacacatacatgtaaacattcataataatgtgattcttatctggacgtacatggaaacaatcatgtatgtaaacatttatttaacaaactagcactaattgtgccaatttcattgaatatagtagtaggaaaaaaagtatttacatgggtgcggaaaatagataaggttatatacaaatggaaactacatgaacatcctctttgcatctaccagagacaaggttcttgcttcctagtactttattttcacaaggagcaccatcagtgggagctcagtgtatcacaaggactctctttttttcctggatattgcatagaactttggttccaactcctttggttgtagcactatccccaatcttaactcgcatggcagccatgaacaggagtttatctatttcatcgcatagggtttccaaaccgatccacgctttcccgctgatttccattcttgccgaagccatatgaaacgtagggctcttgtgaatctctccagttgcaggaaccctaaacctccatttgaagttggcgagcaagttcttgctcagttcatcttgcatttcctgccggtgattcctgcccagaggaagcatttcctctgcttatctatcacctacagcctatagggaatctttttcctcttttaatatgctatgaggtgagaattgatttgactataagtccgttcttccagccatcccaggtccttcccttcccaacccaccatccccccttccccgatttgtcgaatagtggttgtaggtctgcttttctcaatttacccagcattaaaggtaagcccgggtatttcatcggaaaggacattctggcaatgtttgtgccctcaaggatgttttccaaatctagatagccacatctgattgttgctacctacgattcttggcagttttgtgggcttgtatgtcttgtttcttgggcttaataaagacggttgtgttgtccgcatagatagaaattcgtaggcgcaccgatctccccctcatcttacttatcatcttgggtagtaacttttgaaacaggttgattgccataatgaagaggaggggagagtgggggtctccttgtctaaggccgcaaccatgtcgcacctctcttctgggattccattaaggagtatcttgaagcaggaggttaattatgaggaagcctactatctagtctgtccaacactgcaagaagcccatttcctgcaaaagtgtcgtgaagacgtagtcccaacagactaagtcaaatgcttttgaaatatctagcttgaagagcatagggcacttgttttgatgatatctccaggccatattctgacatacataaagttgtcttggatgcttcgccctctaattaatgcactctgatttaccgagataaggaaatgcatgagaggttgtagaagtaaggcttgaaggttaaagaaaaccttggcgaaggtgtggatcagatttattggtcaagctatagaccgttattttgtctaccccatcttttttaggggatgatgatgatgtcatctaagttgaggaggttgaagtgtgcacatcaaatgttgtagagcgagttgaaagccactattatgtcaagtttgataatgccctagcataccttgtagaagttgccagtgaagttgtatgtcccaggcgctttgtcaatcgacaactattgaattgctttatgaatctcctccgtgaaaggttcagccaaggtgcttaggtctattagtgtaactcccaaggcttgccagttaagctcccactctctcggtgcatgacttcccataattaccgagaacggtccatgatcagattttaattccttttcctcgtgccactgtcaatccattgtttcctacaagacctaggatgcagttttttcttctaggagcatttgcttttagatggaaacacttagtgttcacatccccctcgcgaatggatgttattcgcgacacttgtcttttccttgctctttcaatatctgcttgccgcaacaattcatgctttagggccacgcgcatgtaccctaaactttgttttgggggaaatctgtcatattgttttatacacgatttcagaaaattcaaaacattagatccacccacttaattccatatatccggggcatggtataggtaatataactactagaagatctagttctggaccatgttagcttattgagatttagatgcatgtgggccagacttagggctagcactaatttgcatgtcaaaatcactcagtattggctggtcgacctaacattgttaaagaaatactgcttagttttagctgattcgcagtgaagtgaacaatgaaacgctggttaaggcatgaacaatggtatggtcagtgatataagtgtctggcagaagatgccatgtagaattttatagggttaatttgacccgttagatttatcttcttcctccatcctcccctattctctttttttcccatctgtccacttcttcttagcctcctccacacccatggcccgcgggggaggaaggccggccaactgcatggaaattggcctgtcgtcgcagcgggagcagctcgtgttgaccaacaactttgtcactcctgtgaccaagtatggactcctatgtagtctccctcttgtggtgccagtttgttgctcttgaggttgctcgcgagatctccttatgcatgctagtcttcgaattaatcggatgcgcgattctctgttggcgttggtggtgtagtagcatagcatcttcgtctatgcgttttgtgcagagagatggatgtggaggaggctgagaagtggttgagagagatgagaaaaaagataagaggggaggatgaaggaagaagatgaatctgatgggtggtttccacgtgcagatgcaggagaagatggaaaacatgatgttgttggcatggttccaattttgtaatatttgagtagcagagctacgtatagacgaattataatgacatttatctgaatagtcacatttgcaatggcacgaatcaaattaacccaatttataaggctaagttcttttgttgaggttcccaacacatcttcattgtattccacacacacgcttgtcaaattgctaaacgatgtgtttttttcaatttttttctacacggaagttgctttaaaaaaaatcatattattctatttttaaaagatgttaattagctaatacttaattaattatgtgccaatgagtcattttattttaagtgcgcgagagattagttcccaacacgaagtgccgaacacaatctaagatatgaagtgaagaaagatctgtatagagaatattgtcttccgtggattaactaacggtataatagacagtttaataccatccatattccatacatactaataccaataatgtacttgcctataggatcaaatcgacaagtattcaaatacatataaaatagccaaacatttgacatgttttgtatgtcttgtctatataatatctagatacgacgtgaaagtaatatatagacggtagccatctaaactgctattcacggtttcagatttatgtgtttaaatttgtgcacttcatagttcatccgggaatttaccgagctttgtaggcttgaccctatgacttatgactataatttcagctaggaacatgtccacaggcggatacacattcagttgtactgtgttgtgtgtgctttcgagcacacatattttttattttttatgttgtgttgtgctataaaatgtctcatccattcaaaatctattatattttgggactctcatgcgtctcaaatcctttatattttgacggagggagtttgtcattttcccttaaaaagcttcgatcgtttaacttgcatctatgtttaagtaggctcaaggatagaatcacttacttattagtagtaactaacaaactaaccatggtaatttgcacagtaaaacaacaacggtcaagactaggatcgccgagaaagctaacatgcaagagcgagtagtgcagccttatatgagttctgaagattaggaaatttggactcgaccaagggaatgaaatcccccctccccccccccccccccaaccacttccccggccaagcaaacgtctcactaaatgttttcggaattttccacctttgtataatttcaatcaaaataagtatgaaatttcaaataaaaaactttcaaaattcacgaaatcttggtggtttccaaaagtgtgaaccctgctcataacgtaaggaaacgattaaaggaactttatatgggggagcacttcttaattttgtccgcacaaaaatgttgcacgattatttaacttcatcttcttacagtgtcctgtggagatggaaattggagaggcaaaaggaatactagagttaaagttttgatatgccttcttcttattgatctaaaggaaaagaaatacgagcataatttcttcttcagcccgatcgagtcacaattttcagcaccaatattcttcgctacttgcactctcttgtttgatttccacgtcacgaggcatttcctcagtggatctttttgagggtctcccaacaggacgcttggcagtgttaaaggataccgattttttggttttgcatgtagtcttctcaagcttgcccttgttttttttaacctcgcttgatgaatctgataaatcatcagaggagtcaccatcttcagctatgaaaaaggaaaaagatatattgtcagtcatcatcaaattcaggaggaaaatgcaacataccacaaatacatatggattatggcaaacaatccgtagtactcagaatttttgtttttcttagggaaccagtcctcacaaatattttaggtcgataactgttaggcatgcatattaaggctgaggggttgtttggttgcatgccacaagttgccacgtctaaagttagtcatgccacagttttttagctattgtttggttcatgacacaactgtggctagccacacattttctctatatggccccacatgtcatacactagtatttttttgctaactttggctaagttgtggctagcattttgctagccacacattttgtggcagccacaccttgcctaatatggggtttggcaaagttagtaagcgaccaaacatcccctgagttcggatgggggagatgggaacccaactcctgcgcacggaaaacggagcagtccattaacacgtgattaattaagtatcagctaattttttttcaaaaatggattaatttgatttttttaagcaactttcgcatagaaactttttgcaaaaaacacaccgtttagcagtttgaaaagcgtgcgcgtggaaaatgagagagaggggatgggaaaaggtgcatgctaacgcagcctaagtaaaaaagaaatccatctattcatgtagttgcacttagtatatgcatgctatcatcgactagggcttgtttatcttattgtcaaaattaaccttatctttttttttggggaaaattaaccttatcaaattttaacattgccagatttttataatgttggatgtatttggtttgatgtcttttggaattccgaattatccggaacactaagtttttttaccctatcaaaataagttagtattgtcagccaagaacccatggcctattggtttttttgcccttgtcctgtacagcttattatatggccaatagcatcagaagtatttgaaagtgcatagcgaccagatttagaaataatatgacctaaaatatatttttttagcagcatttggccacatgataattaatttgatctgcccaacatgatcgttcaattgaaatttgcaatgtaaaatcattgtctagcacatactgccaccatgagacataacctattcaattctactgtataatttactcaaattgacacctttcctctgttaattacctactttggatattaatgcgtgcagaattctcatatgtatcagaggatatagatatgacaaataaataaaaagctgtataaattcaaaatacgttgcacagacgattattattgatgttacaaatattaaattttaatgctaaatatcttttctattttcagaattgtagcggtttagattacatcagtttcatcttgctaattttttatttagaattttagaattatattaatataatactaaattaaaattccaaggtgattacatcgttatgctattacaaaattgttttatttattatggactatgaaataaatatggcaaggttatgatcctcaaattcaaaagttgctttatataattgatatcagaataaatgactacatttaaacatgagcaactcagaaaggataaactattatttacaaaacataatataaacaacaacaaatagcttatatgaactttctctgggtttatacattgatgatttaagtctggatgatcccatacgatgtcttatatgaactttgatagtaaaaacatgaagcaatcaatgatagaatcaccagcgcatagaaaccaatgagcagcatataagaagagtaacttacacttatatgaactttcctcatcactgagtgacttttctgtaagcgatgagtttttggatttcaatgatcttctggatttccggttagtcctagctgcaaagtctagtcttttcttcagactttcatgctgtcatggataaaatcaacaaattagggtatgaaccctctacattaaacttagctttctcaccaaatgttgcatgtaataagtgctatagagcaatttatccatggaacatccaatcagattagattagtattatttttcattcattttttttagacacaaaattaattggaactagaccttaggtccgtaattcatgcgttaccataacagaggatgttgaattacaaaatcagtacatgccattagatttttaaataagtaaattataatatagcatatatgtttgagcttcaacaaataaaggcatatatataagctatcactagtgcaaaataaccgtggagttacatatatagcttattcatggagtggcatttttacagctataggatgaaaccagtatcatttgagcaattagagaaaaaaaatgtggtatattgacaattggccaagactgtagtagcatatacgagcaattagcctattcacgcattgaagggccaaagcccaagttgaaggtataacatgccctttcgttgtgttcatgcccagcgaatcaacaaaggatttagtctattcagtaatcctcaatctagtttacttatgcacaaaatttcctagtcgactaatttttctgaagaaagtaataacaccgaaatagatattgctgttcacatacatctatttttttttaaaaaaatgcaactataattttagttgtctttcttaatgtcctaagttaacttcgtaaatgctcaactaagcccaattttattataatagtagatgtacctcatatgctaccatacaaagcccgtaaactatgcatactccattttctttatatatcttatagaacatacattaaaattgttgtttcgttttgaaaaggaacctaaacttgacggatgaaagattttgaggaagagttaccagatctgcggacttctcaaaagagtagaggtcatgaacacttgtcctctgaataaatgcgcgtttaggtacttttccagtttgaacatagagcattgcagatttccttgtgcggaatgaataattattaacaggatccgtgaaatactgcacattcagcaagataattaaaaaactgaagtccatttgtaagtgaagaaaaatgattaagttatactccactacatatatataccgggtcttttctaattactccagtctttgtctttctaaatactacttccttcacccatccttctggcagtgaatgtggattaaattccacatttgcaagaatctaaaaacaagttcaatcattagtttcattcagaaaaatctatatattaatcattaaattctacaaattggtaaaataattaatagataagtgattagggcagatgttgcagcaagaagcacacgttgtctttggttcttgtgtcacattctccatttgtatcaaatccagtaatctcggacttattaatatatagcagtacatcctctttagaaaacagtcgaactccagctggtggataaacataaaactgcaaattgggcataattaaaggtgatcagaaaattttcactaacacgagaaaactattatattgtagaggaccttatattgtactcaaatgtaagatgatgtgtttatgatggaaaatatatttaaacccttgaagatatacaactaattatttcaacaatagttttctaaaagcgtcatcatagtttccagtcaatagaagcatcagcaattatgtgtacaggccaataatgcaaatggactgttacattttggcaatggcttttcagatttgccgttatattttctatactagtgaaacacccatgtgttgcaagggaattaaaattaatcactttgttactttataaaaagttaattgagaaaaatcatatttttatcaaaattcaatgtaatggatgttgctccatatgcctcatcgtttgatgtagagtggtagatgatggattcactaatttgaatttcaagtataagtgggtaggtgatggtggcgaatttaccaccactacagttgaggtcttctagtatagacataatttgtattaacgagggtacatgtccccctattttatagtacattcaaatgatccaccatgtcaagattttttactgtcacaccaaagacaagaataatacacagttggagagctcatttctgacctaattaatactacctactccctttctatcccaaaaaaaaaatctaattctaaggaagtatctgaaaatatataccttatccaaatacatccttaggatttgattttgttttttcgatggaggaagtgaagatggaaaatgataggtgggcctctatgggattttttttcccagccctggccagatataaaaaagtaagcgctatgtagttcaaaaccagttgagtttatatcaaggaataaaaaaccggtttacaaagagctgaggcatggttttgaagttatggagtgcttttaaaagtttacaggcgtaaaatgatgtttttcctttataatatgtcaagcttagatccttgttgaattccctatctcgcttctagcttattggattggcatcctagcactgtcatgaagaataatctaagatctgatgatgaatcactgcatttcaaactactaatgggcatagaacaattagaatacaactatattacaggacaaaataaaaggtaccttatacatcttgttcatgttctttccaccagctctaacctcgattatccagccttttggaagccattcatgtgtcatctgcatatatgtcatggtgggactcacatataccgaattattctatagacaaccaaaatcatgaatagcatattcatatatatatatatatatatatatatatatagaatcactcacaataagctggttatctgcagcacagttctttgattccaggaatcgctcatccatcccagagaaaaggtactgaagcacctctgacttcatggtgaaagtgagtcctgatataggagatgtgtagtactgcacacaaagatatttttgactaaatatcacaaatctcagggacgaaaataaagaatttatatttacagacaaaacttccacacacacatatatatcatccgtaaatctcttatgcatagttatatactatgaactttctagtaacaagatgcagtaaactcgcttttatcatacccggtagattgtgccatcgtcaccttggtagacctccattatccaaccatctggaagccatcctgggcgttcctcctcctcctccaaatcctctacatcttgctgaatctctttcttctcgtcatctgatatcactatcgatgttgatccggccacgcctaaacccttccaaacgcttggaccggccatgcctaatcctctccaaactctttctcctcccttcaccccctctctccctttctctccaacccacagagttgcttgtatataagaacggcaggatgggttgggcaacagatttagggtgctttatatatatgcagcgtacagaaaaatggctgccggccggcattaaatttgcacagctgcacgccagcaccttggaggatgtcatgtttacacctaaatatatggggtagtccagaaacagaaactgttcttttaattcgacaccttgcaaaattgtccatatcaacctaccataaagtgagtaaaattgcagcagtgcatattagtgataagtataacacttatcctgacttcgagttctagtcggcatcttcggaatggttacttactcagttctccgtaatggcattttctgaactgctaaacaatgaattctatgcaaaaattttatatattaattaatttttagagacagtttcataatagaatctcctgcactcaaaattcattgtttaaaatagacgtgagaacttataataaattttagtttttaacctatctcaaataaaaaaaatcagctagatctcttctgtgggcaataattttcatacaagtctgttctcatccaattccatataaaaagttttatatgcagaagttccataaaaatcaaataaaactattttttaattttgtaataatcaatactcgattaatcataaacaaatagctttgtctcgttcgcatgtcaaaaatatccaatcccaaatactggtttttcttatgtgcattgcatcctagttgccacaatcatgcatatgaattcacttagagcttaatggaaactcataaattgaaatctaacaggaactagtggcggacacacgatttcgacaatggaggtacgaagttacagagtacggactacgtagataatacaaaggaaactagatcgacgataaaaatgaactcaaatcactaataagcactcaatccaagcagcagacatgcatatatttggcaatgtatatcttaatcccaatacgcaacatgtagtgaataatttgtagtgaacaataaacaaatgtataatagaaaacacaactaaccattgcttcgttggaagtggcaccggcgatagatgtggcgacgacagggatgttgggctagggtcatgggaggcggcgagtggagctagtgtgccgactagaggagctaagtcgccatcgtgctgtggatctggagcggcatgcaagcgtgtcgtctcctgcccccgacgacttgttcgaccgccgccgccgctcatggcattgctcccgagtcccgactcctaaaccggtaagagaacaaataagaggggaggggaatagggtttagccggaaagggagatcgagatatgcgcacatgggcaagtgggccgccaattaggatggttggattgctattctccaaggcctataaatgattaatttggccgatataaattcatatagttatttatttgcaaaataatttgggaaacgactatacccccatgtccgcccctagcgggaaccccctcccctgccctatccaatcaattttaaaccgtagttttgcggcacaagatatttttgaggggcatttgaaacattgtaaaaattcgaatgacttatctagaagccagctagaaaacgttccacttttatggacaaagctaacccagtttaaatccatccaagttttctttttttattcaatgcccccttatctgtgttcacaatgcacaacacattccacagcctctctcactgaccagctggtccaaatgtccagggtggcctagctggatgctcaacacccttctcccacccacttgacatgtagtatgaattgtgaatgcagtgccttgcatattttgcatggagttattttattctataaacataatacacaagtatatctgtttccaacaaatctgcaccttaaatgctaaccggcaatgacagcacgcagccagatccgcacgatcgggtcaacctattgcgatcttgtccatgtgattttgggcctttccttttttacaaattgtttgatgggctctgagcctttcctttttttgcatattaatgtttgatgggcttcggacctttccttttttgcaaattatttgataggtttattgccatctggttttcctttattagcaaatctaccatattccttttccatagatttgatctggcctttcatttttattaggccttttttccagcctacatgtccaatatttctagaaatatagataaaaaaaattctatgataaactttatacgtataaattttgtatagaagactagtccggaaaagagtattctagcctaacacaagaggaaatgccatcgaccagggcagataaagcttgaaggttatgtcgttgagcgaggaatattctccaagaagatactgcggggaccagtccaaccacccctgcaaactggcgtcaggtccttcggaggaccacacaaatgtacaaccatacccataagatttctagctttagaggggtattttagtaatttcttatctacccttggaggtaggatcgtacatgtacctctgaaggctattaagccgttcccacgagatttgaaatatcaaaataccatacgacacacaggactttgctcttcgagctcatctcacttttatggtaggtgaggaaaatagtactttcccacctattcatgatttgtccgtgaccaagatcaggagagtttgcatgaagaatgacagatgtggtattttcagaacaaaaaagctatcacctgtggtgttaagcgaaataggaaaatttccgtggtattttttgaatttggcttctgaacggtgctatgaaccaaatttttctcaagacaagccgcccctagactcattaattaataagatgggagaaataattttacaaacttttatgctggctgcaccaaccaacagggggttaatttacactgatcatctctcctctgttaccttgacatacttgtttgaatggtgaaagcaaaatgtcataacacttgtacgaacactatttttacatacgggtgatacgcgaattgtacacgagtttagcgaatcgcatgtgatttagggtctacagaaatcagcaattacaaatgtggatttgcctctaccagagttggcatgtttcgaaacataacattagtgaatgaccatactataaagaaaatattttcagaaaatattgagctgaccatattagaaaatattgtaagtatcttacaaacttgagagaatctatttcataccattgagtttgtcacggttctacaatttaccatcgagtttatccacttctattatatgccatcaagtttgtaatttcttttacaattaaccattaccgttagttagtgtgccgtttgtgcttttgaaaagacaaaattgcccataacccatgcgacatgccctttgctcgttcttcacccgtgcagcaaactgtctccggctaggcggccctggcgttagcacgccaccaacttcgtgctcctcgacgtcatgctcgtttcgttcgccggcgagacgtggcgttccacgaagccagagaccccacgtacacgagcagggcgcaggtgcaacatgcatggcaggcggcagggtgactgaagaatgccaattcttcatttcttcgtgggctaacgcataacagcagtccggccggtactccggtaggcactaggcagtagccacccaagcccagcccccaaggctgtgggcatgcgtagcagccagcaagctagctgctctgcttctcagttcagggaatcagggttagttagctagtgaggtgctccgctccacctaagtctgtttaacatgttgttgcttttgttcttttatgtcaaaaaattcggtagcaacatattgtggattcatgcgaccaacaagaagcttagcagtggtggttagcagcagcaacgaaattgattcataactggtactgtagcagcagcagcgctactatggagtacttcctcgttctctcgaatcaaaagaggtgaacattcaataatctgttgtagaagaaatagtatgagagcatttgtgtcatttttgaaaatactaacttgacaaactgacagtgatggtaaatcatagaagaaagttgaaacatgatggcatatagtagaagtggacaaactcggtggtaaaatatagaaccataacaaactcaatggtatgaaatagattatactttgattgacctcaatcggagtgaaaacgaattttcagattttgaggattttcaaataataataataacattccacttgaagacttttaaagtttaatatattaattaatttttagagacagtttcttaatagaatctcatgcactcaacattcgttgtttaaaatagatgtgagaacttataagaaatttttagttcttaacctatcccaaataaaaaaatcagctagatctcttatgtgggcaataattttcatacaagtctgttctcatccaattccatataaaagttttatatgtagaagttccttaaaaatcaaataaatctattttttaagtttgtaaaaattaaaactcgattaatcatacacaaatagctcatctcgtttcgcatgtcaaaaaaatccaatcccaagtactggtttttcttatgtgcattgcatcctagttgccacaatcatgcatttgaattcacttagagcttaatggaaactcataaattgaaatctaacaggaactagtggcggacacacgattttgacaatgggggtacgaagttacagagtacggactacgtagataa

SEQ ID NO: 2183 - DNA, 1203 bp, Oryza sativa
tccttgcatatcattacatattccttctttggcatgaaggaggcattcggatttgctccttcctggctcttatggctgaggttagtaaagaagatatatcattatttaggacaaatttagagggaatgattttctttttctttcataactttttttcttaaacctggtgctgattttgtacaggtatagcacctttatggtattgtatcctactggtatcagcagtgaggtcggtttaatctacattgccttgccttacatgaaggtaacaagaatgaacttcagaaatgaagatctccacgttgttcattgcataatgcataatgcgtaatttaactgctcctttcttgtgactactatgcaggcatcagagaaatactgccttaggatgcccaacaaatggaacttctcctttgatttcttctatgcatccatcctttctctcgccatctacgtgcccggtatcccctcttgccttgcagtcatcctttattcagtggttgaaattaaaactagaattgcaatgttgttttttagtagctgggattaagataggatctgacaagaacactgcgttgcaggatcgcctcacatgttcacctacatgcttgcccaacggaagaaggcattggcaaaggctaaggctgcataatggtgatgctcaagagctttcttgaatttttcatgtgtggcttaaggatctgcctaaatagctcatatttgctactcttttagtacaagtctgtagatgaggaaatgttggaaagaactactatcttaatcccagcatttgttgtaactgtagtaactgcccatcatttgttgtaactgtagtcttctaccaagaattgtatgatattttacctggttaaattattgaatgattgatccaaaatttgccggcttgtttcaagttgcactctttctgcgtttgctgttagcctgttatgctgtatgttgcacactttgcactgcgggctatagagaattggcacatttgcatatttattactggtatgcaattatgagtcccattgtttcacttatgcttataagcagttttaaattttataacttaattttgaagttgattttgtggttttctcatcgtagcaacatttgcttttgaatcactaagaacacatataaaattttttatccatattatgtttatattgctaataactgattcaaataagcata

SEQ ID NO: 2184 - DNA, 616 bp, Oryza sativa
actatagggcgaattcgagctcggtaccctggtgtagacttctttaggaatcttattctgggtcctaggattccggcacgatgtagtcccagaagtggtcgttgacatcggttcgccttgctgcgacatgtcctatgtcactgttgtacggggagaaagaacttgggtctgcccctgcggatttgtccggagatcaagtacacaacatggtgaaggacattaataatgagtttgggaagaaaagaaaacgtagcaaggaggacaagaagaggatgtggaataaaaaaaatccatattttggcggctaccttattgggaagatcttgaggtccgtcattgcattgatctgatgcacgtagagaagaatgtgtgcgatagcttgctggggctattgttgaatatgcctggcaagacaaaggacgggttgaatgcgcgtctcgatctacaggagatgaacattcgcagtgaacttcagcctgttacagatgagaagatgggaagagtgtaccttccaccagcttgccacacattgtcgaaggatgagaagatcgcatgctatcatgtctggcagatataaaagtcccttcgggctattgctcgagaattaagtacgtac

SEQ ID NO: 2185 - DNA, 851 bp, Oryza sativa
agccaagttttggtcaaagtagaatgggtccccacccaaaagaagggtaggtagaaatggtatatgtggtatccccttgagatataaaagaaggcccatgcctaccaagagaggggactgacggactaacagactggagggagctgaaaaagaagaaagaggagagcagaggtcgtagagagaaagagtgagagggtctctagagtttgaactcttttgatctccagctccttgtagctccttcgtacacagatccaccagaacacaggagtagggtattacgcttctcagcggcccgaacctgtctacatcgcccgtgtcttgcgcatttgctctctcgcgaaacattccacagatcgagggcttagaacctcacctagcgcccccggccgaaccggcaaaggggggcccgcgcggtctcccggtgaggagccccaacggtccgtcatctggcgcgccaggtagggggcgcgtgtgtttttctaagctctcgtcctctttcgtgtgcgccaagcttctcccgttcagcccaatggccgaacgggcagtggcgcacaacctctctccgagcgctagcggtgacgacggggagcagaacccgcgccgtcgagctcgtactccaccgcccccctctcgccgaagtcttaggcgggaggaggcgctcgagggggttgaaagatccgcgacttcgccgcccacgagcgatggagaaggacggcgagacggggagcatcgcctcctcgtctacggcgatggtagcacgccccagggcgcgctccaagctgcgggcgcgctcttgcgtcacccgcccgtcgtccccgatccagagactccagcccgacgttggctgg

SEQ ID NO: 2186 - DNA, 1567 bp, Oryza sativa
tcaatgtctacatgtcaatgctgtctacctccgtacggatgcgcctcgtcgattcagtgaaatagaaagaacaaaaattaagatgaagaatgcacagtcatatattaatacacgttgagaaaatacaattaggctgcgtttgactgttgcggttaggaacaaatccctcttaaacgcgtaaaacagagcgatccatcaatatgtgattaattaattattagcatttttttaaaaaatagattgatatgattttttaaaacaattttcgcgcgcgtgtatatacatatacatatatatacacacaccgtttagttgtttgaaaaactcgtcaggttctgatttactgtgtaggaggaatccaattcggttgcggttcgtgcagactgagactcaaaatccgactccgacggctggggctgtttgtactcggcttcgttcttcctgcccatgcactcttcgcctacataagagatagatagccacaggactaatttcttcaccaacaaacatcgatctgatccagcgaacgtgtgcgtggaattcacacagcttttttggtgctcagagtacggtatttttggtattttgatggatccgctcccttttccctgcctcgccctgtacgaagacgcggacacgccaaagccgacattcttcgacatattcgaggaggcgaagatcgagtgcgccatcgacagcctgaccaacaacaagaaaaaactatggtagacgcctcagggatggatcctagtccgcgacgccgccgccgccaccacgttcctgcagaatcctcgtgatcccggcgacaagattcacctgccacatctgcccgaggacctgccgagcaagtccacctgcgtcctctccggcaagccgacgatccctggttgcgtcgcgctgctcgtcgagccattcgccaccgtcatctggtaccttcacgtcggcgaggaagacggcgagtggacgaggcacgagtacgacatcggaacgcagccactggacccgcccatcgacggcgaggaccacgagaaggtgccgatatgctcgatcgccgcttgccggggcaagttctacttcaacggtacactctccgacatcggcgtgctcgagttctctccctccgccgctgcgacatcgacatcgccggtgttcagctccctcgagctcgccggagagttcgaggtcgtgtacagggcgaaggtattcctagtggaatccggcgaggatctgtacatggttatgctggtgtaccgcggctttcgctgcgacaagacgggctacgagacccgggtctacaggatggatttctccgagcagccgccgcggtggcgcacgggcgggtgacctcgccgtcggcgcgttcttgctgtctccgtggtatttcggcgcgacgtgttcggcccgtgagcttgggctgcacgaggattgtgtctacgcgttcgttcctggggatgatgaggtgcctacgtgcttgaagatgtccagcgtgaaagatggatgggatgatttcgttgatgttccagcggtacacagggcattgtggattctgcccactgatccatatata

SEQ ID NO: 2187 - DNA, 3136 bp, Oryza sativa
  unsure (1)..(3136): unsure at all n locations
actgtatacttatgtttccattcaaaaattgtatccacaaaacatggtccatttaaatcgaagtggttaacggcttcccttttcagttctggaagctggtagcgttcttcgcaactccaactatcactcctgcgctatttggtggtggcctgttgggatatgtgatgtatgactgcactcactattacttgcaccatggacaaccatccaaagagccagcgaaaaatctcaaggtgacaacttagtgccacttataaagctatagattatctagctgttccaaccaaagtccatgaggcttgtattccttacaacgtttgctcgttatgcagcggtatcacctcaaccaccacttcagaatccaaaacaaaggctttggcatcacctcatcactctgggattacgtttttgggacattgcctccgtcgaagaccaccggaaagaacaactgagccactgacagaaatgtattgttttgcatgagaaattttagaggatatgtaatatatatattaagtctaggcacaactgcttgttttgtctttctgggacaacaggttcacatgcccattcagttcgaattcctgtggtttactgatgactgccttgatgtgggtgaagaagacatttcattgccttgacatccaatgttctgaattcagataataggcagttcttgatgtgatccatatgccatgttaagcttagcaattctattggcatgtccaattacaaaatgtttgtcttttcttaggattttttcccctcaatcatcaaagagtatcagatactcacagatgcgagatgccgttttctgggtccccgtcatgcctgtcatgatttttttttgatacgcctgtcatgagttgtctggcaactacatttcggtctaaaggcaaaatgatgtttatgtaatcatataagtaataaagaaatatgaagtattattttggaggaataagcatactggatagccctacagatttatacaggcgagaaagctactcagaagtcaaacagctatgacaaaatagattactagttcctgaatttctgtcatggatatgccttttctagttttcttcctttttctttgcgaggacatgcctttgtcatggatatgccttttcttcctttttctttgtgaggacatgcctttttcttattaagcgagccaagagtctaaatgcaaattctgacttttgtttcatgaaaaatatcagacatttttttttacgtaagaaggtagagcaggctctaccttatggccatttcattgatagaaatgaaggattacaagattttaacgaagcttatagaggaagaagaagaaagaggaaccagaaaaaaaaaagaganaccagccaaacaggaataagagaaagagccgggggttaggacttaggattgtagaatttacagaggtatatacaagagcctcttcctaaatctcgagcaccaagagataattttctgcttgattaactcgtttgctctttttcatgaaacgttagaacgtggcaaatacgaaagcagttcttgaagtcgcagcagatcgcacatgaaatgcagacataaatttaacacccagttcagctatcaatgagtctttgcttatcaccagatccccggttgagatgaacaataattccattcattataattccagatctacagacagttggggcgttggaagcacatgggaaccatctagttccagttcagatcttcagatgcccctcatgaaacatatttcctcagatgataaacacactacctccttttcaaatgtttggcatcattgacttccgtacaacgtttgatctttcgtcttattaaaaaaattagtacaaatatgtaaaaatataaattaagattatactttatttgatgataaaacaagtcacaacaagataaatgatatttcactccttttgttttgaataagacgaatggttaaacgttatgcgaaaaatcaacaacatcaaacattttgaaatattgaaatggagggagtagtatgttacaacagtatccaataatccagcagcaagtgaaaaaaaaatcaatttagccacagtaaaactgtgcctattcaaattgagatgtacaccaaacaaaaatgaatctgccaaattcgagacagaattgcgcttaaaggaaaagcaaacagaaactagagttttgtaaatcgacacaatgagttggcgaaacttcccaattttcattaatatataaacacaagtgtcccgcatttggctacattgcaaaagggcgaagcccacactacgaaagctgccctagatacaaggaggctaaaaggcgaagggcctcacacctctgggtgatctgggccagctgcgtcagcttcaccgtcgccagctttgggctcctccgcggcttcttccgcttcgcgttgagccttcgcgctcttctccagttggtcgcggagatagcccttagcgatggttcacccctccttctgccagtactcttttcgccaagcgcgaagagtagtagagatggggtacgacttctccggccaatctcccttgacgaactccgggaattgggcgacatgttcgcacccattttcctggagcaccccaagcacgaaagccgccgaaacccgagcacaacaatcaccataattgctgccggtctcagccacggcacctccggcttgttgtgtccattccgagaagtccagcgcggaagcatttttgcctggaacgcctttggcctgggcgcccaactcatgaagggcaagccggagagtatagctggccgacttggccgaatctgtaatctcagcaacggagcgggcagactctttcgccgtggtttcggctgcggcctttgcctagtccagctcctggcgaaggctgttcatcttcccctcggacgaattgtagtagtccaagagggtagcgttctggtgcttcgccttctccagttcctcctttagttttttgttttcggccttagcctgccttagggattcggccaccacctctcgctcctggttttttcgaccaaggtctccctcgagccgacgtagacggtccttgtacccgtcgaggcgggcccgaacggactgtccatgttgcagtgggctaaaagtgcctagcgaaga

SEQ ID NO: 2188 - DNA, 647 bp, Oryza sativa
cttctgatgagctcaacgattgcctggaattgctcgatgctgcaagggatccttaaaacgccctcctgttcatgcccaaactccattgctgccagctccagcaacacaaagaagtaagggtggtgaagctcctccatgtggatcactaccctcttcatctcctccccctcgccgacgagcaccgggatgcgccctcgatgaactgagaagatctcccccatcctccctacctaatgtttcttagttggagaaatggtgatgcaccttgatcctcccttgcttatatataagcaaaggtttttcaagttgcaaacttgcaatgcagatgatttcagtgggtgatcttactggtttggccccatgaaaccattttttttatattgtcctatgcatttgtcttctggttaccatcatgtagtagctgttgaatgaatgagagtaggatctaccaaacaatatgaaagattgacaattgctgaaaacaatgggactaaatgcaaactaaagtaatcatatggtcattttcatgcactttaaaaggagtagtttatatagagtcggagagcaacgactaatgtgacaaagtacatcctgtacggatattctagatgactccattatccctgaactcctgaagatatgatcaa

SEQ ID NO: 2189 - DNA, 4317 bp, Oryza sativa
aacccagtgatcttttacaacttacgcccgtaattatttacagcattgattgagtaaatacaggtaaataaaatgacttggggtggcccacactgcaccaaaggtaatcttacctgctccaaagtgaaaatatgatctacaaaattatacatgtgaaactttggtcatgaaaaggggaccaaagcgcaattaactctaaaacaaaagcatcatatggatctcaaaacaagaagcagcacgggcatgctggtcatcctatacatggcagaggatccacaaactagataactaataaattctccagaaggttgaatgtattgtgtaattgaatttaaaaactcaggaagaaaaaatttatgggaactttatcgagcatttacctgtcctcggcccacggcacaaacctcctgggtagtgcaaattgagccagagcccatcccaacacgcaatccatccaccccagaagcaactaaattctgtgcctgcgcaatcgtcaccacattacctccaatcaagtccacttccgggtacatcttctttgcatacttgatcatatcaatctggtagatagagttcccctgcgagctatctacaacaatcgcatttgcccctgccttaactagctgctccagccttcgcttgtcatcctcacgggtcccaatggaagccgcaacaacaaacttcccgtccgctccaagagacggcttgcctagcttcggatagctccggatgcgctccacatcattgacagtgatgaggtcgattacctcgctatcatcggatacaagaggggcataatccaaaccctcgtccgctagaaaggcggccgcctgctcgaaatcaaaagaggcggacaccgagcgcggggcggggcgcatgtactcggagacagggaggggagcctgacgagaggaggtctcggctgcaacagcgacgccgacgagcttggagagcgaatcgccgcgctccgtgaccaggccgtagtcgtggccagcgaagtcggagagggatggggtggaggcgggggagaataaggggacggaggagacgaacgggaggcggcgggacttggcggcgcggacgatgaggcctggaggtggggctcggtgttgcagtggacgacggcggcggcgccgagggatgccatggcggcggccatggcggcctcggagacggtgtccatgggggaggccacgcaggggatggagagggggatgcggcgggagaggcgggtggagaggtccacggcgtcggccgggaacccgatgtagcccgggaggaagatgacgtcgtcgtaggtgtaggagacgccctgcgagaagaggcgcggcgccggaagccgtcgtcggcgagatcggcgctgctcgccgccatgggtgaggttggaggttttagggttttagcggcggcggcggcagcggcggggggtcggcgcgggggagggtgaggatgatgagaatgggatgggaaacgtgaacggctcagggtttatggctaacatttggcgggtagcgctcggtggatgacgtacgggcccatagtaatgttaggccgtctgaatttttcgaccgacgaatgggtcccacgtaacccttttggagaggcattcggctcgccatcgggcccgcctgcgagtcttgcatcatcggagatattttcatggtaaaaacggtttacacgcttttgatttttttttttgagaacttggcttttgaattgtctgtcgctaaaggaatggagttgttttgttgctaatactcctaccttaaaattgaacttaaaattggtccggaagccataacacatactccgaaagtatatcatgacttgtatataagaaaaatataaatattaaatattatttctaagattctcttaacatgtatgtagaacaataataagtgaataataagtgagtaatgatcaaatgttggattcagtcaaaggaagtgttacgattttttggatggtttcatccatatcattagatgggattgacccagtgaataggcacctcacccttctactctaccgcaaggaaccacagcggtttagggtgtgtttgagtgtaaaatttttaaaatatacatacgcacatttaaaatatttaacgtagactagtaacaaaataaattatagattccgcatgtaaactacgagacaaatttattaaacctaattaactcaggggcgtattcacaatgggggtcttgagaccctagtaccgccccgggacagagaccccccaaagcccccactaatttttttccatatattcataggatgtgtggactgaaggttcaatttatgttgatgtagtttattcagcccccactactatttttttgagatccacccctgaattaatccgtcattagtaaatgtttactgtaacatcacattgtcaaatcatggcgtaattaggttcaaaagattcgtctcgcattttatatgtaaactgtgcaattgatttttttccccatatttaatgccctatacatatatctaaatatttgatgtgatgttttttgccaaaatttttgggatcaaggccttagtcgcacatcctcggtctctcagacactcctcacacccaaccatcacgtcctctgattgaaaccatttccctatgtataaactaaacatttgatcaatgagaattactcatctctctccctctcgtttcattctcaacaattttgttggtaatacttcattaaatcacacgggacatattgcaatcgtttttatcaaccacaaaacataatttaactaaaaaaacagtccagaaaccaaaacacatactccaggagtatattatagaagagaaatataaatattaaacgtgaataaatatatgttggatttctatacatttaaaattttgaaaatattttttaagtcataagtcaggagttcaattatatggacgcgtgtaaaaccatcaatccttctgaacaagtaatgaaacaattaacttatatatcaacaggcgtgtaaaactgtatattgaagaagttgtccctacatttctcctttccccatttttccattcgaattcctcctcattttattcttccccaaaaagtcaccctttcaaacacttcccaactcatcacgcctctggcaaagggcccacagactcagtcagagccagccaacccgaccccatcccagccgttggattagcccttcaccgccgtccaaaccccacgtctcctcaatccccccacctcctcacccaacccagccactgacaccctgcccccacattacatgaaccccacctgtcagtgacacaaacatcccacacgcgacgtgcaactccccgcctccacaactatatatgaacgcgccccttcctcgcgaatttttcctctccacaccaaaagacgccgcccaactcgcgaaggcggaaaaggaaaaaaagagagaaaaaaaaaggaagaaaaaaaaataaaactcgcgcacagcaaccgaatcatctgcctcctcctcaagtagtctagtcctcctctcttctccggagtctgcgtgcgatcgaagcagaggcgcggcgctcctcctcctcctccggctccgatccccatggcgttcatgcgttcccacgtgagttgatctcctcctcttcctcctccctattctgctctggttcgatggcggcggtccgttttggttgtggtgcctgcgggcggcggcggcgggggtggtttagatctgcgtggtctggatcgagggccccctcgtgatccttctcacggtgtgttgttcggatccggtcgaatgggtttcatctaacggctaaacgtgagatccactggcgtgggaggagtttctttgtgtgccgcgatggatttatggagatcgttttggtttcgtgtggttgatgacgtgatttgtggacggttctggctagcaggtagatgagaggttttaaggggtgattatgtgaaattgtttatggctagtttgggattagataaagttggttactgtatttgaagtttagtgttttagattcctcgtggtcacattgcatgcctaacggtttctctgttttgactgcaattatatgatttctctcattatcttagtgtatatatttgtgagatggtgcagtagggagcgatggtatgtaatgcattagaaactggtcggggaataggcaagacagaaatgaaagggactgattgggaataggcgagacttagaaatgaaagaaaacacgttgtggaaagtatccacgagataatagtttggttttgtgggcggggaatgaggcattgttcttcagcagccgcttgacttggatttatt

SEQ ID NO: 2190 - DNA, 3260 bp, Oryza sativa
  unsure (1)..(3260): unsure at all n locations
ggagatgggttacacaaaatcagtatagcatttcaagagaaacacacatggtatcaatgctatgaacataaataatatggggaattttagatcagttcatgtactttatggactatacatcatccacgagcaaggcgtctagtgcattttcagttttattcgacctcaatgttcagttagctactagtatgccgttttggtttttactaaaaaggagacttcatttggtggtatgaacaaacgaccgattatacttggcagggacagtttggtcgcgagatgaggtaaatcgtcccttaatcttgaaaacaaaggtcaagcataacaacaatagaacattcctcgagcattgcaatctgaatttcacttgggggtgaaaatcatatgccttgaagccttatcacaacattaaaatttatcgatctctaatcccttggaatttttactatgttttagctggcagagaataagctcaaaagcagccagtactgcacgggaaataagattcatactctataaaatagggagtggaacagcttattcaccatatcttagctgtttacttctgatactaaaccttttttntnnttttcaaaattttttaaaagnaaaggggggggcggaaggagcgttaactgagcctgcagcatgtgtagtcctagaaacagggaatgtgttcattatcttctaaaaattntcctgttnaaaancatttgagccnnnaagccaaacgagcgttntnttccatttataatttaggaatatgngcaccatggagatacctctaatttgatagtctccgaacgcagcagctcatgagctgactgcaaagatgacgcaccaagatcttggaacccttgcttaacagcttgcattgtataaggaatgaacctcagcacagaacctttatcagcaactgctccaacaactccctgggcgactttaagctgagggtatcgcctaggtacctggcgtcactcccctttgtcattgcttcgagagagcccatgcctcggtattttttaacacggtggccatcctaaaagcattccaagaaccataatttcagacaggagggagtgaaacaacaggtacgtgtgataagagtaacataaatatattcgaccaaccaacacaataagcaattaaaaacccacttctacgacacagtgctagaaatgacacaggaaaatgctgaagacatcttaattataataattcaaaatattttaaggattaatgttgcccattaaattacatgatcctatcaactacatgcatcacattggcaatctaagataggacaataatagctactaatatattggcagcttatcaccccatttttactagtatattgtagtaataatcctaaagcaggtcaaatttactgaaacatctgcaaatggaaaatgctaaggtgtggtttcacccaaagcatcattgaagaataagagtggttatccaaaacaatggtttctaattaccagatatgaccttaaaacaactagctagaacaatctagccatgccactggttgcacttgcagaaataattaagaactaacatgaatacttcaggcacacagattgtgatcaccaagagtgatgtgaaagaccaatagaacacacatatatctagtatttacacttaacagaatatgtgctggcaattggttcagacagagcaatctcatacaaagcacaggaggcaaattgtctcagtgtctctcgctactaggtttgttgtgttttaaaaaactgtgattttcagcagccatgttactaatattgtcatccatgaagcaaatattcagaagcaacatatctaaacacacaatcatcttatataggaacttttatgacggcctgattagcacttttatggcatcaattagaccaaaatattgcctaaacattgatagcatgttttcattgcagtggtcacatgggatgtacatttgcatgtgcatggcatgtgggtcgtccttcaaagtatcaattcaatacgtacggttgtacagactcagacagacattgctaaagaactacaaaatagtttatgcatggtaaaagcatatcagaaataaaatcacatgctgaacctaaaaattcctgcagaagctttaaaaaattgaataccttgtactcgtaagtaccatgagcttcatggctgccagccaagaagctacccatcataacagtggatgcccccagagacaaagccttcacaatatgtccagagtttgaaattccaccatccgcaatgactggcacattgtgatctttggcataagatgcaaccttatacacgtcgctgtagcctggtcgcacgacaaatgcaagaaacaagtgtcaaacacatgcagcacacagcagtgccaaaattctttggtatacgatatataccatatatataccatatttgttgtatccctataacatttgtatccgccacatgtcccatgatccacttattatacaaacctcatttcaagtttaggtctaaaaacagcagaaaaggaatgagctggacaaggtctcaatacatcacagaacaaaatctcgtaaacaacataatgcccaggttccacgggtatgaatgggaggttgtagcaactaacacaaagttcacacttaaaatgtaacgtctggacaacccagcctaattaaacaagaagaacctaacacctactcattctcactttgtgccatctaaaaatatgaaacaggatatccatatcctcctgagtgttggtggaaatggaagacgctatagatcatccaactagtttagaactttagatgcttgtgataacaatgcagagacgaagcatccaactagtttagatgcttggatagatgcttgggataacaaggcagagaggaaggattataaattagagcaaggcatcagaatctagtttagatgcttgggatagcaaggcagagatgaaggattagaaattttagtaaggcatcagattctgggcctatttggatggctgccaagtattgtcgcacatcagttattaggtggatatgaccaaatatggctggtgcttttggtttgttactatcactacggtgtgccacactttctaaccctttagccccacttgtcatcaactctctccatagccaaaataggccacaagtgtggtgaccaattttgagacacaaaatctgcagtttgtcacactttcggcacgggattgtggaaaagtggggatacaagtaaccaaacaatgtttctgtctc

SEQ ID NO: 2191 - DNA, 1651 bp, Oryza sativa
gaacatctcttggatggaggtggagttcccgacgaaggtcgccgccatcttcagccccctgggcggaatgtcacagacactggatttgacgttgttgggaatccactcgacaaagtatgaggagttcttgttctgaacattgagcatctgctcgtccacctccttggtgctcatcttcccacggaacatggcagaagctgtgaggtagcggccatggcggggatcagcagcgcacatcatgttcttcgcatcccacatttgctgtgtcagctcaggaacggtgagagcacggtactgctgtgatccgcgtgaagtcaatggcgcaaagccaaccatgaagaagtggagacgggggaaagggatgagattcacagcaagtttgcgcagatcagagttgagctgaccagggaacctcaagcagcatgtaacaccactcatggttgcagagataagatgattgaggtcaccaactgcattgttagaaccaagcaagctatgagtgcctacttctagttgaacagtaatttagtgatatcatggagaagtaaacaagaggagactaacttacaggtaggggtagcaagctttagtgtgcggaagcatatgtcgtagagagcttcattgtcaagcaccatacattcatcagcattctcaacaagttggtgaacagaaagggtagcattgtaaggctccacaacagtatccgagacctttggtgatgggaagacggaaaatgtcaacatcattctatccgggtactcctccctaatcttagaaataagaagggttcccatgccagatccagtgcctcctcccaatgaatggcaaacttggaatcctgcaagtaaagaatataagaccatgatgttagtcatcaatgcaaacagacttcaaacatgcatctacaaaaggcagccttgggttcaacgaatgtagcaacattcaaaaggccaagggcagctagaagtttagggtatcactgtgtcttccacgaaaccagagtttgggagcaattgatcatgttccaatagagaaggtattatatggattaaggcaaaggcaatttttcacatcttcttctaccaagctttattagtcgatgaacttgtcatggcattcaactaaggcatattacttgggtctatcatgttgaatattatacctgtacagctgtaccaaaaataaataatcataaggatgaccaaagcaataaagttttgatttcattgtaaaccatgaaagacaaggttacaattttgctatgttttgagtttttaaagaattaaatccagctatgacacaggtggacactacaggtaaagagaaaagttctgtgtaaacatctagaacagctacagtaggagctagataagatattggtgttgatgttgatgcccattccaccaacaaggcaacaacaattgatgttgatcaagctacataagacaataggagctcatatacaaaacataggttgatgattgatagagcgtcttatggagcttaaaattctcacaggcacatccctaccaagatatgaaaaattggtcacacaatggcattataagctaaatgcaaattgggccattagaatttagaacacaagtagcacagatgacagattatcatgctatacaacaaataacacgaa

SEQ ID NO: 2192 - DNA, 791 bp, Oryza sativa
agcataacaaagtggatttgtgattaggaagctcaccaggcgatgaagaaaatcttgctcttttgcacattctccccagtaacaaagtcaaaatcatagagggcatatctgcagtcattttctgggagagatgccaggaaatcatcataactctcagttgttgccccggtcttctccacaacaacttgcttttgcttttcctcgattttgaagataacatagcgaaatgctttcttcatctgaagctcaaggaatgtgtccctgatgtcaggagcaacccccataccggaggatgcattggactgcaaacataattacagacacttgagaacatgatcaataaaaacaagacctaataataagagaaactgttcaaaattcaacatcacatgtcaattcagtattcaagtaaaaaaaaagtgaagtaaacctacatagaagcaaagaccattcaagataaatcttatttagtgtgatagagtggtgctaaactttcagaatcacattgtaaacttgtaagaaaccatgagattgctaacgcattctgcgcatcattgagccctgaacatccacatgtgccaatggcaaaatatgtaacactcatatttggtataacaaactacaatatcagtaatcgacttgttgtaaaattgttaacagtaacataacttggcttgcgtatatttttttatgcttggccacagctcataggcagtaaaagaacatgctcacacagaaaaaatgcacaaatatttaaatcaaatagcacagaggcccaggacccagggttg

SEQ ID NO: 2193 - DNA, 1616 bp, Oryza sativa
  unsure (1)..(1616): unsure at all n locations
gttaagaatagtacagggtcactttatactacacaaaccgtcacgtttcttttgattcatgtattcctgtttaagagacttttaactcatatgtcgtcgtccaaaattttcagatcttttggaagcttctcacgctgtatgcgtgcaaggctctgaggatttctgattgcatccagcatcctgtccaagaattcaatgaactggcgatcttcatgagcaacctgaggatctgaaaacctatcgaagcgatactgatcctgcacgttccattacaaccataaagcttcaaaaaacagaggaactccagcactaagcaatagatacatcgtggggatatcatatactacataagtacgtcttaaatcacaggtatgtgcaaacagaaggtcagtaaacttgtagatatatatttacctcaagtttagttttatgatgattatgattactagtttaccacaatcttggaatttatttgacactgtacatgaaaagctgaacaacaacacatctacttgtctaagcacaaaccttttatttaaacggaataaccaaaccacaaacattcaacttcgatgtagaaaaaaaaaaaggcaaattttggatagaggtcgaaccttgatcgtcgtgtcgacttgcccacacgcgctgctgcagaaggattgatagctcgccggagaaagacgacggagcccctccccatggaacagctgcagctggcgatggccggagaggcggcagatcgcctgaattctcccgaggaccaactccgatgccatgtttgcccaagcaagcggntatcctttgttcccctcttctaattttcccctacttcaatctacaagcttctccagggatcgagcagtagttgtagttgtagtactatcggagtattacgcaaggtatcggcagtcatggaaagcttcgttggcctcgtttggaccggccgggtcagagattgactgagattagcagtcatcctttgacggaacgttctttggtctcgtcactgatgactagataatcgcaagtcacaacgtgtctcctgatctcatctttgatttctcctcctgtagctatcttgttgattactactaggtttgtctccgcacacctgggatgctcccagtttagttattatccctctcaggctctgccacgtagagcagaattaccatggctgtagaccccaaggcgccgtttgggcgcgtaactgaattttttagagatgtttcgttacgatccttgattgccaatttggctggaaagatatggcatctgtagcaataattttgatcgagaaaacgtgtacgcgtttcagcggaagcctggaaagatgcttcgagaagaatattttgccaattggtcatacatattacatggtcgctggccaactttcttttatgactcggctcaaacttttaatccatggtctctgaaaacttaatatagacgtgattcacaaaaaaaaaaacagaaaaattcacacgattcttcacagtaactgtagatctcgggttgtaaaattctccggtcgtgtggtggttgtcataaaccgaccggcaacaatgtcgtatggtgaaaaaaaatactgccacacgattaactccctggcattt

SEQ ID NO: 2194 - DNA, 1066 bp, Oryza sativa
tcatctaaagcaagaaattgatttattcaaatattatacacgtaatcgtagatccaaatccatggatgtattgtggaccttgaaatactcagctccgtaaaattttggagctctgctaaagaggaccttagctctaagaaatcttgaatattgagttgtacaaagaggaccttacctctaagaaatcttgaattttgaattttggagctctgctaaggccgtgtttagtttcaaagtttttcttcaaacttccaacttttctatcacatcaaaactttcctacacacataaatttctaatttttccgtcacatcgtttcaatttcaaccaaacttctaattttggtgtacactaaacacagcttaaagaggaccttagttcatggcaccatttgatagggagaagggcaggagattaaatttgctaaaaggcccctgcaaaaactacaaataagtactagtcctactttattacaaggcgttctctcttccttccttctcagcttctccaagctcgcgcgcaagcaagccgccgccgccgccgccgccggagagatggactcccgcggcttcgattccgaaggccgggaattctccagcgccaccgagatgtgggcgcacgaaatcggcgccgcggcggatgccccggtctccgccgcggtagccgaacccgctccggcccccgccgccggaagcaacggggtcgccggcgaggaggaggcaggcggcggcgggaagcgggaggagtggtactccaaggcaatcgcctactggcaagtaaagagcgctcactcactccctcctcctcctccctaaaccctaaacccccccaaatccgagcgcattgtctcctcgcggcgaattcggctacaagttttcttgatttgggtgtgctagggcgtggaggcgtcgaccgagggtgtccttggagggtacggatgcgtgaacgacgtggacgtcaagggcagcgacgcgttcctccgtcctctcctcgccgagcgattcggctccgcgaggcgccatctcgtcgccctcggtgagttcacttctgtggaaggatattcgtt

SEQ ID NO: 2195 - DNA, 5374 bp, Oryza sativa
  unsure (1)..(5374): unsure at all n locations
tgtaaccaggtatcttttggactttcgtatccttcattaaccttctcacttttgatacaccatcccatcgtccagcaactgcattgatattggacatgagcacataataaccagaattatgaggatccaacttaaataattcctgtgaagcaatctctgcaagttcgacattgcgatgcacacggcaagcatggagaagagcaccccaaataccagcatctggcttgaaaggcatatcaacaatcaattccatagctttatccaacttccctgcccgactatataggtcaaccatgcaagcaaaatgctccattcgaggtgcaatctgatattcctcggtcatacatcggaaaagtcgcaatccttcctgaacttgtccagcatgagcacaagcagaaaccaaagcgaggaacgttacatgatctgccttgaatccctcctcttgcatatggcgtaataaacttactgactccttaacaaggccataagccccataggaagcaattatgctattccatgagacttcatttttctcaggcatggactcaaaaacacgatgagcccattctaagttaccacatttgccatacatatctataagagcactctcagcaaacaagtctgctcttatggggccctttatgacgacaccatgaatctcctttccgtaatatatagctggtaagcttgcacaagctgatagcacagaagatatggtcacattactgtactttactccttccatacacatttcacggaaaaggttaagggcttcttctggttccccattttgtgcaaagcttgaaatcattgagttccatgtcacttcgtccttagcagatatcttagagaaaatataatggctcaggtcaagcctgccacatttagcatacatgtccattagtgcactctccacataacaccttccttcatatgcatttttcagagcataactatggagttcctgaccaagcttcatagctgccatgctagcacaggccggcaacacactagcaatcgctacagcatttggtctgatgccttgttccaacaaatatcggaacattttcactgcctcttgactcatcccatttagaacataaccagaaatcatagtgctgccgataaccacatcaatggctttagaagaatcatagacactttgtgccatcctcactgctctgcacttgaaatagatatccaccaaagcactaaccaagaatacatccatgtgcacacagtttctgacaatataaccatgaagctccttcccctgattgaaaccattcaagtcagtcaaagctggtagcaagctcaccagtgtaactgaatccggtcgaataccactcttctgcatatcacaaaacaaaagcaatgcctgatcaacaaaaccattttgcacacatccggatatcatcccgttccaggtcaccaagtcatcacgcggcatcaggccaaacaacttccagccatcatccaggcatttgcatttggcatacatagacaccagtgtgttcgccaccgccacctcagattctaacccatacttcacagcaagcgtgtggagctgcaccccaaagaacaagtcactctctgtggcagaaacagatagaaagcatgccaaggttgcgaaattgggttcgcaaccgctcgctctcatgtccccgaatagctccaccgcgctcgacacgctcccagctttcacatacccgtccatcatcacattccacaggacacaatcccgctccgccattccgtcgaacacctgccgcgcgtcccagaggaggccgccattggcgtacattttgatcagcgcgctgccgacgaacatgtcgccgtcgagcccgagcgttcgcgcggtgcggtgcacgaggcggccgagagcgatcgcgccaatcgcggcgcaagacttgacgacgtaggggaaggtgtggctgtccgggagcggcgcggaggggtgcgcccacatcttgaggtagaagaggagcgcggagcggtagtcccccgccatggtgagcccgcggatgagccagttccacgggagcgcgcaagcggcggcgccccgtggcagcgaggagaacaccgcgacggcgtcgcggaagcggcgcgcgaggacgtacatgccgacgaggcgggtctggagcgccgtgtcggtggcgtggagccccgcggtgacggcgcgcccgtgcacctgcagtccgagcgagaggtgcgacggggagacgcagccgcggagcacggcgaggaggcggcggtcgggggaggcggcggcggccgtggtggagaaggtggtggtgcgaaggcagcatggccgtggcggcggcgtgagctcgacgcggcggatgaggaggcggcgcagtgggaagcgcatggcagccgccgacgaggccgaggaggggaagtgaggcggcggcgactcactcgccgcgtttgatttcgaggcttcgcttcgaattttttttttctttccgaaccattgaattttgggaaaattgtaaccatgccattataattttgtaaaatttaagatatgctattctgactcatatgtcattgactcatgtgggtcctacaggtcattgagataccgatgtcatatcttaaactttaattttaaatttaaaaataaacttttcttaaaaccttcgtgtcacgccgacatgtcaaaacaatactgtcacgccagtttgaccattcaaatctagctggtttagcagcgcacgtctggtctcctccttgcttacgcatcgaccgtcgagcgtcgtctgctcccgcgaagttcttcaacgaggaacgagggaggagccactcctcacgtacgcgtcggctgtcgagcgccgcctgctcccacgaagttcttcgacgaggaacgaggaatgagccgatgtgcatggagaagacgatgctgttgggaggaaaaaaaaggcgtgcataatcaatttagttccaaatcgtgttctaacgtgtagccattgattgagaatacattttattgaatctcttttcaaaaatggtctttgagcgaaacttataatgtttgatttctccattctaaatggtgtgacaaacgtgtcactttcactatgggtacgctattttgtcacaccatataggttaacaatagtcggagattttaaagtttgaaaataagttttaaaatggttcatttttaaaattaaaatgcatttgtgttccaaggccgtgacgtcacgagcggctcacgtgccatctcatctactctatctctcacctccgcccgcctcgtcgtctctctgacaaccgtacagccgcccgccttccgctccgcgccgccgcctccgccgctgccgccgcgcgggcgtacgtgtctatggcgacgatgtctcgccgcgcactcggctctgcgttcgcgggattcacgcggacaccagctatgactccgacggccaccttgccttcctcgtgcgcgtccccggcgcgtctcctgcggtggcgccggagcgcgggtgtaggcgcccggcggttcgcgtccggccgcaacgcgcggattagcatgagcctccgcgcnnnnnnnnnnnnnnnnnnnnnnnnnnnnnnnnnnncaagtcccactcttcaatgccattgtaaggaaccttccctctgcttcttccgaagaattccgtgctgttatgaactcgtttttagctggaagcaactcgaggagaaagaaggcgatcttgattatttgtgcttttgaggagttcttctcgattcatggattggttttggtcgaggatgaagtgggtatgcggcgtcaatggaactgcgcatcaactgtttgattctttgccacacagagatgcagctctccaacgtttgactagttatgaacttatgatgcttaacttagataggactcgtcacagattttttgcactgaattttcatttccctagctgcaggagtgcttttgcagtcgtgatgattgtttgatgggaagtatagtgaatctttaacgcatgaaaatgcaactgccgtattgcacgggacatgccattcctcgcaataatgtgcatgctattgttgattacgttgtaacatgaattcttttgtcaacgttgtcaggttgaaaatgggaaggcacaagctgcaaactttcccttctgcaccataaaccccaacgttggtgttgtggctatcccagatgctcgcttgcatgtgctctcaaaattaagcaagtctaaggagacaatcccaacatccatagagcttgtggatattgcaggtctcgtcaaaggagcaagcaaaggagaggtgtttcattaatgacttcgctttatgttaggatgtcaatgtgctgttctggctgatgttgtttctgagttctgactagtttatataaccgtgatacatcagggactaggaaaccaatttctttcgaacatccgtgaggttgattccatccttcaggtcagtttcttgtcgtttttataaatcttttgccatcagatatttgtcaagttctggagactttaaccatgcatttttcgcatgcctcattccattgttcatcaagtactacatattattctgttgtatttttcatattgctaaggataactttatattattctctggtagatgttttttcaatgttcgtaaagtaccaattaagcttctatacaaaatttgaacacataatgagtgtcactttgtttttcttggcactgcaattcattatcggtattttaactttcttgtgctgtcttatgttttgcctttggggcctttgggggttttaatcgttgagttttaaggccttttcaggttgtgcgatgttttgaagatgatgatattgttcatgtgagtgggaaagttgatcccaaatcagatattgatgtaattaatctggagcttatattttctgatcttgaccaggtaattttgtaactgcattatgttatctccttgcttgctttgtggggtgaaaaaaaaacatgtatggatttaattatgtgctttcttttttgccattaacgctgacaattgtgttcgagatgcagatagagaaaagactggataagcttaaaaagagcaaaactaaagaccagcaagtaaaggtcaaggtaaggttttcaggctcttctccttattttgatggttattatagatcccaacagttctcactactcaggaacaagcagagaggactggattggaaaaaattcagactgtacttatggatggaaaacctgctagatctgttgatttggctgaccatgagaaagaagctatccaacatctttgtctactaactatgaaacctgtcatttatgttgccaacgtaactgaatctgatcttgctgaacctggtaacaaccctcatgtcaaagaggtagccaaactagcaaca

SEQ ID NO: 2196 - DNA, 705 bp, Oryza sativa
cctgcagcccgagaagaaagaaaaaataacaatagaataaccagctcaaggttgataaattcttaccaataggttttggtctcaatgtggaataggaagcggtgcaaagtatactcgatcaatgtccaaatgaatattccaaatagggccattagacctacttcctgaatagtatgacccatccgaatagatttcacaagcaaccagcagacgacaggcagccatatggttggcacagcaaaccactttgtgcgcgtcaagaactggacacaaaaagttatgttatgacagctcagtttacaaaatcctaaataataattggaatgtataatacctccaggacatcatttccgaaaaagcgtggaccttccttgctcacgataggttgatgaacccattcctgataacgttcctcaagatggccaaccttcatcaaattcacaccacaaacaaatgttactccaaatgcaaagcaactgaactagttttacttagaatccagaattttacagcgcattgctagaaaatcagaatttgacatttgagcaactgaccttatggtcagaaactaagaattgtatgcaagaagctaaaaaacaataagaaggtgagcatggcaacggtatgattttcaaggacaagtgacgcaaaaaaactattcgcaaaagaccactgatagagagcaaatcaaaacctggaaaacga

SEQ ID NO: 2197 - DNA, 661 bp, Oryza sativa
atgacatgcataccttaatgctatggctatataagccacattttttaaatagctccgtgcagtgcgcatcagatctagtgatactgttatcctccctgtccatatcaaatcatagaagtccagtacctcatattaattcccaaataagtacgatgttaaatctctcaaaaagtatacgcagtgatcagacaaaccatttgatacagtgactcaccgtttcttgcaatattctccttcagtacaaaaaatccattgggtttgagcccaatctggaagcaatattaccaatccaaacttaattagaatgcgtagagatggaatatcttaattcggattttatcactactaataataagtgcagaaacatgaatattgatatttttcattcgataaaattagaaataggctgaaaataaagactcgaagaccagaaatactacttggcatggatttagaacaaagtatcggcatccaactagcagtaaactccctcaaaataaatatagcagtgcaacagacataattatcaaggtagaagtggtagcatcattgatcaactggacaggtatttgcagatagtatatagtaacaaacaactttgtattcatgcacaagaagaagtttatctgtatcgaagggaaaaaaaagaccagtttccttc

SEQ ID NO: 2198 - DNA, 586 bp, Oryza sativa
actgattggtagcagttatgcaagcataattatgtatcatcacagttcagtcagttctccataggtattattgttcaaatcatcgtacattttgtgatcgtactcactaatcccgtttggaactgtaggtggattatggattattatcgcgggaatacttcctaattaaaaagctaaatggtatggtttattcgagaactttcttcattggcatttcatataaaacgttagttttaaaacaaaattttcaacttcctgatattcaatttgttcatttaatttgtgccctcaaataaggaaaaagtacaaattaccccccaaactatcgcggtcgtctgaattaccccctgaaccataaaaccggacattcttcacccccaactttacaaaccggacgaattacccccctcgatccaatccgcggtggttttggtctacgtggcgcacacgtggcagttcagtcagcattctatttattaaaaaaatgtgggaccaacctgtcatactcctcccactcttcccctctctctcttctctctctcactactcttcctctctctctcttctctcacgcgcacggtgagca

SEQ ID NO: 2199 - DNA, 632 bp, Oryza sativa
tattattattattattattattattattattattattatcttcttgataagtgtggagattatggataccccatatctacatgacggttgtaatttagtcggatatacagtaccaaatatagatggaatatctctatgaagactcgggttaggttctaaacttgtatgtcaaggaaatacccgggatcttagtcggttacgattgtattttatctataattccatattccgttaggatatggactgtattttgtaaagcggactccttcccctatataaggagggtccgtgtgcctcttggggggcgattcttttttccagtttatacaatcaataacatactcggcggaatcatccccggacaggagtagtgtattactttttgaacgagaaggcctgaacctgtataaaattccttgtctccaaacccatccactttcctagcttgatagccacccccttttattattgccgaaatcttgtttcgacagttggcgcgccaggtaagggtagcgtcaagtttttgccgactaagtgcgatggggttctggttctggcatcgacgacttcgcctttccttcccgggcaggcgttccggttcggcagccttaactttatcaccaaacgacttc

SEQ ID NO: 2200 - DNA, 545 bp, Oryza sativa
cacttttatccatttacaaaagctgttgctgctacggttatcccatccgggcaaatgtgtgcacacgcgttgggagaataggccttcggatccacgctgttgctgcgacgttcgcacaatcgggcgagcgatcaggtttttggggagcgcaaggcgcgactacttactgatcgccaacatttacttcatcttgaccaacatgtcgaacactggagacaaggagaaggagactcccgtgaacaccaacgtacgcaatactgcctcaaactccaggggaggaccattcttggggtataaccctattacattatttcaattagaagctttactgttaatgttcatcgcaatgtcaacattgggtcattatgtgattgttgacgcttattcaacgttaagcatgctcatgttgattacattcaccactatgactggatcaaatgctatcgaaaatatcatgattattatcttggtattttggattaaaatatgccgaattatgaccaagatttcaacattaataccatgatcaacggcgtatacattgt

SEQ ID NO: 2201 - DNA, 550 bp, Oryza sativa
tggtaatccagaatcgacttaacatctgcccagaatacatttgtcaactggtcatcttcatccacttggatggcataaaagaaagaaggatgttcacctttcttcctctgcaaatattcataaattgcctgggtatcacctaattgcatatcttttgtgtgccttgtccttacataatttttataatcatttggtatcaaaacaactcttggtggatctggaggctgctgtaactttgctaataacttatgtgatctcagaacctggatgtccaccaaaggagtttcaagatcatgattatgatcagccacatactcagtcactacatatttgccactcacagtgattttaatagtcatgtgtgccagacaaccagttcttgtttctggccgtggcttcttgggatcagtactgacacttttagagcggaatccctctttagaacagacatatgcccgagattttgtagtatttgttgctgttttttccaaccatccttttcggacgctgaaccccacagttccagcataggtgacatagcagtcatagg

SEQ ID NO: 2202 - DNA, 1324 bp, Oryza sativa
acacacaaacttccaactttttcgtcgcatcgttcaaatttcaatcaaactttcaattttggcgtgaactaaacacacccaatgttatactatggcctggttcagttcccaactttttcttcaaacttctaattttttcatcacatcaaaactttcctacacacacaaactttcaacttttccgttacatcgttccaatttcaatcaaactttcaattttagtgtgaactaaacacacccttatgtgaggatgcacaaagatgagtaagggggtgtttagatccaggggtgtaaagttttggcgtgttacatcggatattgtatagggtgtcgcatggggtgttcgggcattaataaaaaaactaattacagaatccgtcagtaaacagcgaacgaatttattaagcctaattaatccatcattaacaaatatttactgtagtaccacattgtcaaatcatggaccaattaggcttaaaagattcgtttcgcaaattagtcgcaatctgtgtaattagttattttttagcctatactaatcttttatgcaggtgttcaaatgttcgatgtgacaaggtgtaaaatttttgtgtgggacctaacagggcctaataagattgatcagtgccatgtcatctggcctattgtggaggcttggtggagtattaaaaatgggatgaggagggttcccagaatgtctcagttttcaccatgtggtgttaaatgctgttgaattctcaactgagaattattgacattgttggagtgtcaattcttcccttaaatatagcattgtatactttgtttgtcaagaagcttgcgttgatgatttaggagtcgtttaagatcagcaagaaggaaccgagaaggagcgtgtgatacacattcagctccacatttatagccgaagcttctgcaggactgcaacatcgctcttgccatgatgataatagtagcagataacatcagaacagcacaaaacaattgctgtcaagtcgcgattagtttgtcacaggtcaaaatgctgttgctaatgcagttgatcatctaacaatgtgctaattatgagttctgaccactctacgatgtgacagtgtggttgaccttggattgccagaggttgatgagtgatggatttatgagtttatcctattactacaagtcagttttgctgaggtgaaagtgaaacaatctgaatgaagaagggacaggttacagtacttggcaacttagctatgctcagagtaattgtatcatcatcttgatgtaattaaagctcaataaaaaaattctattatataaaaaaacagtacttggcgacctc

SEQ ID NO: 2203 - DNA, 30172 bp, Oryza sativa
aatcatatggcacaacatttgttagaatatagttttttcttttttacatgatgcaatcctttgagttataatttacatgatctggaccagctattaaatccatgcacatcctttttcattcatgtcttctttggaagagtatttggttgactccaaattaccaggaataatacttggtttactataaattgcattattgttttctacagacgtactaagcactagcaaattctacttttcagcttttagccatctacgagcaccggattgcagtccagggtttcctatggggaataaactcatttgaccagtggggagtggaactgggcaaggttagtgcttgaatatttatacatatatttccattttgtttgaaggtctagtttttggcttcaattctagcatgtgtgactctcaactttccccaggcatatgtttgtcttattttcttcatctgaagactgaactgtgttgtctgtatttttttttcgtgtcagtctcttgcctctcaagtgagaaaatctctacatgcatcccgcgttgaaggaaagcctgtcctggggtttaacagcagtactacaagtttgctgacacgatatcttgctgtacgttctttgatagttcatcataatttattatccatgttatataattaaatttagtttcctaagtgttcttgacagctcataccctagaactgagggatttatgttgtaatttaatctgttttgtaggttgagccatccactccttacaacactaccacactgccgaaagtttgacacgacacgtttggcacgctattgtcttgagttaaacaagattactagagtcttcatatcttgtaataagtttaagttcgttttggagttgttacaggcttacagccagttctacagtactgtagtttcgttgttttcctttactccgacctccaggaaacgaaatggaaaagaaaaaaaaaggaaactgttgttgaataaataaatcaagtcgtgtcagcatgaggaagctgtcattaaataaattaggtgaaaccccgcgcattgctgcgagaatttagtatgaagatatacattaaaacattatgtaaattatgttggatgataatttaatatgtttgtgtttgaaaagctcttaaattataaaaactataaagatatagcatgtttgcatgatgtttaaatgtgatgattgttagtggatgatgatgtgacatctttgcatgaagatatacattgaaatattatgtgaattatgttggatgataatttaacatgtttgtatttgaaaagctcttaaattataaacactataaagatatagcatgtttgcatgatgtttaaatgtaatgattgttagtggatgatgatgtgacatcttgttaattagtggatgatgatgtggcatcttgttagtggatgatgatgtagcatctttgtatgttaagtttaaggagttcgtagaggataacttttatagtaagataggatactactactgtttggcttgaaaagcttgtttgtgtgtttacacattttggttgggagaaattttacagtttggagagtaaccaaattttaaactggtaccttctcgatgaccgtattatctgtgtatgctgccacttacacttattttgctactgctatattcaggcgaatgtctcgagaatttgaccatcacacactgtcagtcatttgaacaacctgaaacaaaattcagttctgtattctgttagcccttcactagggctgagtttagttctaaaatttttcttcaaactttcaacttttccatcacatcaaaattttactacacacacaaacttctaacttttctgtcacatcgttctaatttctaccaaacttttaattttgacgtgaactaaacacaccctagattttgtttctcattcaaaatctgcaagcagatttatcgattctttcatttaatggaacaatcaaaccatttcctcctctttctatatccaacaatatttccaataaaaattgggcacactttgtgttagttgacttcccacaccacacatggccaccccaagtgatacccagcaactcagaagctgctgctacctgctcacccggtgcggaggctgcttccactccgcgctcatctcgccggagaaagacacatcgtctcgccggccggactccagcctcgccgccgtcgcctcctgaatgatccggtccatgtcgaacgtgtacgacccggaagcctcgctgatgctgcccccggtctccgccgtgccgaacaccatgctctgccccggccgcatcccctcgttcaggtcctccagcgacatgtccccctccagcgccctcacgatctgcaccgattttcatctccggtgagccctgcacggctggcggcggcgccgccggcgccggagacgatggtcatgacacatggcattgacatacctggctcatcttggggcgcttcttcgccgagtggcggacggacgcggcggcgctggcgacgacgcgcgccatctccaccgcgtcgtagctgccctccagcctcgggtcggcgacgccgccgtagtcgccgtcggccagcgcgcgcgccatggccggccgcgcccactcgacgaggctgtcgtcctccatgaaggaggcgggccaggggtggtcggcggcgccggcgtcgatgggccgccgccccgtcacgagctccagcagcatcacgccgtaggagaacacgtccgacttctccgtcagcttcccgctcgacgcgtactccggcgccaggtacccgaacgtccccatcacgcgcgtcgacacgtgcgtgttgttgtctgacgtcagcttcgccagcccgaaatccgccacctgaaatgacacaaaccatcagataatcggatgccgcaatttgaaatgcagcaatttttttttaaaagaaaggaaaatctgcagcaatttgaaatgttacctttgcttcgaagttgttgtcgaggaggatgttggcggatttgatgtcgcggtggatgatccgaggatggccttcatggtcaaaatggcaaatgcaatttcaattcagatatgaaaaatcgtagacatttttaaacatcaaatttattggagcaatggtgctcacagtcttcgtgtaggtaggcgagccccttcgccgacccgagcgcaatgcgcagcctcgtcggccatggcatcaccggcaagcctttccctgaaccaacaagaattggatgtttcttgatcttgcggcgaggtgagggaggcagcaatggcgtggtaagctagagtgatcgagtgactgaccatggaggtggaactcgagggtcttgtttgggacgaactcgtagacgagcacgcggcgcgcgccggcgatgcagtagccgacgagggagacgaggtggcggtggtgcacccggctgatgatgtccacctcggcctggaactcgcgctccccctggccgctgccggacttgagctgcttcacggccaccgccttgccgccggcgagcacccccttgtgcacgtacccgaacccgccctgcccgaccaggttctcctccgcgaagccccccgtcgccgccgcgagctgctcgtaggtgaacgtccccttgctcatccccgccgcgtcgctcgtcgacggcgccgcgcggggctcggccagccatggcggcggtggcggcggcttcggcccgctggtgtcgcggccgccgccgcctttggatcccgaggtgtccgcgtcgaaatgcgtgacggggttgtgaggcttcttcttcctcttcctcctcggcgccgtcttcctcgagcagcaaaggcaggcggcgacgaggagcacgaggagcgcggcgggcccgacggcggcgaagacgatctcgaccatggcgttgtaccccccgcggcgcgcggaggcgagcgccgacctggcgacgtcctccgagccggagccgccaccggaggagcgagacggcggggaggggaccctgtccggcgacggcgggggtgcgccgccgccgccgccatgtggattcgacggcgccggtggaggcgagacggatggcgccggggaggaggacgaggacgaattggtgggcgacggcgaagcggccataagaggagggctgcttttcggcggcgggacgatcgacatggccccgcgatcacaaatccgtctcgccgggcgttgatatcgtgctccgccgcaccgccataggctcaccggcgaggaggaggaggaggaagggaggggtaggtactcagcggccgcgttcctgggtggcggtggcggcgcccggcgctgtcgtttccatgcggccgccattgggggggggggggggggggagtgtctctggttggtgtttggttacctcatccgcactgatcagcccgtgactttgacttgtgaggctgccatcgcaggaatgccaccgtggacatcccaatacctctccctccgtaaatcgtactactagtggagtatctcgcatgccatggcgtaaatatttcgcacgtgatggaatgctcagcctcagctccatgcttgttacttactactctctccatcatagttatattttatcttggcacacagaacaagaataagtaattctacttatcatccatttaaacatactactagtcattcctcgtaaacaagcgattcattgatatttatcatccatttaaacatactactagtcattcctcgtaaacaagcgattcattgatatttacgtttcttgatacctatgtagccaatcttgtgtggaagaatggaaagttatgcattaaatccgagaaagtcattaagatgataggttgttgaagtgaaatatgcctatcaaaaataaaattttcagatttgaaaatatgactatcaaaagtagatggagggagtaacttttttttaggttgttttcaatatttttaatgaaaatattaggagctctctaggattgtttttaaatacttctttctattaatgaaaattaggagaagatcaagattacttactattttgttagagaaactagaggattgcccccgcgcagtttctcttagctcctattttttgagactttagatttaaaaagacgcaaatattaaggaataacctaactttgaatttaaaaagatgcgaatattagggaaagacctaatatcaaataattaaaaggggtaagacttcgaacccatatcgtctagcccaccaccttgtggagctaaccaaaagacccgtggccggaaaaccaccttgtggatttcatgtataactcttaaattatatttctataatccttggattttatatacaactcttagtttctattcctataataccgagatttcatatacaactctcaatttatatttctataaatataattgtattttatacaactatatcaatcaatttataccgttataatctcaaattacaatagttcaatggttaagacctttttttatttttccccaattaatgtggaatttatagcctccacaaaaacatggtgcgtgctatattaataatacaatagataagttaattttaaaagaagttaggtgtatgactttctacttaaagtacggtgtatgactttctacggatatgtgttttttacattaatggacgttttgcggttgtgtttttatctttcttttttctgttcattataaggttaaaaaaattacctccatcccatgaaaaataattttttaggatattaaggacatatattaggaggatagacaaataaccacaataactttatttaatgaaaacaatacatgcacacatttcatatataaacttaattaaaaggaaggttgagacaacgtattagagatgagatggaagaaagggaaattacaaggaaacatatttaatgtaatcaatttgccaggtgctacattaataaaaatacaatttttatgagataaagattcaaaggtagaaattaacttttaggacgaaggaaggtagaaatttaacttttataggacggtagtactttatattgttgatatcacgataaagtcaatcaccctgatttgatactaagttataacatcacggtatctacatttgaaacaattaagaagcccctgatttgatcgaggaaagactcacaccatcgtaagcgcatgaaaaaaaaattgaatatgcattttgctattagcacaagtaataaagcatatacggaaagatgaaccatatataatcgtaaatctgatgatccaattccttaacgacgagacaatactaccgaatacaaaatcataatcataaacataatagttcaaaacttcaaatcgactactgatatgaaagtgctgaaatccaattatccaaactaattaaataactgccaatagtaatacgattgtttcgatcgagccaataactagctagactagtagaaatacgaagcaagaagaaacgagtagaggatcatgcacgaggaggagaacaggtaggctatggcgaagtccgccatgtccgccgcgctcggctccgagccacgccgtcgctccgtggccaccttggttcgagcttctgcggcggcgttggtggtagcaggcggcggctgggtgcgagcctcgagggcggcggactgccccgagccatggcggcgatcggccggcggcggctgggatggagcttctgcggcggtggcggctttgatggtggcgtggaacgcctcggcgcgcctgcgagcttcgtaggcggcatggtgtgatgcttcttcctcctccccgacctcccgaatcaccatgcacctgctaccgccgccgtgcgccgtgtccttcttcccgccggagtcgctcgccgttgctttcatcgctgctgctgctgctgctgctgctgctgctgcagcagctgctgcagtaagcacatggacaggctcgtcgttgatcaccaccacggacttgtcgacttcgccggacgttcttgcatcgagcggcggcggagaagtcgccgccggtgaaaccatcactgcggggggagtcggtggcgcgtcgccagatttgctcttgtgctcgtcgatgaccggtctgtacctccagggcagtctcggcgcccgggaggtccttcgtcgcggcggcggcggattagtagccctcgatgcagccacaactgcaggagtaggaggcgatctgatgctgctctcatgctcgccgtcgacttcgctcgtagtcggcggcggcggcggagcggctgatactgtcgtcaatggtggcacttcaacgacggagatgacatcagcggccgcgccgccgtcgtcgacatgcgacctggccgtgtggtcgaccacgtcggtgacatcaacgacggcgatgccatcgtcggtgctcgtgctgccgtcgtcgacgtgcgccgtggccgtgtggtcgaccacgtcagtgacttcaacgacggcgatgccatcgtcagtgctcgcgctgccgtcgtcgacatcggccgtgtgctcggccacgtcggtgacttcaacgacggagttgtcatcagtagccgcgccgccgtcgtcgacatgcgccatgtccgcgttgtcgaccacgtcggtgacttcaacgacggagatgtcatcagtggtcgcgccgccgccatcgacatccgccgtgtgctcgcccacgtcggtgacatcaacgacggagtcgtcatcagtagtcgcgccgccgtcgtcaacatgcgccatgtccgtgttgtcgaccacgtctgtgacttcaacgacggagttgtcatcagtggtcgcgccgccatcgtctacatccgccgattgctcggccacgtcggtgacatcaacgacggagatgtcatcggtagtcgcgccgccgccgtcgacgtccgccgtgtgctcgaccacgtcgccgtcgcagatcacaacgccggcgttaccgatctcgcagctggtgtcctcttggctcgcggcgtcgatggagcgctcagttgttgcctcgatctccgaagctgccggcctctgcttgatctcatcccctcctccgatcgagagcgcctcgccataggagtacctaacctccttcacgaacttcggaggcgctggtggcgccgccgccgccgccgccgccacgacggctcctagaggcccgtcatagaatagcggcggtggcggcgcgccgccatcgacgccgccgccgccgccgaagtgggagacgagggggcgtgacctggccatgtagttgtagacatcggaggcggcggtgtcgatatcgtcggaggaggcggtgccgtcgctgtcgtagctgccgtcgaggaccaccgccgccgtgttgctctcgccgtcgctgaggatgacccactcgtccatggcggcggctggcctcttcgccatctagggttcgtgccggctctctttgctgctgatgatcaggagaacatgtataagcccttcacgagtcctctcttgttacgttccttgattcttgcgtttagttagcgtaagttgcgatcttatctaccaaatcccctacaaatcgcgcatttaaacttgtgcataactctgattgggatgtgggccacgtttggctgggcccagtttcagtgagttgggtttttactggcgccgtattgcctcgttgatatcaccgtatgtaaactatttttctttctttttaaacgttattattaatatagtagtattacattgccaatgattctatttttgctttttataaactttcattgccaaaataagactagtaaatataatggaatatcaacccctgttttcatcgattgaatctcgaccaaatttattccgactaaacccaattggaggattttgttcgtacttactacatatatacaacttgagaaatttcaagaaaaaaacaggcaaattaggagtaacaaacatataccatcagtcaatcacgatcgatcatatgattcatatcatatcgtatataccatatataataaaagaacatgataaaatactatacattgatatttgcagtactaaaccacaaactttattagcatcactccctaataaatccctaattctaattcaatgcgcagattcgcagaagaaggtacacgacaccaaagagcaggtagaagactgcaagcgaaaccaccccgtcttggcgtgcgagcgtatcagggaggaaggccgccgcagtcgccgccgccgcgttgctcgcgctaacgtcaacgccaacggcgaagctgggcgcggccgccatggcgcgcaggctcgtggctccctgcgacagcgcctccacgtcgtgcgccgccagcccgccggcggcggcccgcatgtacgaatcgatcacgtcggccgccctcaccatcgcctctgcagcctggtcccgcgccgccgcttgttgcatcgcctgccggaactgcgacggcgtggacgccggctcggccgtcgccgccgcgctattctcgcctgccatgtcggcgctgttgccgtgcgcctcgccatcgccggcgtcgggagcagtgtcgtggtcgctctcaccggcgtcagagggctcctccccgtcaacgccgcttgcgtcgccaccgatctcctctccgagctgcgtggcatcgaactcgtctccggtgagctgatagaactcctcgccgtcgatgagctccatgcagcggccacagacgcatacgtgctcgcactcctcgtcgctggagctttcagtttcatcgtcgtagagcgtgtcgccatagaagaaatccaggaactcatcgctcaagccatggaagaaatccatgacctcatcgtccaagacgctttcctcctcaccaaagttttcattgtcaatgccaccatcggcgagaacctgcaggtactcctcgaagtcgtcgccgttaaggctttcgtagtcgatgtcatcgtagccgccaccggcgaactcctcgggctcctcctcatcatcactctgctcgtcggagacgctctcctcctcatacaagctctcactgtcaatgtcgtcgtacttgccgccgtcgatctccatgtcagagtcggtgtcgatgtcgtcgtaacttacagggacaccggtgaactccggccactcctcttcagcatagctctgctccatgcagacgctctcctcctcaccgaagctttcgttgtcaatggcgtcgtacttattaccaccgggctcctcctcctcctcctcatcgatctcctcgtcacaatcgctctcctcctcgtcgtcaatctcctcgtcagaatagctgtcctcctcgtcgtcgctctcctcctcgtcagagcttccggtgtccacgtattcatcgtcgaagatttcatcgtccaggttctccgcgcagattatgtcctcttcatcaaagcattcagagccatcgtcgtcgaggctctcatcatcatcatcatctaggtcctcctcgtcatgggaagattcagtgtcatcgtcaccgaacaggccactagcgaaacccatgagctcatcatccaggttaatgtcctcctcaacagattcatcgtcaatctcctcatcatcgatctcctcctcgtaatcgctctcctcgtcagtgctttcagtatcttcgtcagaatcgctctccaagtcagtggtatcctcctcctcgtaatcgctctcctcgtccgtgctttctgtatactcatcggaatcggtctccaagtcagagcttccagtgtcgtcctcctcgggatcgctctcctcctcatcgtcgtcgaagatttcgtcatcggggttctcctcgcagattccgtcgtcctcatcaaaacattcaatgtcaccgtcggtctcatcatccaagtcctcctcgccggagaaggtcgtgtcctcggcggcggcgatgttggagtcgacgtggtcattgttgctctctgccacgtcagatatctcggcgttctcgtgctcacctccggcgatcgccggagacacctcggtaatgtcctcctcgtcctcttcggctgcgtcgagcaccggagcgtgagaagaagctgcgacgagctcggaagctattcccgagaacgcctggcggtacgagacggtcttaaagaaccccggcggcgaaggcgaaggttgcagtggcacggcctccacggcgatcgtcgtgtgcggcagcgccgccggcgtgtcggcgccgacgaccgcagcggcacggccgcggacctacacgaccgcgaagccgctctcgctgtcggagccgccgacgtcgctgccgtcgtggagctccacgctgtcgccgtcgctgtcgctgagaacgacccagtcctccatggccggcgctgcgctctcctcctcctcagcggcggctgctgcgtgcgtgagcctgagttctcggctgcggcgctcgtgcgtagatcgaagtatcgaaccgatcgtggtgaactctggttggtggggtggtgatcaggtttcgctgtgaggttcaaggcggcgaggagcgctgcgtatatagggggtggatacgggtgtaggattcgaactcgatcggcgctgtgtgcagatgtccgtttcagtttcagaagaaagaatccgagttgatacggaatttcgtcgttgggaacaccgcaacaacatgagccgtgagcgtgagtcggagttgggatcgttttcctgtgaggctgtgaccgtgactgacatctccttttccttgagtattactccagtttaaggacttgtaacttgtttgtgttttggggatattcgtttcgtgttgaccgtgactgcaagttgtgggaagcgcaggatttttatttaaaaatataagtttagttttccatcattaatttgccttttaagcttatgaccgaagctaagtttattaaaataaattacccaagtaacctataccactattgcttcaggtacagaaactgaagaactgagtcttggttagcagttctgattgtgtttgcttatgatattactgtgttaaaaaatacaataaacattccagttttggagacggcggcgatgccaccgtctagcacctggtcggaggcaacatggacgggcaagggctagcaggattgaccacagtcatgcattaatctcatgaggacatggaacgaagaggaagaagagactatttgcactgagattcgtactggacatgtgtcacggaaagaagcgcggtctttcagatgagtaaaggactggagtcctgtgcaaaggctagcttgggaataccatgccccaatggttgtatcatggtgagcccacagttacctttattttctcccctcccctttactttttctcggcaattgtcggctaatggcagttaagataagtgcaatgacacggcagcattacttgcagggaaagctctggtaaaagcatagacttatacacactcggtacacatccatattgtcgtttcgagtttgaactaaatcatgcaatttaacgagcatccacaagacaaaggccgaattaagttctaaacctttttcttcaaactttcaactttttcatcacatcaaaactttcctacacacacaaactttcaacttttgcgtcacatcgttccattgaacgtcacattgtttcaatttcaatcaaactttaaattttgacgtcaactaacacacccaaaaacaaagaaaaaaaagtgacaaagtagctattcattctcccactgttaaagtatagatcaactcaactggcaagtacctcacccaaaaactatttgaaaaacatatattgaactggggaaaaagctcatctgatgattaatatacacaatttattgcagcttgcgagttaaatttctcaaaatggaacttcacatccacaaacttactcttagatcgagtgattgatcgccatgcattgcagtaagattcgctaagatgacgatgccattgccacttcatggatcagccggcggcttcgcgagcggcggctcggccgcgagagcggcgggcgcgatcagcgcgagggtgttgatgtgcgcagcgtgctccgcgccgtcccatgccgcgtcgacctcgtccggcacggcgacctcgcgccgccgccgcgtccgcgcgtcgaacgccaccaggcgcctccctgccagcaccaccacctccacctccgcgccctggaaacccagcagccgcaccccgtcgtccagccggagtggtgcattcgccgcggcgacaacagcgcgcgagccctcctcctcctccgcgccggactcgtcgtgctgctgggacgccacgatctccgtggacgtcgtcgcccttgccggcggcggcggctgagatggttgcagtatctctgcgacggcgaccctggtggtcacctcccagattccgtgctcgtgcagccggaacaccaccacgtcgccgccgtcgatcacggcgcagtggagcatgcccgcggccaatccgatctcccactggtcactgtcgccggggcaggtcacgaggtcgacgcgccccgtgacaggggtgtaccccaccgcggtgccgatgctcgtccgccaccacgccgtggcgccggccgccacgcccgacgcggcgacgagcccttcggctggcgacatcgcgtcggtgacccaccacgcgccggtcccggacgtgaacacctggaagcagtaggcgccggaagaacccggctccgactcgaaggggcagacgagcgtgaagtcgccgcggaagttgtaggcgctcgtgtcgaagaggacgacgatcgccgggcgcggccaggaccgccacggcggggacgggacggccgtccacgacgccgtagccgggttgcacacggcgtacgcgtcgtcggcgggggagaagcagcaggcgaccccgcgcgacgacgacagcacgacgagctccgacgaggccggcacgaacgagagcgacggggacggcacggcgtcgtcgtcgccgtcgaaggggaggaaccccgctgatgggacgaacaccccggagacccgcctcggggcggccgcgtgcgcgacggcgaagagcggggacgacatgtggctcgcccacgacgggtgcacgacgcggaggcgcgccgccgccgccggcgggaggtgcacgagcgagttctccctgaccacgtcggcgagcggcaccccgacgaatcgctcgaccgccgcagcccgctcccgccgccgccgctgccgcgacgcctcgcgggactctgcttcgccggacatggcctcctcgacccgctcggacgctggtggtcgtgggggaagtggacggcttgatgtgggaattgcacggtggtttcgtggtatcgttgtcgtcgtggtcgtcgtcgtggtcgaggcgtgtaagctatcgatgggttcgcgagtgggggcacggccggtgcgcgacttcgtcgtccacgcccgcttgactcgtgcgagaggtcaatctctaaacctgcacgtacgtactacgtaaattccggtgtgttttaggttgatgaagcgccggtttgcgcggccggcccggcactgagccacccgtgattttagatgtaaacagcgataaattttggaaatttaggtgatcgatatatacgatacgtgcaccgtctggtttctttattcacgaaattatctcataaggaaacagccgttcgagagtatctcgcatcgcacacggccgctagataaatccccgatctcgtgtaataatggtataggctgtgtttagatctatgtgaaaagatttggtgtgccatatctgatttacggacacacatttgaagtattatatgtagactaacaacaaaacaaattacagatttctcctgtaaactgcgagatgaatttattaagcttaattaatccatcattagcaaattaatgtttacttagcgcctcattgttagatcatgaagcaattaggctttaaaaattcgtctcgtaatttacacgtaatctgtataattagttttttttgctatactagaaaaaaaatatccgtgcgttgcgacaggtaaagactatttcaatcttattattattgttatatgagttagttagggtgaattcactctgttaaattcgcttggatatatattttgttagaaaataatgagctgcaactaaaagtttgattgttttaagttagtatgcgagtttttcttaaagagatttcttatagattccttctatatttccaaaaaagaataaacttaaaaatcgacacaaatacggatttgtatttccaaaagcgaacgaacttaaaaaccgattcatacacgaatgatgtaccaaaataccggcaaaaacatcttcaattttcaatttttataatagtagagatagagatttaatgtttcatgcatatgtctaagagagatgctctggtgcaatatacttgaattattctgcttcgagtagaattaatcttaagggaaaaatttttgctaggatctaaacaggcccatagacttctttatatttgttaccttcaaactcttttcctaataatcactactagtacaaacaggtaacctgtcagcctgcagtcgatcagcaatcgtgtaccacgctcgatcacacggatggcgtcgacgatcctcccggacgatctcatgcctgagatcgccgtacgctcagacattgtgtccatagttcgttgcgccgccacctgcaagtcgctccgcggccgcatcctggaggaggaattctgccgccggcacaacaacgccgcgaccagtctcctccgcggcgtctcctacaggttccgctgtgatcttaacacctttgtgggcgtaacacaggccgcgtcgtcaccatcgtcctcgcctctcccccgcttcgacgccggtatcctcaacactttcgagcccatggtgtcgcgcgacggcctcgtcgtcgtcctcgaggactacgtctacgccggccccgaccgtttcaacatgtgcgtctgcaacaccatcaccggcgacgtcacctctctccctgccatggatcctgccatgaaagtcaagagaaggttgatctacccgccggcgttgctcgacgtcggcgacgccggccgctcgttcgagctgctcgtcgcggacaacgagctgcacacacagacattcacattctcgtccaaggacggcggcggcggatggggcgccgcccgtacgatccgcatggacgccggccaccggaagccctccatcccgatgccgtttcaccacgttcccggccgtcgtcgggcgcgccgtgcactggctcgccggcacggagcggtactgggagctccaagcccacggcgtggtcatcttctccctgcgcgtcgacgcggcgtgcgccgcgacgatggagctaccgccgggctccgccgacaagatgctgggctgcaggaaggacagccatcagctcatgctcgccgcgtcgcggggcggcacggcgttgagcctggtcgtggcggagcgcgagctgatctcggtgtggacgttggaggaagaatcatcggcggcggcgacgacaacggcggcgaggtggagccggcaggtggtgatcacgaggctggcgatcgaccggagcgcggaagccgcgagaatgtacagcacgtcttcttcgaggggttcggggagaggagcggtgtcgtgctcttgcgcttgcatcgttttgggctcgtgcagctcaacctggcgacgaaagaggcgctcgttgtgcgccgcgttagcacgaggtggtcgggctccatctccagggcacgcttgcacgaggtggatctgtactctttgctccgagccatgaaacacttcgatcttgcgcctggcagagaatgaattcaactcttttctgaacatcctagtagcaaaataatatgaatttttaaagaaattttctgattagttattaattatcgcttgttcggaaatcaggacagcactatcaagtatacaactcttttataaacctcctagcaaaagaatgatttttatttctttttatataagtagaatttgaacttgcatacttaaatggtatataacatattaatctattatattatttttttaaaaaaaatatagactgtttaggccctgttcagatcctccaaaatagcaaaagttttgccattttatagcactttttgccattttggatataaacactagtagcaaaagttgacaatttggcatttggcatttgctagtacatagtagcaaattgtgccaaaaagtgctttgggaccgctccctctctctttttctctctcactttagtgctagaatggcaaaactttaacatgcatctaaacaccaactaggacttttacaatgccaaaatttttaccaccaaaacttttgccatttaccattctaaatggatctaaacagacccttagatgatacatgaaaatgagagaatattcgctcgagagaggaatagactttccctagctagatatacttttataggttggtcaaaagatcttacagccacaaaaatcgctgacatgttgaaaaaaagggatcgactgacaaatagcaaaactgtactctgtttttttaattaattataacgttcttgatatttttaaagatatgtttaatcattcgtcttatttaaaatattatttaattattatttatcttattatgatttgatttattatcaaatatttttaagcatgatttaaataattttgtatttgtaaaaagttttgaataaaacggactgtcatataataattgtagaaaagtcaatgatgtcactattaaaagacgaatgctgtagtatttattgtttttgaaattccttggacttaacgaaaccatcgttcggtatagtgtaagctgtatttatcagcctttacaaaccatagaccaaattatgtttcattgcttgattattttggcctagtcaaactcatgtgtatatctgttctgaagttatgaaacaaagagacttacttttggatcctatactagactttcagtaatttagcagtgcagtaaagaattcgtaccatatatagttatccttctattttatgatttctaactcactttcatattataagtcctgttgatatttttcttaatcaagttttttttaagttcgagcaagttttaaaaagaattagcaatatctaccgcactaaattagtttcattaaaactaacgtttaatttattttaataatatgcttgttttgggttgagaatgtttctatattattctataaactttgtcaaactttttagaaaaaaaatcaaaacagtttttaatacgaaacggttgctactctctccgttccatattacatacaagtcgttaggactttttcttcaaactaagtcaaattttgatcgaagttatagaaaaattaatatcgtaacattttaaaccctaaataaatatactatcaaaatatatttaatggtacattaaatttactagtttggtgttataaaagttattatatttttatataaacttgatcaaaatttgatcaagaaaaaaatcaagtgttttgtaatacgaaacgaaaaaggtgttaatctgttttcctattcaccaaatccgcgatttataccaactgacaaaaaaaacaaccattctctatgaagtatcgcgtcacggccgggaaagcaattcccgagcttgttaccttcacgactcatttaatttcctcatactaatacaaatgcgtcatataaaacggctggatttccatcttcttctttgtttcttcaccatcaacaattgtgtcttctggtgaaggaccatccacctgaaatactccctccgttttttaataaatgacgccgttaactttttctcacatgtttgaccattcgtcttattaaaaaaatttacgtaattataatttattttgttatgagttgttttatcactcacaatactttaagtgtgatttatatcttatacatttgaaaaaaaattttgaataagacgaatggtcaaacatgtgagaaaaagtcaacaacgtcatctattaaaaaacggaggtagtacaatcttgtcgcaatggttcactgggctgctgtagccgtgggttatgcttcaacaactcccggatttgtcacaaacatcgccggcgttgctccgagagacaggttgatcaatctgatctaacactaatattgataaagtagctaattgatgcggcctcctaagaaaattataggattgatctcatctctccggggatgtatcaagcaacgttagtctaaggctctaatatatctatctctactattataaaaattaaaaatgtttttaccggtactttggtacgtcatctgtgtatgagtcggtttttaagttcattcgcatttagaaatacagaaagaatcgtataagaaaccttttgaaaaaactcgcatgctaatttgagaggatcatatttctaattaaaacttatgattttctagaaaaatatatattcaaacgaattatcaaagtgaatttcaccttaacttataataataacaagattaaaataatctttacccatttcaacgcacggatattttttctagtaatgtaaaaagatatattattctattatattgtattaaccctctcaatagatatatacagagtacaatacaagttatgatagaatttatctctacaactatatcttatctttatctctagaactccatttatttttaattttgtaattcaactattacgtctaaacgtacatatatttacttctaacgcacgtactactggcagacgctcgtatcttaaaatccagttaagctagcgtgtatggattcgagttcaacgctcccggacgatgtgctgctcgagatcttcgtgcgctccgacgctgcatccatagtccgctccgccgccacctgcaagtcgctccgccgccgcatccttcaccagcaattccgccaccggcaccgcgccggcaacggcaacgccagcctcctcctcggcgtctcctacaggctccgcaccgatcttaataccttcgtgggcgttacgtcgtcgtcctcgccgctccgcttcaatgccagcctcctggagtcgttcgagcccatggcctcgcgcgacggcctcctcgtcctcaagcagcgcgtcgccaacaatgccggcgacggcggcgagcaccgcagcaacggcttctttttcaaggggaggagctacagtttcaatgtgtgcgtctgcagcatcttcaccggcggcggcgacgtcaccacgttcctccctcccatggatcctgccatgcatgtcaacatggagagccacaagaacatctacccgccggcgttgctcgccgtgggcgccgccggcggcggcggcggccggtcgtcgttcgagctgcttgtcatggactgcaacctgcgaacccagacgttctcgtcggagaaaggaggatggaacgccgtccgcgcggctcacctggcacccggccaccaccagcggcggccgcggatgccggtgcccaactcgctccccgccatcgtcgggcgcgccgtgcactggctcggtgtcgcgagcgactactggcaagacggcgcctactgttgagtttgttatttcagctgtggccccaacgtgttcctggtgattgcagttgcaacggttgaaggaataagtctgtgtttgttagcagatgcaaatgatgcggtgatcgagtcagaagaagaccgcgtcggtagcgttcgtgtgcgtgagtttagcgcgggtgcgtgagtcgtcgaattcagagaaaagcggatcgtgggatggcacgatttgagcctcggattctttcttttgtgtggaatttaagtaggagttttttgtactgttattctagttgcatgttactctgttcagtgaatgaaaaccacagaaaattagccccacaaatttcctatctgctattgttttctgaaacttctcaatttcctgtgttcttgttctgctctgtattcctctgaatctcgttcgttgccgtgctggattgctgcagtacgcacgcaaggtgttcgatcgagggtctagcgctaacaagtggtatcagagcaatcaggtttgagggctaatttgacaccatggcgttggttctggcaacatcggatccggcgagggggagctcggggagcgctttcctgtatccacaactcacagccaccaactacactagttgggtgatccgtgtccaggcgatgatggaggaccagggtgtgtgggaggcgattgaaccggcggccggggcggccgtcgaccctcggaaggacaagaaagcgaagtcgcacctactgcagtcgctgccagaggatctcctcatgcaggtggcgaagaaacggtcggcgaaggaagtatgggattgtctcaagacaagattcgtgggtgctgattgagtgcgtgacgcgcggctgcagacgctgaagggcaaatttggcgccatggtgatggagccgggggaaaccctggatcagtacgcaggccgcatcaccgcgatgagcgtgcgccactcggtgttgggctcgacgttgaccgatgccgcgatggtgaagaagttgttcgacacggtgccagagaaattcgtcagccttgtcgcaggtattgagcagttttataatgttgatgacatgccatttgaggaggctgtgggccggcttaaggcttacgaggagcgggtgcgtaagaagaaggcagcagccggcggagtcaccgcgacgggcaggttcttctcactcaggctgagtgggaggcgcggtttaagaaggatggcggggagtcatcgtcgcctcagaaagggaaagcttccggcgagggagctaaaggcggccagagcggtcgcgaacgcgggcgaggccgtggtgcgggtgggcgcggtggcgctgctcgcggcaactctgcaagtggctcaggcggcggtggccgtgacaagagccacatcaaatgcttcaactgcgaggagtatggtcactattccaaccagtgtccgcacccgaagaagaagaaaggagaagcacacttggcccaggccgaggacgctggcgccgtgctgttgcttcgggtgaccgaggacgcgccggcgcgagcgacacaggagatggttgtgccccaaggatggtgtgtggcccaaagttgctgctggctgatagtggcgcaatggctggaaacgtctggtatttggacaatggcgctagcaaccacatgaccggagatcgcaagaaatttagggagctggatgaatcaatccccggcagcgtcaggtttggggatgcatcatcggtgcagataaaagggaagggatctattctcttttcttgcaagaatggtgaccagtggcttctccaggatgtgtactacattcctagcctctgttgcaacatggtgagcttggggcaactcactgaaacagggcatcgagtggtgatggacgaggatgtcctcgaggtgttcgacaagtgtccttggcgactggtgatgaaggtgaggcgtacgtcgaatcgtctctaccggatcgagctcaaccttgcccatccggtgtccctgctgtccagccttgatgatccggcgtggctgtggcatgcacgtttggggcatgtgaatttccaagcgatgaagctgttggtggataaagacatggcagtgggcgtacaggccatcgtccacccgaattagctttgtcaggcgtgcttggtggcgaagcaaatcagggcgtccttccttgtggtggtgaactacagggcggaggaaccactggagctcattcacattgatctgtgcgggccgatctcgccggcgacgatggctggtaacaagtattttgttttaatcgttgatgacttcacacggtggatgtgggtgtttgtgattaaatccaaggatcaagcagtggaggccttcacaaagttcaaacccttggccgagaatgtggccgggcggcgcatcaagacgctgaggtcggatcgcggcggcaagttcctgtccggcgagtttgcacaagtgtgcgaatcggctggcatccagcggcatctcactgcgccgtactcgccgcagcagaacggggtggtggagcgccggaacagatcagtgatggtgatggcgcgctccctcttgaaggggatgagtgtaccaggcagactttggggggaggcggtgcgccacgcggtgtacatcctcaatcggctgccaaccaaggcgatgggcaatcgtactccgtacgaggcatggacggggaagaagccacatttggcacacttgcgtgtgttcgggtgtactgcacatgcgaagatcacaacgccacatcttaagaagctggacgaccggagtgcaccgtatgtgtacttgggggtggaagaaggaagcaaggcgcaccggctgttcgatccacgtcgcggtcgcatccacgtaagtcgtgatgtcatatttgaagaaaatgctgtttggcagtggcttggagatgcaggcgagcaagtctccgttgaatttgatgttgaagaaatcgttgagtcaccagccggctcggcgacatcgttgccaggcgcggtaccgaggtaccaggcgccatcacccggcaggcgtctaggcaaggagccggtggtggtagaagaggaagcttcctctccggcaggcacggcggaggcgtcaccgtcactgccgaccactcctgccacgcctatcggtgaacagagcacaccacactctgctggcgaaattgacaccgacggtgctcctgttcggtacaggcacattgctgatattttgagagatgcgcccagggtggatttggttgatgatgaacaagatggtgaggcattgcttgcagagacggaggagccgtcagcttaccgtgaagcagccggtcactcggcgtgggaggacgccatggctatggagatggatgccattgagcggaacgggacgtgggagctcaccacgttgccagctggccacagggcaattgggcttaagtgggtttataaactcaagaagaacactgcgggagaagtgatcaaacacaaggctcggttggtggcaaaaggatatgtgcagagacagggagtcgatttcgatgaagtctttgcaccggtggcaagacttgatacagtaagagttagggaaactattttaatagctcgagtggacgtccatccgtttattgcatgtcatctaaatggttatgaaaaaaattaaaaaaaatataaataagatagatcaacatgttatatatcagtccacaaacatgcaagttgaaattcaacttctacaagttgtaacaagaaataacaaacaaaacttaaattactatatgtaaatttacaattaaatttgttatttttgttacaacttgtagaagttgaatttgaacttgcatgtttgtggagtgatatattatatattgatatatcttgttaatttttttgaaaatttttcgtaaccatctagttgacatgcaataaacgggtggacatccactcgagctattagaatccatctccgtaagagttgttcttgctctagcagctgatcgccggtggcaggtccaccaccttgatgtcaagtcagcctttctgaatggcgagctagaagaggaggtatatgttgcacaaccagaaggttttgtcaagcaaggtagagagcatctcgtgctcaggttgaacaaggcattatatggactctggcaggcgccgcgagcctagaacattcgcctagatagatgtctgaaacagctcggttttgagcggtgcacgcaggagcaggctgtgtatacttggggcataggcagtggtggtgtcatcgttggcgtctatgtcgacgatctgattgtgactggtgaaaatcctgttgaattgaagatgttcaaggaacagatgatgggggagttcgagatgagtgatctcggtctgctctcgttctacctcgggattgaagttgatcagggagaaaatggaaccacgctcaagcaaactgcctatgccagaaaagtgctttctcagttcgggatgctggagtgtaattcaacctcaattccgattgatccaaggatgcagctgaacaaagatgcagatggtcacccggtgggatgtaactgagtatcggcgagtgatcggctgtcttcgatatctgttacacacaaggccagatctttcctttgctgttggagtggcaagcagatttatggagcggccaactcttatgcacttcaaagcagtgacacaaattctcagatatctgaaaggtacaattgattgcggccttgtgtatgcagcttgaaatggtgatatgcagattactgggtatacagacagcgacccgctggggatgttgatgaccgccggagcacgggtggtatggcgttctacatcaatggcagtttggttgcttggagctcgcagaaacaaaagaccgtggcactgtcgtcgtgtgaagctgagtttatggcggccacgacagcagcttgtcatgcgctttggctaagagcactgctggttgagattgttggaggaccggcgaaggtggttaagctatttgtggataacaaattagcgattgctcttatgaagaatccagtgtttcatgggagaagcaagcatattgatacacgatatcacttcattcgtgagtgtgttgatggagggaaagtggttattgagtttgtccggactgaggaacagcaggcagacgctctgacaaaaggtttgccggcggcgaagctggcaacggctcggcaccttcttggtgttcgttttcttgggccacagcagaattaagggggagattgttgagtttgttatttcagctgtggccccaacgtgttcctggtgattgcagttgcaacggttgaaggaataagtctgcgtttgttagcagatgcaaatgatgcggtgatcgagtcagaagaagaccgcgtcggtagcgttcgtgtgcgtgagtttagcgcgggtgcgtgagtcgtcgaattcagagaaaagcggatcgtgggatggcacgatttgagcctcggattctttcttttgtgtggaatttaagtaggagtttttgtactgttattctagttgcatgttactctgttcagtgaatgaaaaccacagaaaattagccccacaaatttcctatctgctattgttttctgaaacttctcaatttcctgtgttcttgttctgctctgtattcctctgaatctcgttcgttgccgtgccggattgctgcagtacgcacgcaaggtgttcgatcgagggtctagcactaacacctacggcgtgcgcgtcgtcgccctgcacgccgacacggcggcggccaggacgatcgatctgccaccggggtgcgtcgacaggatgctgggctgcagcaacgccaagagcatgagcgagctcatgctggtcatgtcgcggggcggggcggtgttgagccttgtcatggcggagcgcgaggtgatctcggtgtggacgttgaagagaaagcagcggcggtggagaggtggagccgccaggtggtgatcgcgagggtggcgattgatcggagtgtggaagcacggagattgtaccagaccgtcttcttcgaggggttcggggagagaagcggcaccgtgctgatgaggatcgtcaacgtcgggctcgtgcagctcgccgtagcaacgaagaaggcgatcgttgtgcgggacagcggcgccggtaaatggtggggcaggtccatgtccagggcgtgcttgcacgagatgaatttgtactctttgctccaaagcatgaaacccttttgatctactatttaggttagaatactttttagcattgtccatatttattaacatatatatgaatgtgggcaatactaagaaagtcttatgatatgaaacgaaggaagtagcttgagcgcctaagagaaaaaaaagaatgaattcgattctgttattcgccttaagaatgattttttttaatttctgattagttattaataccgctccttcggaaatcccttgaacattactcgtcaaaaatattcctacatgttctggtggtagactggtaagtggtaaccaccaagtagagaggtacttactatacttttgtctcgtgtgatcttttatctgcgattgggttgttagattctgaaacttcaactataaaagctgatcaaacctaacaagaaatttccagttcaaagttaaacaaacctccaacttcctaatacaaactttccaaattaaaaagtaggagaagaatggaattccacctcgactgggagtctggggctcttccatagatggggattgctagttggcacgcgtcagctgctcccgggccttcggcccatcagcccatttttcctttttttttcacgatttgttttttctttatcttttgcgatttttttcggttttttctgattacctttttttaatctttagcacacttattttttttttcaaaatgttttgagttgaaagtttaaatcttaacttgaaaatttttaaatctgatttgaaagtattcaaatctcgagttgaaagttttcgaatctgagtccaaatttttcgaatctgagtcgaaagttttcaaatctcaagttgaaagtttttaaatctgagtcgaaagttttcatattttttcaaatctgtacttgaaagttttcaaatattgagttgaaagttttcaaatctgagttgaaaatttttaaatatgagttgaaagttttcaaaatttgtcttacacatttaaatttcgagttgaaaattttcaaattgagttttgaaagtttttaaaatttgacttcaaaagttttcaaatctaacttgaaagtttttaatcggttagtagaaaaaatctttcagaaaaaagaaaattatatcttaattaccgtcattatatatctactaatcacttagttaattagactaaactattggaaacgctcgccgccaacgaaacgcgttagcttttccgcccatagattcccttttcccggcccaattccagcagattggttctcatattgggccacatgggcctccacctccgcatgcacgagaggcggcccacgagtagtcgatccagccctctccagaagcatctcctgcgctgaaaaaaaaaatacaaaaataaaatcaagaaacgaattcgtcctcgactcgtcttcgtcttcgcctcgtcgtccccttcttcaagaagaaggcaacgaaaccgacctcgcgccgcctcccaccttcccgtttcttctttcttgcgccgcaagaacgcgaatagctttatctaccgccgctctcttccactccggctcgccgcgcgtcgcctgcctcgctcccaccgtttccgtctcgccggaatcctcccccctccgcccgcggatacagttgtccccggtcggtgtcgatatggtacgcctcctcctcctcctcctcctcctcctcctcttctctccctcatcatccgaggaatttccagcctcggtgtcccgcacggtctggtccccgggccgggtgttcatcaatgcgaggcacaaagttttccagacctgtcaccagtgtagaatcgagaggcgctgtacaatacgatgatattagttagtagcgtgtgttcgagaatcgagaggaggtgctgtacaatacgatgataaaaacgttgggggattttttttttctgccatggttgtctccgcgcgtccttttgcgatgtggagaggtctctgacttggggagctaggaggaatcgggcattaagtcccgggtggtgtttgtgtggtcaggggaagagcagcagacgccggactgcactgccttgcacctgcggtttatattcttttattggttcatgtgctgaaatctccaattgagttgttcacctttgttgtaatgtcgttgattagtcaggaagtcatgtctagttgctcctttttttggttgaaccaaactgtcctttttatacagaaaagtaaactatgttagtgtggttagtgatcttcaaatgcaaagatgttaaattgttcagatcagatttttagtacgttttgtttgattaaacctgcatcagcagcttatcgttaaagtaaagtttaagaatacgagtctcatgaccggtttcagggtgattgtgggtaacataatgaattccactgtaggggtttggttatattcaatcgtgcttcctaaaaaagtagtcatgtcgcaaattgctcatttagattgttgtgcgactgtaagggatatgatctgagaactgtatcgccttgctcatatagtttgttgttatgtaaggtgttcagtctgagaactgcatcgccttgcatctccagaacaaaaaaagaggtgcatgtttgtcctagcaatatgagcttcagttttttcaattctgcaaattgaagtccgtaccaaatattactgtgacttgagtattgcatctgatcaccatcttggaacattatgtgttgccaacaggctactcccttggtagctgggttgtcagtagctgctgctgcaatgggaagcagatatatgctccaggcatggcaagccttccggacccgtgcagcaatgccacgagtgcggcggttctaccctggtggattcgagagagaaatgacaagaagagaggcggcactgatccttggcgtaaggtgggttttcttctcaattctttgcacctgtagactgtatcctgtgtgatgttttttaaatctcttgttaagcttaatgatcttcagttgttttggtgttaaagagtgttttgccactgtctttggtacttatagaaaccattttcttgtatcagagaacgtgctgcattcgataagatcaaggaggctcacaagagggtaatggtagccaatcaccctgatgctggtgggagccattacatcgcttcgaagataaatgaggcaaaggacatgctgatggggaaaggaaaatctggttccatgttttaatctgtctaaaaggaaacagaattttgtttttgccatgaccatgatgacttgtagtggttcatgttaatcgaccttaacatgctgtgctgattgtaccatagatctgaaccaaaaaacaaatgcaagttactggattgagtaactcaatatcctgctaaagtatattgttcagagcctccagtctgcgttttttttaagcttaggttgaagccattttgaattctttcttgctagatgatggaattgtaacttaggctgtatgtgtttagttccacgtcaaaattgaaagtttaaagaaattggaatgatgtgacggaaaagttggaagtttgtgtgtgtaggaaagtttgatgtgacaaaaaagttggaagtttgaagaaaaaagttggaatctaaacagggccttacttaatgatggcctg

SEQ ID NO: 2204 - DNA, 627 bp, Oryza sativa
tagcctagtatcagttatggaattgagtgaaacctaactgcacaagactgacaattcaaggcatagtccattgttcagttgtggtcaggtgtagctccttttctaggtgaaagttcaacttaacagtcttcaccgaaacactggtatataaaagctgctatggaatagagagcattctcatgagccttgaaatttggtggggattgttagatttaattgggtaattaatccatttaaatcaattaaatcaaataaattccaaggctcattatgctaggaattcatgtgaattcattcttctatgggatatcaatgggatgaagagttttgagaattaatccatttgattaaagaattggtaacttatatcaattagtcctaattgatggatggttgatggttgtgtagtggaggatggttcatggctagttgatgacaattagttgctctattcctcttcctattccattggtaacttacatcaattactcttaattgattggtggttgatggttgtgtagtggaggatggttcatggctagttgatgacaattagttgctccattcctcttcctatttcatgactcttactcttcatctttcaatcctcttataaaaagggaatgg

SEQ ID NO: 2205 - DNA, 540 bp, Oryza sativa
gtccttgccttcgaagggcggatccaatggctggattccaatgtcgtattcgtatctcatccactcatcgtcgccaatgcgacaataccaaatcacagtggcgatgggctcgatgaggaggacgcacaaccggggagagatggcttgctggagagacggcatgagcatatggtcgacaagcctccttctagcagatgaggtagacggatcttatcttggggatcctgtgggttctgcaagaacatggtggtgctctggcgaagtaggatccatccctgtggcgtgaaccatgcgttggtgttggtcagccctgggatgccgccgtcgatggccttcttgtccgagatgctgaacaacgccggcttatccgcggagtcgtcgcgttgctccaaggagaggcaaggcacggagacgcggctcgtgttgtccatgattgggtgatgttcttcttcctcttcttcttctttcgtttgttgtgatgttgtcaacctctattcctctcttcttcgttggatttgcaaactgtacccagcatgcact

SEQ ID NO: 2206 - DNA, 1263 bp, Oryza sativa
aggctcacataaagagaaagcttacgaaagaggagagattagaaatggtgaaggctggaagagaggatagaggaaaataccaagcaagaacagctgtgaaacagaaaaaggtattcgtttatatgatcctcctttttggtgcttattttgacctatgttggctatatggcacaaccttgtgaaatctgatcatgaattgttctttcgtagttgcttttattccttctctacttatatgcttctcattgcgttttagaccggtggcttgagcaataggcagaaacaacacaagaagaaaatgcccctcgctgcaagcagagcgaaggcagcgcgttctcgacaggagaagaaaaaactgcaaaagcgctcgggaaagcaattcagaggacggaaggcgtggaaatgagggattttttgtacttgcgtttgccaattcttgtggtctactggccaaaattttgactccttcagttaatgattttcgtatacaaatatgggtttcacaaaccgtgtatcatcgatttttcaagtgctggtgtattcttttgtgagtggagagaatgaagccggtatatcatcgctcacagtggttgctctatgaatttggacagtactcgtatccaggaagttcagcatcacgtgtcctcctggccagtgtctatacgttgcagtgactccagcgagagccacaattacgatatgataaatgctgtctctgtttctgctttgatgagactgtttcgattaggccagcaacctcacctctcctatataggctgtgtttatttcagcgtaaattttggattttggttaaaattagagatgatgtggctgaaaagttatgtgtatgacaggttgacgtgatgaaaaagaattgaagtttagatccaaactttggatctatacacacagacggattcagatcatgcgcagttatagctattactgcaacttatattctgtgctacagtatttatgctacagtacgatgaatagtgcacctcgctgatctggaccgttccatctacatcgttgatgaaaactggtaccgcctaaattgcagtcccagtagcgactgcagctgatccggattcaacacggacatagtacaccctcttgttgcttcgatgagactggtccttagcacaatcatcaaaccactaccattatatcagtgcttggtgttctattgggttaaggaattctcgatcgttctctgctagtaggaaatcgagccgactgaccagcgatgtcggcggttga

SEQ ID NO: 2207 - DNA, 608 bp, Oryza sativa
aagggactttaaatgaacttattctaaatttgctatgggccaccttgtttacgggttagagagcccataacaataatggttaattggatccagccatgcatcgagcctttttatagatcgcaagtggtctcaaaggtgtggtttttaaaatgggattggtgctggagcactcattggtgccgcatccctagtgtcggttgagaaaaccgataccttaagaggtttttcacatgttctgtggtagtgaaagggtccgtatcataaagagattaccataccgtaacacacaacaatgacttatttcacaagacaagaggactaacaatttcacaagagaatttttatgtccaaaactccaaattgacggagcaaccatcaattcagtgcggtagaatccccagggccttgccgtactcgacgaggtcgccgaatatctcgtccagatccgtccacttgaactcgaacccttccctcgtcagcttctccgacgaatagcacactctcggcttcttagggaacccttcgaaactacgagcaaacaaagatatcgctggctcatcaggttctctcaagaaatgcatgtgtcgatcgatcagtcacttgaaagt

SEQ ID NO: 2208 - DNA, 630 bp, Oryza sativa
tatgtaattataatttattttgttatgagttgttttatcactcatagtactttaagtgtgatttatatcttatacattttcataaaatttttgaataagacgaatggtcaaacatgtgagaaaaagttaacggcgtcatctattaaaaaacggagggagtactatttaagttcactagctgatttctccacgccgttttcctagagcaacaatttttgaaagcaaatttaaatataattattttttatgtaactatattgagaaaatctatatcgttattataatttagactcaccctgatcggatagtgtaaatctttctctctttttctaagagtaaatttcacataactacatatatttgagctaaattatcacgaaactacatatttaaggtaatgtatcacaaactacagattaacataaacttatcacaaaactaccggtttaaggctaagtatcgcaaaactatggatttagtaatatatttatcacaaaactatagattttgaagtttaaattcttagcactaatgttatatttgagttataaatgttcaagttttatgattaaattggcaatcggtagttttgtgataactttgttactataaatttgtagctttatgata

SEQ ID NO: 2209 - DNA, 751 bp, Oryza sativa
tgttctgtaaagatttaaaaagttatatataattgtcagaactatcattacttagtacttttagctttctgctgaagttttatacatgagtgtatatagttggaaccagcattcaagtaggagaattggaacccagatgtgcaatagtttattttttaaacacaatgtctgttgtgagttccatccgatggttaaacgaaaataaacgttaattcaaatttagagaatgttggttgggtgcttgcaggtaaggatgatgatgttaaaggttatagcgaggactattgggctgcatcacttggttttgttgaacttctatccatatcttcaaagatacgttcaggtatgttcttaacttggcatgtgttcttcttgtagcaaccttatggtagatataatgtttatctatactctatactaatataaaagatggtagtggtggtggacccacggactgtgagttgcgtatctcttagcccccacatgccatagatcccgtcgaaaggaaaatatgacaatagaatattatgaaaattttcatctttacgaaatgacagcaaaattagcataatgataatataatagacaattagaaaaaaaaaccgttgcacctcacgtgcattatactagttcatactagttttgataataagttttctacctttctgtgatgcagcctcatcaacgagatgtaacaactttacttgctgcagcagtacaggcttgccatgatatggttgaaacacttttg

SEQ ID NO: 2210 - DNA, 742 bp, Oryza sativa
atttcagaactggagacttagagagcatatatatatatatatatatatatatatcatcagagatgagacaacacaacatgcagtggtgtcgattagagaaagcgcgctaattagctagctgttcacctcaggattctgtgactggaaattcaccggagcggcgacgaggaaggcgtaatcgcagccggcaacggcatcgtcgaagctgccttcttcgtccatgtcagcgcggaagacctccaaggggcctagtgcttccaagtccttgagatgggaagtcttcttcatgtcatctgaatacacaagagtaggatcttcagaggcagaactgaactctggaaactcgtagtagcgtcgtcttgagaattgagatcataacgatttgcatcctttccagcatatttcactatatgaattaggtgcgactatcggtttgaacatgtaaatattttctacattatctaaaaaaaatattttctacatggtgcaggtaagagtggcatttggcatttgctaagtagaagggaaaattctattcatcctcaggaccctggtgctctggtctcttggcagccgtggaaggaacggaacttctgggttttgactcggtgctctcttcagtccctgtggtcctggaatccatcctctcggagggtcatctgtggtgccacttttggggattttttgggagtgtagcgtggctatgccccttcccgctgttaggagttgcgtttagccgccg

SEQ ID NO: 2211 - DNA, 2742 bp, Oryza sativa
tttttccctcgaggttcaacattataggttacacttgttcatttttggaaccatgtttgaacgacaactcctgcaatttaggtaggacttgagctagttaccaaagattatgacatggatatgccacatccattcagaaggtcagatataatcagcattgttcctatctacaaggtaaagtttaaccctttggattctgtaattgaatgagatgcaaatacttcctgtttattaacatgtttaaccatgatgtctttactccagcatgttgcatgctcatcagcagacggtcgaaccctgttggagtcatccaagactttcctggacaagggaaagcttgaggatgctgttaactatggcacaaaggtacagtcctgatcttgtgtcttgacacatcatgatgatttcttgaccactacatcctgttgattatacatggtgatgcaggctcttgcaaaacttgttgctgtttgtggtccttatcacagaatgacagcaggagcatacagccttttggcagtagtgctttatcatactggtgacttcaaccaggtattttctttttgggatttaagccagtagttattttatacattgctctgtagaatgtaatattgcaaatattgtcttctgtgcaaatattgttaaagttgaattctgattctagacaaatcttgggtacgatgaatgggaatcatgcagaattattttgaacaacagttaatatgatgatcatgtggaaattgtgactgtaagctgcttaagtgtaatataatgcaaaatgtttctcattcatgttacatgaagtactgaaatatacacttgtcaaggggttaactcgtagttttttgagtgaaggtttaacttgtatatgcatatatatacatatacatacatacatacatacatacatactatccagtgctgtgaagactggctttataaatgttcactctctattttaccaggcaacaatctatcaacagaaggctttagatataaatgagagagaacttggactagatcatccagatacaatgaaaagctatggagatcttgcagttttctattaccgcctgcagcatacagaattggcattaaagtatgtgcttgttgtcgtttacaaaagctatatgcctagggtaccatctagtttgtttttatgagtaagctatgaagtctgttctatttactctctttggaaatctcaactatgttatgctctgttttgtgtatcaggtatgtgaatcgtgccctatatcttttgcacctgacatgtggaccctctcatcctaatactgctgcaacttatattaatgtggcaatgatggaagaagggctgggtaatgttcatgttgcacttcgttaccttcatgaggctctaaaatgcaacaagaggttgcttggtgctgatcacatacaggtttgcaaccctatctgttttagttctcaattgagttccgacacatacagtagtctaattcatggccacatcagttttgatgttcacactcgttttgctgggaactatgagaaccattccctttcatgatccaaagaaaacttgagactgaaaactcatcttatatatcttgatgtttttattgacagactgctgctagttaccatgctattgctattgctctgtctttaatggaagcatactctttaagtgtccaacatgaaaaaaccactttacgaatacttcaagcaaagcttgggtcggaagatcttcgtacacaggtaagccgacaaaaattgcttcctggtgatgtgttcttccacttaccaatcaatttcattctttagttattttccattctactgcagcaaggaaatctaataactatgttttccacaggatgctgctgcttggcttgaatattttgagtccaaggcactagagcagcaggaagcagcacgtaatggtactccaaagcctgatgcttcaatagcaagcagaggccacctgaggtagatgacatgattgctcgtctttaccatgttgtttcataaaagtggttgcaaaagttaggattgagttttgtttatttgtgaatcaatgatctctattgcactattgccatttctagtactggaaatggcaggggctctccctctatctaaaaataaaagggaaaaaaaactcatctctaagtgtctacatggactaataaatgccatagcgtgctgactaagcttgtcactgttatccttatgatgattacatttcgggggtagaggcttacaaaaggaaaagagtatacttatttaaatttacatatcgatctattttggatgattgtctttgcttgtgcttaggtttgatttttctttcagtgtatcagatcttctggattatatcaatccagatgatgaactcaaggctaaggaaatgcaaaagaaacaagcccgcgctaaggtatgtttattgttaaggccttccactggtactatatggcattcttttatttcgccaatggtcactcatatgtgcacattatgaataatagatcaaaggtcgtgccgggcaaaatccatctgaagtagtcgatgatgaagatcaaaggagcccaccacctaaaagtgaccattcattaattgagaaggaaagttctgaagtcaaagagaatggaacgtttattcagaaagagaaactgaaagaagaaataccaggtaacaccttaagccgtatacctcaagatgattttactgaagagtacacgtcggatgaagggtggc

SEQ ID NO: 2212 - DNA, 13048 bp, Oryza sativa
agacacaacctgagaagaaaagagatcttgtagcctcagatgtatcatcgtcatctcaatcattaccaacagtaactgaagctaatgccccaaacgaagtagcatctatggtgactgaggcaaatgattcttcctccaatgatgatgaaagagatgcaggagaggatgctcaagaacagatgtctagtggaggcgaaaatgagaaatcttcaccatctgaaagtgaaaagaatgattcaccaggtgccaaagagacggccagtaagctttctgctgctgctgctccattcaatccctccactgttccagcttttgggtcaatggccattccaggtttcagagaacatggaggattgctgccatcaccagccaatgtacccccgatgttgtcgatccctcttcgtaaacaccctcaccaatctgcaaccgcaagagtcccttatggtccacggttggctggaggctacaacagatcaggtcaccgtggccctcgtaacaagtctgccttgccaagcagtgaaggccttaccgaagcaaacacatttgccactagggtgatgaaccctaacgcagccgagtttgtgccaggtcaatctcggagtcctaatggcaacccagcatctccaaacggacctctagcatcaccaggtggcactgaagcttcacctcatggccttccttctccctcagacagtatagtagaatcacctgcaactgcatctccacaagtttctgaaattagccagaccagtcctgaaggaaatgatacaaccagtggggtcgatactgaaaatgggagtgaaaaacaggacactgatggcaagaaccatgtggaaagtaaagacggcgaaggggagcctgagcaaaccgaagcttccaaaggtgatggagatggtgcaattaccccggaagatggttcagccgtgactgaaaatccaaagtcctgggcagactacagtgatggagaagctgaggctgttgaggttgcaagctgagaaaagataaaccttctcagtacacacagaaaattttacctcttttacagatgagactttttcttctggacagcatacaaatgcaaaaccggcacactgctattttgtgtagagaattagttcctttcctgatccatctcatggtatgtagcatctacacgtgcttctgcagttccaatggccttgaaaggttatgcaatggcagagaactttgaagatctcttcctgagagtgatcgatgagccctttttttcagcttgctttgcatttgctccaaagaaacttgggaagagcaagcacacgagagattggttagcgcatatataccatagttcatagtcttccctttttgcctatcattttgttcaacttgttattatgtactggaccatctgtcgacataacacatgtgaacttatttttactctgaattttgatatattagaattgttgaaccatgtaaattgtaaagaaagtggtgcctatttggcctcttgcttgatgtgaattttacccaagatgaaatccgggattcaaagtgcatggcagaaatggaaacctggaggatacatctaatctacctagtgagttaaccgtccgtgctgatcagattatgtaatcggtcttggctttaatgaagagtacttttttttttggttttttttcagctcaatcttcttaattaaatactttagcgaattgctttagttaattaggaacaccgtcacatactcacataatccctccgtccccaaaagacggttcttttagagagtcaaagtcattccaagcaaaacattagaagactattatgctcttcgttaatacagagagaaatgaggggagaatgaatgaggagactattggttcaatggcaaaaaaaaaaaaagagaaaaggattcaataatattaaagagggctaataaatcattaagaagacagtcttcgtgggacaaattttgagctaaaaaacacagcaagcgcaaaattcaatagtgtagcacaccgaggtagagtcgtagagatcagtcatcatgcacgtgaaatcatgttgttagaaaaaaaaaagatgacccgttaaaactattatgcaatattattgttgcatttgggttctcaggccattcccaacccaagacactaaatatagttttcataaattctacattatcaaaaaaaatcagtactagacactactctttcaatgctaacaccacttttatatacttaaatttaatgttttgtcttggatattgtgtagaaacaatatatctttcctcatttattcacttgccacatcatcttttatactagggagaaaattgacattgtgccattgtcacgatggggtttcgctcaaatgccactgtacagatgggattcgataatacgccactttcaacccgtgcatctacgctcaaatgccatttactccatctcttcccaattaaaatcatctttccctgttttctatttgtttctgaccaaaataccctagctggtatcattcgtggggagaaagagatgggtgtcgggcgaggcggactggaggagaagcttcgccgcggaagcggccggcatggggcagagtaaagcttaaagaagcttgtgttctctcctagttcaagcctgcacaaacaagcaagttgctgcttaccaggatgacaggaagtccagatcaatggctgcttcttggatctgggcagctgctccatcgtcacaagtgatgggattgccgctggcggtggtgaagacaggcgtcgacgacattgatgaagaaggccacagcaacggttgtgatggtggagaagtaggcgcggcgctgcgaccggcgaaacaggaatgcggtgatgacgacgagccgcgaagaggcttggtgcctcggtgagccgatctgcgacgatcgacagacggtgggggacgacgagaagaactgcggtgaggtcggccgggcggcggcttgctgcttggagatggctgatcgaggatgaacacgatggctcacggcagcagctcgctgccggtacgccgacaccattgctgtccatgttgaacagggaaaacaaggggaaaacaatgtgaaaacaggggtgttttggtcaacacacaagataaaatagggcaaaatgattttaattggaaagaaacgatgcaaatggcatttgagcgtagacacacgggttgaaagtgacattttattgaatcccatctgtgtaatggcatttcagcgaaatcccatcgtgacaatggcacaatgtcaattttctctatactagatgacagcttatttaatgttagagcaggtacaataggaagctataagtcaactataaacatattttaaagaaataaagaaagatagagaagagcagctggctacagatctatagccagctgcaacacgaactctaagacgtaatgtgtgtatgataggtagaaccaagtatttatagtatagtaagcaattattgtatgaactgactattatattgactatagatgatttggagctagtagtgagctatactattgaacttgctcttatagacaccatcctagttattgggttgggaattgccttatggctgatctcttcatgttaccggtggtagcgctacgatttgttcttttcttctttccggagcattgaaaaaaatcgaacatagtatggattgaccatttgtttgtcatgctccctttttggctttttttgttctctgtgataagtgcttagcagttagcacttggtgatgttttcgattaatttcaaaatataagcattttaggttgtttagtaaatagtaacattaaaattttagtaatttcagttgttaaagtttgaattttcaattgcttatatccccttctaagtacctgattgttgagaaattatggattttcatgcattagaattagtgtctcaaaatacttatattgtgctataatcttcgaatactataaaaatccttggactttagaatagtgggagtatgaccgtgtgcatacttaactactttagaggatatgaattcatggttacaatccatattttatcctttcggaccacttgatcagttagttatgtatttggttcatgggaagaaaggatgggatggccacaaagggaatattacacatttacaccttccttcagtgaagctcgctctactgagcaaacccttagaaattagcttagcttcactcaaacttacctctgtgactcgcgcgacgaactttttgcatttagtgtcgatatttgctcatgtgtgtgcgatggttttcaccagaacaaaataattcaaaaaacaccaaagcatgagtattggacatattgaagcggattgggtgcttctgtttaaaaaaatctctccgtgactcgtgcgactaaattttgttcatttagtgcagacattagctcacatcctccacgtgtgacacctagccgactaggtggagaaccacctagagtaataagcgcgatgatgatgacctgacatcggcccaagctaggtgctcctccaagaactataactcccaagctcacaagatccaaaactccctcgctcacaagatttttggctcaagaactaagtggagaaggctaggagccctagagaagctaagggatatgtccaaaagatgtgctatccagacaatcaaaatggggatgggtagggttaaatactagcccatccccacaactaacagttaccaattcaaactctggaagttcaagtgtggaagatcggaacttcaggtcaacacttcaactagcaactaagatagggactggaatctcctttccaaaagacttgaaccttaagtccgaggttgttatactggtccagagaaatgacctgaacttccggtcagccttccagcgccgaacaatgaattctgacctaacgtttcggtgcaatttatcaaaatttttggtcaaagttcaaggaccgccaattttccttttgtatgtgtggtgcattgtgtctctctctacaaaattaagggtgatactagggcacttagacacaacgcataccattgatgccagcccctcttaatagtgtagtgtagttttcctatgactcaaattcaaaccgaaaataaatttaaatcgccttgagccaatcaccgattcgcatcaatttgtggggtcggggtctccatctttttagattattaagcacataggatgaatacctacactaatctcattcaacatgatatatcctctaattacattgtcatttatcatcaaaacctactaaggatctagaagcacttcacaatgtattagaggtgtggatggaagtcacctccacgcaaaatatgccaaagaaagccctcaagtcgataactattctagttgcatgggaactgtggaaggagagaaactcaagaatcttcaaaaatctgggaaacactccaacctccatcatggcaaaaataaagtaaaggaggaagcgcatatatgggtaatggcggggtgagttgcctaactgagatttactggttgtgtgagtagtcatcttcctttccttggtccggaatgaccctaactcccaattcctttgtacctatgaactcttcttctctatcaatatataagacaaacttcttgccttcttttcaaaaaaacaaaaaaaaacaacgtattagaggtagctagcagttgagtagttgaccttgcatacacagataaccaataggactaatttcacgcttccttcacactgaggtgaccacttacaccactaaacaacaaacgggaaataaccatgattagacattaaacaaagacatgcggatgcagtgagccatgtgtaacgctcaccttgatatcgaccatttcccaacttcttcgaggatttcattatattaattaatgtcaacagcggagagcttttgcgttgctaaccgttgatcatattatgcctctccctttcacattacaagtgattactgtacccccttaattacttctaggcgacttttgtgccaaccactttggatttgactatgcatcagagctcttaatttgttgagctacaagttaaatgagccagaaacaattgatcaagctcagcagctacagtatttcaagctctctcttaaccatgatagagatctagagaagtaaatttacattaaggtggcaattgaactaaaggcaaaactaattacagagagccctccaagcctcgaaaccggctggcatttaggcccttatatggttctaataatccctgtacttcaacactaacgaaacacacaatattttttttaggcccttgtgacatactagggtggtaaagaacagcaacagaggctcaaagaggaggcacaatattttttttttcttctcttttggtttgaacatagcacagcagtagcagcagcactctctcacaagtctctcatgaaccattcaacaacaacaagaagaaaaagaacctaagggctccattggagaatagcaactctgcacaatctaattaagcatttgcaacacaaaatagctcttggaatcttggcaacaatcaccggtcgaggggctcggtttggtccttgacaaccaggcgttcagaaacctctgcaagagatttcaggttgcatttcagcagggcctccacgaagtagcatgtctcatccttggtgttcccctccgggacgtcgacgacgaacgactcgatcaccagcgtcccgggccggccgtcgatcacctccgggtggacggtcaggatggaggagtaattctgtggaaagaaggaaaaaagaaatgacaataagatcagtttattcagctcacaagttcagtgtccttgagctaacaccaagaggcagagataaggttctccctcggattcggacaagtggtttccattatccagatgcagtgcatgtgaggccatttgtgccagcatcgccgctgagcaaagcaaacggataatggaccatgagtccatgccaaaacaagtgacagatcctttttttttaaaaaaaatgttttggaacaagtgacagatcctctcatttttttattttgttttaattttgagaaagtccaaaaaaataccattgacaagcatccaatttcaagaaatgtctactagttccatgaaatatcatcgtacaaacgattttgtcccagaaataccatcgccgttaaggttccgttaacggcgtgggatggatggaaccctaacgacaatggtatttctaggacaaaatcgcttgtacgatggcattttatagaactcgcactcattgatggcatttcttggatttgggtgtttatcaatggcatttcttggattttctatttaatttttgttttgaaacaagtgacagatcctcatgcaacgaattcggcaggtaaggtcaaagaaatggccagtcagggccatgctgttagttcatatggccaagggaatacaatacaaccaatagcttgttttgtggttagacgacaaaagttcgttgaagatgtgacaattgaaaaattcaggttgcgcagaccagcaggaaatatctcccccacagtccattatcatggccagtggggaggcatgaattagagcactaataaaataacaaattacggattaacctcatcattgtaagcgcattagcgtgcatgttccttgttgtcaataactgaacaggacatgagcagaacagatgacaaaaaagtacacctgtctattgtttcaagtgtgctctgtttgctagtccagggacagtgtatccagcaaaaaccttttctttttcaaagcaagagagtctattactctaatcagtggaatcaacccgtcatgtgcatacggtttgactatgcaaagcactgagatagtaaaatggtttaagatgacagatcatgcagaatatgttgcagcaccaagctgcagataaggttctagtaaccaatggttaaagtatactccctccgtttcgaaatgtttgacgccgttgactttttatcacatgtttgaccgttcgtcttattcaaaaaatttaagtaattattaattcttttcctatcatttgattcattgttaaatatatttttatataggcatataattttacatatctcataaaagtttttgaataagacgaatggtcaaacatgtgctaaaaagtcaacggtgtcaaacatttcgaaacggagggagtactaatttggcataaaaaaatgcagcagctgctgcaagggtatgaaatgctctaattgtcaacaaaatctgaaaattcaggaagctgctgtagctgataaaatctctagtgcccatctgaagttcagttagaaggtactatgtgaatcttgattagaaatctggagaacagatgattactgcttccttagtaatcaaggaagtttcaatcctaaacagaaaaaggaaaatcgaaaaatgcacaatagtcacatgtaagatatcagttattaacatgtctgatccatagtaacatgtaacatctgaacagcaaattaattacaagattattaacggttgatcaacatggaaacataccttgagcctatgatcacctcccacgaacctgacactgagtatgtgctcattgtcatctaacagctccagcctctcagtgcttcttgtggcaggcaggccagacttaacattaacctcccttacactgccaatctcaatgttccctttcatctcacaccggctcacaaatggcttgaaaagctgtggctgatcaaaacgcctcaccagagaccaaacctgcaggtttggttgccacaaattcaattagctgcagtttggttgactacacaaaagtatattaggcaaaaaaaatatgtagaaattaataatctttcaacaaacagggcagttgatattaaatgttcttgcataaagatcccaactgtgctagatcattcaggctgtcctatcaatgaacagttgaaagaaaaaacagaaattaactgaagaggctggcaaggatggtgcaaaagtttcattcaagacagattgaataggacagctcttttaatcagagacacacaatttctaaatggagaatttctaaatggagaaacagaggctagactctagagaatgccaatgatctctatagaaatatactcctatttggagttggaattaggcatcctttaagaatatgctgattattactgttgctggtaattgacaaaaatgataactttatatcatttgattaactctcagtgtcacaggcatcacatgattctgcaaaaaaaaaaaaaaacaaaaaaacaaaacaaaacgcaaaaaagaaagctaaatttcaacccaatcttcttagaaccactcaatagatatcgaaaggagtggaatccaactcaagggtatctctaccatttctttgcaggagtattacttattaagagaataaaggtacaactaagaaaaaggttaataaagtagtaagtagaaaccaatgcaagaacatccagaaatccaaaaataatcaaacaaaaaacaaatcagataaagccgggatctcgaggtggggggaagcatcttcccacgtgagatggcggtacgaaaggcagaattaaaaatccgtgcgattttcgtactagccatcatatcattgcgatcaatcatctgcgcattcttcttcctgcagagcaaatccagcaaagtagcatgcccaatccaagaacagctccacgattgttgcaagaaacagaaatcaatcgcaagcatcgcgtatataaaactgtttcgatcaattgccgcacactaatcagaaaggggaacaagaagaaaaaaaagaaaagcagaacaagaaagcctccaaattaagcttttcgatttgttggcatccttcctgatcgagaaattaaagaagagagccccaagaataaacaaaccaagaaaccgaagcagcgatggattcaggggaagctgcagaaggtcaccaggtggacgggggccttgatgtgcttggcgacggcggaggagcactggtggtcgcggggctcgtggcggtggaaccgcctcacgtactccgtctccgccgcgcgcagtcgcacctctcgtccgccagccgccacctcctccccgccgccgtctccgccgctcctcctcccacctccaccatcctcaagaaccccccctccctccgccccggcaatggacgcgacagcgacgcgcgcaggcggcgaagaccaggaggaggagaggagttttggtttgcctctggctttggtggtgcgtcgacgacgaggtgatcgacgacgacgacgacgacctatcgatggcagtgaggccgcgggctcagggtgtggtggtggttgttattcgatcgggggagtttttcggatacagccctgtgaggttcttgaaattgtagattggtccctcctctcttttttccttggatattattatttggcttgtgacttctgaattgatggatggatgggccccaagacatgagaggtgatgacattgttatctcttagaaatagctttttttttcttgttttgtttggtatatactctcttttttaaaaaataataataataattctaagtatgaatctggacatgcgtccaatggagggtacacgatggacactatgccccttttcttctgctccctctttttcaaaaatgatgggacatattttactactatgaatctagacggtttccctgattagattcgtagtaatacaatgtgtctcatcttatcttaatttcttatatttttagacggaggtagtaatactaaagatgggtgcaatgtcccaaaaaaaactactagtaatttagaaaatatgggggcaattcttttatgagaaaaaggaacataagtggcaaaagagaataatgataggttagttcacacttcataagtagactagactagcaaagttgcccgaatttttgtcatactatgaaactattccaaggatgccaacataatacttacaagtttatatttttattggggaaaaaacgtgtcatacgagatattgtgcatcataacaaaaaatcttgaggatcgatcaaatttgaccttgagccacgcaaaatatatcacacatcatacaagatattgtacatcgtaccaaaaaaattgatcaattttgaccttaagccacatggaatatatcgcatgcaagccaataatatgtacacgattttattgatttatttctcgatgaatagaacttaaagatataaaccctcatgctcgaatatcttgttgacaatatcaacaagtgcaatttagcctttgagttcttttattaagattactatatatacacaaataaccctctagatataaggtataacatatacatttaacctttttcaaaattataggatcaatgttttcttttctcctccaaagataggtataatgtattgcatagtagtaataaaagttgatataaaattctatttagttgttggtcatataccaaagtagtattagctagtgaacccctctcatgggcataaatagttaagataaattacaaaatagatacactcaagccaaaatattttatagacattcaagccaaaataaaagtggcaaaagagaacaatcataagttagttcagacttcacaagtagattagactagcaaagttgctcgaatttttgtcatactagggaaccttttccttaataaggatgccagcactatacttgcacgattatatttttcttgggggaaaaacatgtcatacgagatattgtacgtcataacaacaacctcgaggattgatcaaatttgaccttgagtcacgcaaaatacatcacatgtcatacgagatattgtacatcatacaaaaaaaaatcttgtggatagatcaaatttgacctcgagccatgcgaaatatatcacacgtcatacaagatattgtacatcataccaaaaatgttgtcaatcgatcaaatttgaccttgagccacgtggaatatatcacatgcaacccgataatatgtacacaattttattgatttatttcttggtgagttgcacttaaagatataaatactcatgattgaatatctattgacaaaaattgtgaggcttgcaagtgcaatttagcctttgaattcttttgctgagattaatatgcacagataaccctctagatataaggtatcacatatccatttaccccttttcaaaattataggttcaatgttttcctttctcctctaaaaacaggtataatatattttatataagtaacaaaagtagaaataaaatgttactagtagtggttggttgtatgaaagaagtattagctagtgaaccatctcatgggcataaatagttaacacaaattaagaaatagatatagtcaagccaaaatatcttatagacagtcaagccaaaataaaagtggaaaaatagaaaattgataggttagttcagttttttgaagtagactagactagcaaagttgcccgaattttgtcatacctgtgaactctctcctaaataaggatgacaacttcatagttacacgtgtgttgttttatgaaaaaaatacatatcctacaaaatattgtacatcataccaaaataagtcttgtcgatcgatcaaatttgaccttgagccacacaaaatatatcacgtgtcatacaatatattgtacattgtacccaatcttctttgtcgatctatcaaatttgaccttgagccacgcgaaatatatcacatgcaacccaataatatgtacacaattttttatttcttgttgagtttcaattaaatatatataaacccttatgctcaaaactgtaggttcagtgttttcctttttccactaaagataggtataatgtatttttatagtagaaataaaatgttatttagtagttgatggaatgaaagtagtattagtgagcccctcttatgggcataaatagtcataagacaaattacagaaagtagatatgatcaagtcaaattatcttaaagataacacataagctgatgaaaaactccggttaaagttcccctagtggaacactaccataataaatgagttgacatcat

SEQ ID NO: 2213 - DNA, 1630 bp, Oryza sativa
cgatcacgatgactggagaacttgatccaaactttctgttgatgccacttgaacttctggtctaacctctcaactaggcaaagagctctagccagaactttcggtcactattactggaacatttttcctacgtgagtgtggtgcattgtgtctcacttaagataaggctagagtaaattctatgtgtactcctgaaaactcactcaatcccttttgtacctctgaaatttacccaatcccttctatacccctaaaatttcaatttgatctcttccatgcccctaccattatattttccatcatttcactattacatttggttgcaaatgtctttttttgcccttgatgctttaggtttgaatataagcttaaaaaatgattaaaattttgtttgagtgcgcagtatctgcaatttatgaaactaatggatctaaataattagtgcataaaattttgacataattaaaatttttatttgaaattttaataggacaatagattttttttatcgggagcattcataaaaaaaattattgtgaacattggtcctatctttgtatgaatgctcctaatttttatgaatttttttataaaaaataaatacattttttatttcattatataaaaatattttttgggataaataatacatcgcacaacaaattcataactataatagtctcatgcgagaagcttttacatttttaataatgttcataaatttctatgttcatccaaagggtaaaatggttatttttatagaaattagacgatcaactgacgggaggggtatggaagggatcaaaatcaaattttaagggtatataaggaagtaagcaaaattcaggggtatagaagggattagctaaaattctaaaggtatacaagagattttctctcaaagatactatgaatacttgggctgaaatccaggccttatacatgaaccactcttaataatacagattttctaagactcaaattaaaattaaaaataatttgcgaaagggcctgtagcttagtggttataagagcctcagtagcattttaggtcctgggttcgactcccataggagcgaatttttcaggatttaactgtattgtgcttttcagtggtaggcgatgtacccatcgacaacgaggtgtctgtggtgactttgtcaatctctagccggtccagtattcgaagatgctcatagggatagggtttgcgtgcgtatgttcatagggtcagtggcggatctagaaaaatgattcattggtgtcataacgtgtctatcggtgttatagtatgctaattatacttagactatagtgttataatatatggataagcaggttttgccaaaagttgtcggtgtcttctgacaccgatgttaacactgtagatccgcccctgcatagggtgagtgtttgtgcattgtgagtgtatgtgttgtactgtgtaattctaaaaaaaaattaaaccatcttgagtccttatgccacttgctttaaatttgagcatttgaattatttttaatttaaattattgtcactaccgcagaaaacgttaaaggtgccggttgggaaaccacctttatgtcagttttcccaaccggcgttttcccaaccggcaccatggaagcgg

SEQ ID NO: 2214 - DNA, 2713 bp, Oryza sativa
gtacaacaagcatgccgccgccgccgccaccgctcgcccgccgcacccggcgaccacgacgtcgtcgtgctcggtggcgtacagcatgtcgccggccatgacgcccacgtcgtcctcgtcgacgacgacgacgacgacgcacgagctctcgccggcgccggcgttcctgcccatcctcgacagcctcgtcaccgagctcgccgcccgcggcggcgccagctgcaggccactggtcatcccctcctccgccgccgccatcgccggcatcgtcggcgtccccgacgtgagggtggagttcgccgggccgaacctggtgctgaagacggtgtcgcaccgcgcgccgggtcaggcgctcaagatcatcgccgctctggagagcctctcgctcgagatcctgcacgtcagcatctgcaccgtcgacgacgccaccgtcctctccttcaccatcaaggtaaaatactaatctactgtatattttattactcatcagattcatggagatcaatctctgcatcgtccataacatgctacactaaatcgatctcgaaaaacactcaaaacacatgcgatattatattacacgagacatgcacgcacacgagtttaatatataatcaatgtacacattaagcaagtgcactgatcagtgatatgatatcgatcgatttatttgaacagtaattggtaggatgtgttcatttcatgtgaccaagagtactacagtgctacagagccacacactgaaactgaaactaagcatgcgtatacgcaggattgcattaattaagccccaaatcaaccttcaactgttcatgtcctgcatggattctccttctttggcccataattccctctcatagatatatataaatctctacggttgtctctgcatgtttaaaacttcttccattattcgatgggtttcataaatgcaggcatacgtatctgcatgctgtataggctaagtttgtgttcagacatttctaatgtagagctcagatacacagtgagtgtgtacgtacatacagggatttataacacaggcctgatgcatgagtatttattggaaatggcacttctgtgtatatatacattatctttgaaagagctcgagaaactgccagagccagagcgggtataagtaattaatatgaacacataaatatatattcggggataaatgtcactactggtgcgaaactatgcatgagcagtcgagcaaagcacgagctgggaagaatatgcgtgtacacaatagtaaaagctacagctttggtagctgtagaacgttgagtgattaaggtcctctttgtttaggattataagccaacttataagccaaaaagtctaagcctaaacaaataagcagctttttcgtttggcttttttgaagccatcagccactcttacactattaagtcaaaagctaggttggagaagattttttggtttatatgagatagatgtatgactccaccactaaacttaggacattaaataagcagacttaaaaatctaagccaataagccaaagcctaaataaagagggcctaaacctgcttgcaagttgcatgcacacacacacacacacacacacacacacacacacacacacacacacacacacacacacacatatatatatatatatatatatatatatatatatatatatatcgacgatataatgcttgtttagctagctagctgttaattctgttttactatatgatatgtgtatgcatggtaatcaagcacacagatcgacacagtagaatttaatttgcttgtatattaatatacatatatttggatgcagtgttaattaagctggctagtgaactgacaatggattcgttgatttggtttgtgtttgttcatacagattgggatcgagtgcgagctgagtgcagaggagctggtgcaagaaattcagcaaactttcttgtgacgtgtaacatacagtgtcagtgcagtgactggctagctagctaagctagctggagtacgtagccgcgtgcataactatacgtgcatgtacacgcgtgcgtaacgtacgtgctagcttagctagctagtagctaattgcgtttggcttaattagtttgcactttaatttcatgggccaatctagctagctatctctatccagcgatcgattgagagagtacgtactgtgtgtgagagagagagagagagagagagagaagggctagctagtagattagatagcttggagttgcagagttgcagcaatgcattggagctatatatatgcaatgcaagctgcatccatgcatgctgatcgagaggttaacgacctacctactagctagagatcgagagatagctatctactagcgggaccatgcatatgcatggatgatctgtttctgtctctgtagctagacacgaacgatttgttatatatatatcttgatctgcttaatttcttgcattaagtgtttatgtgcatgatgtataatttaataactccattcgcgtgtgcgagatcaatcagttttagtagtatttttgtgtagggattttgccgatcccagcaactatctgcgaaagtgggatcgaaatattaatcacgcaatggattagacatggattcgactgatcatcacgagttttacgtatatacaggtcccgaccacaccatatccttactgcagtactccctctatttttttaatatatacgatat

SEQ ID NO: 2215 - DNA, 1670 bp, Oryza sativa
atgaaagctaaagcatggctacatggctttccacttatttgccaagccctacaactacaagttctctcattcaagtttactgcatgtgtaatggtggatacagttacctcggcggtgccatctccacatctaagaacttcatggtccttgatagccttgctctgagcattaagatctttggtaatggctgggattatcttgccctccatatttctagcaatattggctctcaagtcaaactttgcaacaatcatatgtcttattttctcatgcatatccacaatatgcaagtccttagtttttgacacccaactgttgaatgattcagaaagattattattgatgtagtctaccttacatagttcaaaaaaattgctcctactccaaacatatggatgattctcatccaaccattgtattgcatcaggacacttctcctttatcttgtccatgtggtattcatacctctgaaatgtgcagctcttggcagctccccacatgttctaagaaaacaatgtgccatgatacttcttcttcatgttcttccacaagtgtctcatgcactctcggtgttccactcctggatagacatcatctacagctccctctatccctttgcctgttacaacaaaatgacaaggcatgagatacaagtgtacatcacagtcatgaacaaaagaatgcaaaacagaaattacttgttaatatacctgcatcggtgttgatgaccaatcctgtaggagtacctatggcttgcttcaagttctgaataaaccatgtccaactctccttagactcgatttcaatcaccccataggccactagaaatagccaatcgtggccatcgactgcaacagcagctgccaactgacctcttgaccttcctgtcaagtgagttgaatccattgcaatgtaaggacgacatccttgcaggaaaccatcaatgcatggtttaagagctacaaagaatctcttgaaacaaacatccccattatgctcttcagtgtccaactcaacaacactaccagggattgccttcagaagtgcctctttgtaagtcggcaatagatcatagctctcatcccacttcccatatatcatgtccatagccttctccttggccctaaaaaccctgaaatttgggacatccatcttatacttcttattgaccttctcttgcaactcctttggtcccaatgtgggtttctcctttaaccagtccaccaccctatcagctatccatcccttagaagccattgtatcaccacacttattaactgaaaaacaagtgtggtctggcccattaagcttaacctgcatcaaacaatgtcgggtcccaaaactaaagattcggaaatcgacatgtttaactgtatcaagccctggatcagtagattgacacagcttcaacaatctggatcttcattgcgtacatttaaacaaggctccaaagaagatgttattacataaaataataggggaatttacaagactgtggctaactattacagcagaagttatatagtgactcaactctaaggttttgctatagacttaaaccatctaactaatctagatttgaaaactaggttaaaataagactaacttatatgattgaactcctggcttcggcaagaacttcaatttaattctggaaaagggggttgaag

SEQ ID NO: 2216 - DNA, 10853 bp, Oryza sativa
aatgcagcagcatttagtaaaatcttgaattaggtttctaaccaaagtaccatatgagtcccgatactcaattccgtgagcacggctattcgaatagattcaggtttactttactacagtaaatgtacgctttacccgcaatccatgacatgctaatattcattagcttagtcatggcaaagcttttcagttactaacatcagtggcacctgttccatgaactctcatcctcatgcgctctgaacataacattgtcagcagcgcgaggagttctggcgttcccgaggtttttagagagagaactggttgagagacccccgtcatctcaaccaggttttcacaattatatatatacttgagctcaataaatcatttacctgcgcctcggtaaacgtcacatttgcccttcgcggcatataattgcctcctgcgcgaggacttacaatagaaccactgtacagaggtaccacctttgctagataacttactttgcaaggtctgtccccattctagaattgcggtcgtactcgttcgtttgacataagtacttggtaataactatatcgactgagacagtactagccacccggaaatcaaccaattcctacgtactgtcccaatctaagttcattatatttttatacggactaactaggcagggctaagcaaagctagcatatctggtttgctatgttcaggttatgcattcaaaatcatgtatgactaatgcatagaatagagatataagaatatgggataattatgctcaaaggggaggaataataacttgccttgctccaacgcgaataaatcaaggtaggcaacctgattatccgatgctcgaaataccacaggttgccatccagaatataatagactctactagagaagaggaagaaccaatttcaataaaatccataaaataacaagaaaacgataaacaactaaaagggctagggtttagggtataacctatctcctttatagggtgtagggattactgggctaatatgtgtaggttctaaagggttggaggctagaggggattaagtaataattgtcacttatattttatgtgtggtttttggtttcttggagaataggggatataccgaataatctaactggttaagtggatatgtggctagcattggtcgaggttgggctttggtagaagaatggctaggatttagttgttctcgagtcgatgctgaaataggatagcatatcagctcgtatttcatgcataggctatgggtagtagaagggtaaatggttggtatggagttcggatagcaagctgattgaggtaggataaatattagctagggtttaggtgtttgctagttgctgctagagttggacagtataacgactagaactggtatcttttctagccggtatcaacggatagtttaatggctagagggataggaggtttgtgtgggtttagtggggcggaagtgttactccgacaaccgtgagtggcggcggaacagctaggatcacacagagcccaatagctaactgtgcagcgtgctgtggaggtcgagggaatagtgtagctccgaccactataggcatcgaggcgtggggtgccagtagcagcacttcgaccttaggtttggttttgccgggctttacaaccaacggcctgatgtcggggatagtaaaccgcgagcgtccccatggaaggtgtaaagttccaactggcggctttttagtggctaaagggtattttgggacaaaaagaaaatatttaaaaaggcaaatataaattcaaactatatttgaataaattcaaataaaattataaaatagcaaattttgtgtcaaaagatagggtttgaatttagataaatttaggtccaagtttcactgaaatcggatctacggtttaggagatatgggcttctaaagaataggatttgaattaaatagggaaaatacaaaatgttactgtgcaggggcccacctgtcagtctttctttttctttttctcttctttcttcttcttcctcccgtcatcttcctcctctccttcttcccgtgtaacaacagagagagagagagaaggggcgctggggctccagtggccggggatcggcgacgtcggcggcgacttgtgttcccggacgacgcgcacccggggaagtcggtggctggccgagagagaggggaagttggccggaacggcaagtagaagagcttctcttcggctgcaaaggaggtgttgtggtggttgctatggggtgggggagaagggggaaacgggaaaaatgggttcgccggagggaggcaaagccgatggtgcaaggaaactaggagggaagctataggggaggagatcgaccgatggcggcgtcggccggacttggcaggagagagagagctcgaggagctcggctatggggaaggaaacggggtctctccggctatatataagcgaggaaaggcggtggttagaggcggtttcggaggaggagacgaaggggatcacggcaacggcgacgtgaggaagagaatgacggcgccggcttcgttctcctattggctgatgaaggcggtttggtgcagtggctggcgtcagcagggtgaggtggcggttgacgtcagcggcggatgcttagcggcgaaggaaagacggcggcgacggctcaaagttgcgggcggcggcggcaaagccgcgaacggcagcagtggtgacgtgggcgccatgaatacggtggcggcgctcacagggaggaggagggaatcggtttggctgggaggggtagctgggccggcttgggccgtgcaagagagaaggggaattcggcccaatctaaataggaagaaagtctaattttcatagaggtttaatttagaggagagtttgtaattggaagcaatttggatggctaagttttacaaggaattcgaattcggagaatatttgaataataaggtttgaaaggaaattatatccaaatataatttccagaagagatattttctgatttatttgagtgcgatatctttagaggtgaagtttgagggaatttatttggaagcactcaaataggaaataggaatattcaacactataaataatatggctctagatttaaatatttttgagtatgtggagggaatatggaaggagtagaataaatataattttagcccaaaatatatggcatggattctagagaagtatttgaggctaaaaaggaaatttggatcgagaattaaggataggtttaagatcaaagggatggtttaacaattattggaggtttaggttcaaaggaggattttcttggaccaattcataaaagtataaaggattttcaaactaaatttaaataaaggaaatatttggtcgaaagaaggtttaagatgcaaaatcaaatcaaagagaatacctcaatttaacgagaccaatttttagaataaaaccacgaaagattttaaataccaaaaagggattttatgcatgttaattttaggaggtccctctaattgtaatttcttaggtttaggaaggttattaagaacataagaatcggcatgatgcatatttagaaaatagcatatttttagtatgttacaaacaatcaatggacttgttaaaattcacataaaggcacacatgttaaaattcatgattgaaagcatggaaaaaaaatcagcgcactacatagcttgcaaccatcatatttggacttgctggtggatgcaaaaaacgtccacttgcaaccctcctctgctcgcctacactttgccctaaacctatccttgttttttttaacagtttggaaagcataatcatttaagattgcatggcaggttactgctgatttgcactcatcaacatcgcgaaacagcacatctacatcaatgcatggatcattaacatcatatgaaaaatcatgaatatcatcacaatcatcatcatcatcatcatcaacaatttcatcatcaggttcatagctgttgtcggagtcagagcattcagaatcatagcaatcagaatcagatgatgcagccaagtcagtgtcatagctactatcacttagtgccaccaatgattcagtttcggaatatgagccctcctcatcaactccgactgtctcatcactgacccttttccttgtggctcttttggtatgcttagactttgaaataggtggctctaccactttagctgtgggtagggttagatcagcaggaggacacaaagaaatatgtggagcactttcaatttgcagctgcacactatttctgaaatttggatggacccttctttttgtgggagagcattgcaatgggcctttaaattcatcaacatcggcttcaatattggctacttcatgagctatgttcagcgataaccactcatgcaattgctcatcactactaatctcaacccaagcatcatcacaaatacgccagaaagtaatgtattgtttagaacctcacacaattttagagccgatgaaatcaactaactgcagcaatttgaagctagctatgtccacatctgttgtaaaatgcctacttgtgaaataggtctttgggcccccatctggcaaactaaaatgtgaccttactctaacatcaagaatcaaattacatggaacaggcctacaaataggagcaacacaagataaagaacaactttcagtaaaatttttaggtgcttgtaggaatggagacaacatacaacatataaaccctaggttagattagcaatggagacaccaagttcaattagagtaagacacaacatctaaaccctaaattagcactggacacaacatctataccctaaatttgcatggtattgcatctgttcctataacctagcagggtcacaaccacaagcatgcacaggttcacaggatcacaaccacagggtcactgaaagagaatagagggaaaatacctttctatggtaggaataccttgcatggttgagggagcgtcgatgtcggctacctccgagcgctggccctcctaccgtcaccgcgtgtagcacccgtcgccgccccgcaccccacagctcgctgtcgtcgcccccacagcaagccgttgccgcgccaccacagcaagccgtcgccgcgccccacagctcgccgccgccaccctctcagatcggcgccgccccgcgccccatcaaaccgccgccgccctccacctccacaagcgggcgccagcggggctgtacatcacgccgccgccgcctcctcagctcgccgccgcctccccacacagatcggcgccgccgcccccctcagatcggcgtcgacccggaccggacgtgccgccgccactgccctccaccacaacgagcgggcgccggcgggtctgtgcttgacgccgccgccgccccctcagctcgccgccgccgccgcccccttaggccgccgccgccgcacgcgtactcgccgccgccgccgcacgcacgagtgagagagaggtgagaccgtgaggaatgcacgagtgagagagagagagagtcataatagggtttgggctttggagggtattttcgccattaggaactctgtaaagattttcttttttaaaaaattgaaccctaacggagttagcgaaagagggtcagtcggaagcttcgtactcgaaaaggagggtcaaataagcaaagttcaaaaagtagggtcaaatcggcaattacaattcaaaacagggtcaaataagcaattgcccctttaagaaacgttcaaaacatgtcaagattattcccaaacggaagtatcttcttgcctagacagaatattagtgagctgtagtgacatttctttgttgaaaagttgaaatgttcttatgagagcggaaagtgctgccatttcaaaagcagggaatgtgtgactttgcgtccttttcagccaatacactatcattggcacgctttctgtgcttctaaacagttctccctccattttatattataaattgctttgtttttttcaaatttatttaagtttgaccaactttagtaaaaaaaatatagtaacattttcgatataaaacaaacatattatcaaaatatattcaatgttaaatttaataaaagtaatttggtgtttcagatgttgttaattttttctataaatttggttaaacttaaaaacattgactaggaaaaatgttaaaacgactcataatacaaactggaggaagtatgatttttataaaaaagaacttttttatcaatatttctattaaaaaaacaaacttttcaactttctaatgtttagtttactcatttctgcactcaaaaaattgtcataaatccatcagatataaagaacaggctgaaatcgtcatttaaagatagcagatatggtacttattaacataatagcttggctttctcttaaagtcttaatagtatatacttatatacagtagtatacataaatggctttctcttaatatataccgtttttatctcttgtgagtatcatgtttctgtggctttaaaatcacaatgactattatatagcatctcttttacaatgtatatagcaatgagggagtgttcggctaggccccaccttgaagagagagggagaatagagtagcaggggagagatatagggcctgtttggtatagctccaactcctaaatttaactccaagagttgagtctggagtggagttgtgaagctgcctaaacccagctccacaactctagttcattttgtgagagagttccacccagctccactcccagttttggtggagccgaaattgttcggctgagctccaactccagaaggggtgaagctggagctggagctgtgccaaacaggcccataaacaatgggctattttattccttgtgatagtttttatggctaacggtggatcatccaaaatagatctataaggaccatcttcacaacatcttcacaatatacagggacggttgcttgagaggattaagaccccctctaagatgtgtttagttcacgtcaaaattggaagtttgattgaaattagaacgatgtgacagtaaagttgaaagtttgtgtgtgtaggaaagtttttatgtgatggtaaagttggaagtttgaagaaaaagttgggaactaaaccaggccctatttctacatttgtgaacgtcctaagtcaacgtgggtatagccaatcaaacaatatgcataaactaaacattgttttgtggtaaaaacaccaattcagacaacacgcataaactagacagtgttttgtgtaatggtagttgtaggaatattagggcccggtttagttccacagtttgaacccccaaaacgtcacatcgaacttttctacacacacaaacttccagcttttccgtcacatcgttccaatttcaatcaaacctccaattttggcgtggaactaaacacaccttaggatatgatcagtggcgacactagaataaatcggaggggggtgcaccacctcaaccgtacatgtagtggcacacggaattttgaagacatgctatacaagataacaatagtcgatagactatcaaatgttaaacatcatactagatgatggctaagtgtatgatgaaaatgtaattagaaattcctactttataaaatgtaaagtgaagggggcacaataaaaaagatactcaatattgcaagacacatttaagcattgaatagatacgtttgagaggacatgaaagaagagattgagaagatacgcaaaataaggtaagttattaacgtactgattaactgagtattagttatttcaaactgaaaatagattaatatgaatttcaaagcagtttttttatagatttttttttagaaaaacacaatgtttagcagctcagggggagcttgcgtatgaaaaacgagggatttttgtctcccttatgcatcaaactaacgcacctagactagttaagtgggagtactatatattggtgtgtgataaaatttaaaagtcaaggagctagtgccataactcttcaaattgaaatattagtacttaggattgatctgcaatattactccactttccttaatcccagttcaacagtataattatttaaatcctaaaatactgtctagaaacattaaaaataaaaactaaaattgaattttatatctaaactttaagatttgatgtgaagaaatcagacaaactaaagaaataagatgacgaagttatatgcccttgcctctatccaatcaactggcgatagacatgatcagtaaaacgaaaaaacaaaataacaaaatagtaggctcgtgcgaccaagtggccatgcggccgtgcggtcgtcccgccgcactctggccaggcattggggttgcgctttggccaggcattgggggtgcacgtaaccgagctgaggggggtgtacatgtagcaaaaacagaacatcaagtactgaaaacagaaatacagggttgtgcaccccctcagcctgtatagcttcgccccatagaaaagatttgattagaatcttttcttatctctaatacctttcaattctctatccgtgtaagagcatcaccaagagtatcctaatatttcattcccaaaactatttttataggaatcctaaacaaaatttgatgtgctaaaatattgatccctccaagagattgtctaaaattgacttcctaaaactaaaaggtgggccctctacaaaaccactaactgaaatttatttccgtctctccctctgtgagatcactctcgcgaactcctgatcgcggcctcgacaacagcacatcaacagcagcaccagctgcaaaattcaggaaaaacagtagagaacaatagcacgagaaccagcaagcagcaacagataccttaatcttcagcaagtgagtttgagcaatggtgcaagagcagagattgggatcattcacttgcatcgctgaatgaatcaccaacggcaaactgcttcgacggatgaactcatcttcatgagagaccaatcccagcaaaaggaatgagcaactccggccgagtcatggatgatgggagccgatgcaggcgggctgatttgcgtcgtatcgaggcggtggctcaaatggaggcagcgaaggtggttgggggatagacgaggaagttcaccggctgcagtgcagatggggccgctgccgctgccaaagcacaagctgccaacaccggaaaagctttggggagcggcgcatgatttctagccggccgcggcccgcgggggagatggggctgcctgcaggacaccacgatgaggcgacgaatgacctcgcggcgaaccccgggtgagaaaatttcatgtggcgcgggaattcgctcgggagagggagaatgggagctagcgcctctccccacttgtggagaacgaagaatccgggcttgggaattccaaccggtgggagcttggctagggattctgttggactgggtttttgaacgaaaatccccaaatttcaggattggaaaccatatacagatactgttggtgatgctctaactataatccctatatataccagcctaggaatgaattggtatgcttgttgcttttcttttttttttatttttgttgagacgcaaacttttgttaaatttgcagatgacagcaaacatgtgcagcaactacaaggtacacaacggccaaagaagtggttaaacatgaagcgatgcataccatgtttatccaaaaatgatgggagggtttaataacatcatacattgcattcagggggaaagaagtctatcatacatacaacgccctcgtgatcagttacatttacaaggtcttccatttcaaggattccccagaggcaggagtacaagaatacaatgtggaagtggaatgcttataatacatgcattccatgtacaacacaaatattacatgtatagatgaagatccaacggtaaatcgaattatcttatataaaccaaaaggcttggaaccaaatggtctatctatgtacagaattcaatcatatactgaaaaatggtatatcagcaggggagagagaacttttaccagctgaagcatcaatttctgcatgtagcaaagtatggacattactgatcttcagcgaaaaagttcggttctgcaggcttctgtaataaccttgcaggcactctttcctgcaaacgggcctttcgagtggcatttctccgtaagatccgcatcatattaccagcaaaacgtgaagcatatagcgccgcaccaagactgagcgaactcgaaccatcactgacaattgccgcttgcaacctcttctccttctcaaacaaagtatcctccagtttctttctgcagtatctatgccaagctgcctgtataaaacaagctgcccaggttctccattgctgtgaatagaatctaaatgtatgctggagttgtttgctgtggagtctcctgaattgggtggctacaaacttcaagtcatcagccctcaaagcaaaagcttcgacttcagacagcgttttcacagtcctggttgagctgggaaggtttgaagctgaagtagggtcaagtgcccatgtgagaagctcttcaccacaaaaatctccacctttgataatattggagttgaaaaagccagtctgtccaccatttgtcgtcatactctcaagatttcctctcatgatgaagagcatttcattcactgggtctccttcgcgaatgatgcagctgccttctgtgtacagcatgggctttagacgatcacacatggcatccaagagcttctcatccatgttttcaaacattggaacctgcaaatggtgagaaaaagaatgaagggattaattaactaaagggatagccggtaattatcagctaactaggaatctttgtattaagccatcaatga

SEQ ID NO: 2217 - DNA, 13978 bp, Oryza sativa
  unsure (1)..(13978): unsure at all n locations
catgacatgcagttgggcttagtgttgatcgtggaagatgcatgttgtctcaagatgaaggtatgaaagattgtgcgagtctcaagaataacccttttcatatacacccagatgggacaagaatcaggattctctcaaaacatagtagcaaattatgcaaaggtatgagaaaataccctcatgagaagcgacaggcaaagatgcctctttatctctctcctaagattcttaggaagatttgaaagaaggccctcttcatcaacccctcttgtttcttgccacctatattgttcatgacgcagtattcgctccttgaggttatcaggaagtaatcgatgtgccatccattgctctgtgtcacgccgtttcactctcatttcttctatacgcacagaggcagattgtagataggtctgcaaaatacatgcaatagaaaattacgaaaggaagaaatcgagccgcttacacatttaattgtcatcccgattacaccttaaacaacagagttgttttcattacatgtaatataagtaaatagcattgcaaaaaaggagctgtttaaccctttaatttttaaggagaaaaaatgatacataaagagaatatgaattggctatataactcgttaattgtggcttctattgaaaagacaatatgcatgccagagaatagataaagagaacatgcatgtcagagaaacacatctacagtgtactattttcattaaaaaagatactccacacaagttgcatatataaaaaatattaactacttaatccaattatgatcataataaaaatatgacagttgatatattccatacctgcacattaccaataaggagtgcaaacaaaactagacctgatgtcgagacgaaaacagcaaatagattctcccatgtatacgtgcttgtcttaagattttgaccaagagaactgcaacaaataaaaaactatatagaaacaatattgaagtatgtgttcttcaagggaaaataaaacgaaggttatttctacagaccttagattttgcagaccccaccaaaagcaataaaacaatttttcaaagaaactcgttgattgtgaaacattttgaagagctggaagataaattccgaaagttggatctgcattgtcagttccatttgtcgggcaaaaatcttgtaagaaactgttatttctagctgcattactcccacaaaataaagatcccgaatcacagccatcatgtctactacatgcatctttccaacaggtgtcttctcgttgaatggaaagaaggtaccaaagagctccaaggacctgcaagcatttaaagcatcagttagtaatatcttgaccatgaataacaaaatatgtgcaaactgactagcctcttatgaagaactgaatggcgtatcacaggcatgcatcttttattttattttattttattgcagtatatctacaggtaccagatgcttttgcagacattttggatatgccttgttttttctgaaagttataatggagcaattaagtgactgtcatggggattgggctgagaggtcaaggccccagggcagcccacctgtcaagagaatgatatcgccgcctcgtacacgcctacatgatatggtattggttggttagagtctgttggataggattagactggcccttccttccatctatgtaaggatggatgtaacatcgtttggatcagcaatgaattcagaatcagtctccctcaacctaagtcctctctcacccctagcagccatcgctgccccgctatcctcctggcagtgtttatccctatgaaccctggcccataacagagacaatcagttcttcagacatcaacatggtgtccaatatacttgcccatgcagaaagggtaatgttggatgccctctataaacccaggggacaggctgcaagttctaaccccagtgcggggcaggctgtacatgcacatcgcaacttggtttttggctgtcgcttatccagaagaattaaaatgggcctgcactcatgctatagaccctgaagcatcataatatcatttgatacaatttcatgtatcaaccccatgcagtaacaaagtggccctaaacttaggctaacttaagctaaacacagtgttaccacaaagccaacatgcgtcaaacccaactcggattcatatgtctgattcgacatgagaaatactactcgggatcggacatgggtgtagaatccaactcagactctgggcatccaattcagcaaacagttccattgattgctaagaggatatgtccaagatatgatcagctcatccacatatacagatagccagatattgtatgtatggcatgcctcactgtgacaacacattttattgtttctactacgaaatacgatatatagttgcctcagacaatatagagcagattgttaaactaaaaacatggttgatactggatagtggatattactatggtactattgtgctgaaaaatctacattaaacatgttgatctttatttcaatgatgtgacaaagctgaagctaacaagcataaattcttcatggacacgcatctatgagaaaaaaagaatccccatatgacattttttttaatctttgtagatctatgtcccaaaaactaaatactaaagttcattcaggtagaatctttcacgaccacaagcaaagaactattgtcaaacaatattcactgaattatcaccaagaatgaaaattaggcagaagatataaaatggcccaaattagcatgccatgtaatttgtgatgtagaagacttacatgactagcaagcatataaattaaaaggttaaatgcagcaccagcccatgctgtctctgtaattataccagccgatctggtgatttgaaggtacaatggtattattcgaatcaaccgaggtacatattgacaaataactataaccattaatatattttttgccgtcataactgaggagccttgcagacggggtagaactaccaatacgagcacctgataacaaaaataaatactgttacaacttaaacaaaagagatccttaggaatgatacatcaagtcaaccacataacacttgaatgtttgttctacctttgcaactcaaaacaacccgcacatgaaaaaggaacaaaataattcatagaatgcatattcccaatttgttcccatccttacttgtctaaaaacttattgcatgcatgattgagtcaaacatgtatatgtttcatgcataataaaaaccaaacatatcttcagtgcctatattttattatcttctggtttgtattatccattcaattgaatcccccacctatgatacaacagctctatccaatttggccactagaaagcatggaagttcatcaaaccatggtgtagtggcacgatcagtagctgcagatcaatcataaatacatgtcgttttgcacattgacatgataccttaaaattgaactttgaccataactaatttctattgtattatatttaagacctggtaaatttgaaatatatggaagtatttctcaagaaaaatctatacacattatcttcaaatgtccagtctgaatatgtaagtccaaaggtttgtgacaggagggggtagggtacaccagagccaagacaatagttcttcaaagtttttttgaagtgtccagtatatctaacagctacatttaactgattactattgcgttccttaaaatcgtacatgagtaaagtagtacaaaagtgaatgcatattaatatactatgcaaagaacctttatgaccctaacaaacaccagacttataagtagctcattgttttaagtgctcagatctaaaagattaatgaagtaaattgcagatgtacctgaggaaggggcagaacagctaagaaatcaatcagaaaatatgttgatagataccgctttgctattgcaaaggtgtcctcaaccaagacacctcgaccaaacactctagaggaaggagcaataaagcctgtcctgaactgaaaaattatatggagtaaatagaatatatctgtaaaaaatcgcaggacacttgctatgatttccaactttttgtccagatataagcagatattgtcaccatcaatcactggaatatagaagaataacgggtccacagaaactgcaataaggcatgatataacaaatatcttgttccatctctgcaagaatggcccttgaggatcaagaactcttgttttggacttcttttcctcagaagctggtttgttgagggtttcaggatgtgaggaattccctaggaatgaaaaggctcctacagttctatccattagcgagtcaaacacattatgccttccttctaaaactgtcttttcggaaccaacagaatgttctgatctccagtcatgaaatctgcacataaaaaaatagcaggtcaaagtactcctcggaataatgtgcatggcagctatttatattgcaacattttttcagtgtagtagaataagaaatttctgtaagccataaaatgaaccaaattgttagtcatgtggagtaggccttcatgaaatctgaacgaaataaaaattttgtttcagacaccaacacactcttggatgttggtacaaggagtgcacagaagctgacctcacatatttgtcctctcggaaagccatggattccaccaaacaccagcatgcaaaacgagaccaacaaggcagcagaaagggatcaaatcttcaatgtcgcattgcagtatcaactccctgacggtcaccaaccataaatcagtagcatccctcaaaatgcaaagatagcaagtacaataaactggacaaaaattgtgtggcccaaagaccaaggaaagaaatatcaagtccaataacgcgacaaaatgtagataaatcgctagtttcaatagaaaaattatcagtcacaagtgaaatgacagctgtgcagcttgtaattaggcaacagcgataagataagttactccaccaaaacaagtaatggccacataaagtatagatcgagtggtaacgttagcattcaacaattcggttacaagtgagctgaaagtggagctgcaatttcctgctcagcttcaacaactaccgaaaacataaccggtttgtgcgcttgttgggaagaaacagccaaaacaaagaactctcgcggagcagagaacagtaactagtacatgacgagaacccggtgccctgaatccgaatcagttcatggatattcacactacgggccaccagggccaccaattccactagtgaatcgcgcagggacgatggggatcattcccaaatcctgagatgctggagcctagcttcccacctaaccaaaatccgcgaaacctaccccgactgattaagatctgagcgagaagcggcgagcagacgaagtagatcggggggggggggggggggggctaancnggagctatccccacggtggagggagggagggagggagggaagaaggaggaggagcaaaagcttaccggaggggcgcagggcgctggcacggcggcggaggaggtggtggtggtggagaggctactgcaagctgctgctacgaggaacaggcggcggaaaaggccgagagacgcgaggggagagcagagagagagagagagagagagaggctactgcaagctgctgctacgaggaagcggcggcggagaaggccgcgagacgcgaggggagaggagagagagagagagagagagagagagaggagaggagaggcggagttcaatgctggcgccgcatgatgcgggtggtggcggtgattgccgtacgccgtagggaggggacgggaggtggactccagctcgaccttgcctatcgtgagacggtctcgcttcgcaaccagccgttcccccgttccgtctagccactccggtgtttgcttggtaagccagtcgcttttctagttccatacatttaaattttatgcagcgaaaccaactgtatcgtgtacttattattattaacactataactgatatcgataaaatttttttagactatcaaactaagagttcataaaataaattataaacttcttatacattaaccaatacataataatcgataataattgaacatatattcatgaacgaactaaaatcgctgaacacacgtgactactccaaaatccacaggctattgtctctttttccatcgcttctctcccttatctttctctatctatctaaactgcatcatgttctcaaaagaagagaagacgaaggtgtgtcttggatctggattagtgtggcttaactacacatttacgaggaagcgttggtaaaggtgggtaggcgaaaaacaccatgacacaaagaggcggaattcaatgctaacttatgacgtggaatgacgcattaatcgtcatacaatataaggagaggggaggtgaacccagctcaaccaaatcatcaggagccctaatacgatcatgcaaccaaacaaccaaaatattccatattgctcgattcacaccattggtatgcttgtcacgagctcatctctagatatgtcactgtaccatcttccatcttccagtatacgtctttattacgacaacctccaaccatttcaaatacatgccactacatctggttaatcgctaaaaaatcatattagaactagatagtgatagatttgtgagccatatcatttaatttacgagacaacgttttcagttatcactactactttttctaagtattataactaccgtgaataaagttttattttacatatcttctatggtgcataaaattttttcaataataaaaaaaatatttgtgtggcaaccaattgtcgacgtttgatatcgcgactatggtattttgcatagtatggagatcattggtacaagggtatatgcgagattgaggtaaaacagatggagacaaggatttttatacaggtccaggccccttatttgacaggtaatagccctactactgttggttgaagccggtgtttcttatttatcataatcacaccggtacaataattgagataacttatctagctattgtcgacttaacggcatggataaccaactcgtagtcgacgacagggtaatcttcttcctcgagtccatactcggcgagatcagagatagcgctagatctctcttgttggcctccgcagatactatattgggtttgtctaggcttatctctgatatcgatatccggcggcttgtcttgacgtgtgttggcttgtattgatctatgttgatatgttgtgtcttgtggcttccctcctctcctcctagggaggcttgtatttatacccatagatgcccccttatccaagtggaactagagagaccaatatggatataatccgggtagtccttgtcgtttccatatagaactctattcgtccttcaatatacgaggtatgattccgtataagacatggtacatggtggaccatgccgagcttagtcaactaatattaggtatgtggtatccataaccatgacaccaatatagtagatattgcttggatagacatccgagtgaactaaaatctttggaccccacaaccactctatagtttattgagctatcggccattttccctcgttgcttctctctttgactctcttattgtttatatatttccatgaaacctccgtcactatcaacatctattcataactctttatatttccttccatatccttaaaatggatggaacgatagccgttggttgcactttgggtgagtgttgaccttgcgacaaccaagatatgatcgtgcgatgcaataatgggatcagcatggctcaatggtaaggaagtttgtgaccatccctcctctaggttaatatgtacaagctaactggaataatttttctctatctattattttctcgtaaactgtgtacttctataaagattgaatcaacttataaaaataataactatagagtatagaataagatacattgtttattagctaatatttaaaacaataaaatagtcagagcttttcttttaaatagtgtacttgtatatgttagacaagcatttcaagaaggaaaatctgagttcatgttccatttattttaccaaccaggtcttccatatcattttttttatgaaaatgaaaggattttgatacttgtcatgaggtacttgtggatgtatcacgacttatcgatcgtcataggtatataaacgtaaattgcgtcaatgttctacctaaaaatttagaataaccgtactacatattctacgtaataagagtaaggaggaacaaactaccattgcaacacctcgtgcagttctaaactatcccaatttcttttaaaggattgtgtaatccacactcttattaactttggaccattttgttttaaaagtggctccaacagatataatacattgtgacaaaaatcttatattgggatcatggttgttaagtcgtaaagttgagatcgagatacccctagactgacctgtcaaattggttgactagtcaattacttggtcatgcaaaaacagggatgcaatatatagtctttaccactgttatactatgctaagcaatacatgtagtattactgtagagtagaatgcaagatgataagttgataagaaataaaactgaagtactaaacacaataagccaattggtgaattggtgattttctacgactaatctatgactaaccatgactaatcgcatgacttgttatttggtcgagtcgtggttctctagtcgacttgcttgatcgactttactattaatcgcaactagctgggtgacttgataacaatggttgggatgtatggagatttctctatttgacccaatcaaaccaagttcagcttataatggaagatactatggtatgtgtgatggagccaacgacacaccattgagcccagttaactaatatcatttcccataattgattacttttttcatacatcaataataaacaatagagaaccggtagcaaaaaaaatgtaaggatgtaatccgagcggccatccgacctagcaggaggtggctccgccactagtattagaaaaacagaagagtttatttttattttttgtgcacattgaattcaattttattccatatccctgcatagttaagggtgtgtttggatggatattatggcggcttgtattttgtgggtgatggtgggtgggagtgggatagggcggcccagagagaaatattccccttagataccgtatggagggatccggacgatttgcccagacgcagccaactgagcgccctaacggatggagggatctttctgtttttctccctttcccccttttatgtgcgtgtgatttttttatttctctttagaattttgtttgtttgtaatagattggtacttttgtcggccttgtgaatttgaagggggtatactcaccacctgtattcaattgcaaccattcatctatcatactctctctaaccaaaacaaatggatcaccgaaccgaccttcattcttacaagtaaaaaaaaaatcttagatagccatcttcactcaactaaaaaaataaggccgccatattccttttcagttaaatgcatgttacatttgtcggtaatatgtgagccgaagtcacgtaacttcgactgcagatgatcctgattcgaaccagacgtgccctaaactcctgaataatcattattataagaaaagaaaaaaaagaattcctagaaaccggggccatttctagcggagaggaggcagggtccccggggtccacccatacgccacaggggaatctgcccacacccacaccaccgtccccttcctccttcaccccgcccccgccgcttcctcctcccctccaccgccccacgcccccccagatcccccaaccccattattaacccaccgccccccgcgcgcgccactggatctcgcctcgatcgccgcggtggcggtggggaggggagcgcaccgcctgcccagccatgagatggtatgcttcgctagcctgaggagggctctgcctctgctgctgcgcgccaccaccaccaccaccccccgcttccttctccccagggccctctccggcggcgttggcggcggggcggcggtggatgcgcgcgcgcttctccgtgggcacagcgggtggcgcgggctccgggtggccgccaggatgatgctcgactcctccgactccgccgccgctgcggggcagatgcagccgcagcagcgtgcggcgggggccgtcgcctgcagcgcgcaggacggtggtgccgcagggtacgccagcggcgggtgggcgaggtaataatgataataataataataataatgaataatgcgtgtctttacactttcatggttattatagctctatgtatctgtttcgatcctaaaccatctcgttttcgcctctagtgtgaaatgaaccgtgttggcatttgaatgtggtcctttgcgctggggaattggtttggtttgttcagttgtcctgtggtggtagccaattagcatgaagaaacctgctaggccccaaatatgaaggatgcaaatgtagcagatattctgattgctattaatggcttagtggattggttctgcatgatattattcgcgcctgtacaattttgtgaaatagttaatgcgtgaaaagcttatcgtaaaacagtaatgctctaaaaggtggtaattgcgtgctcagcactattctttgcttatagataacaatcttccatttttgtggcaatgtgccgatgcgtatggatgatttttatgtagataccggaagtagtatatacatatgcaatgagttaggggctgtttgattttaagccctaagctgacaaaccaaagtttggcaatgcacatgcttttttgtcctccatttggctggtgaccacaatttgtgtgccctctctatttggcaaaggtaggcaataatttgtgtgctctctctatttggcaaaggtaggcaatagacttaccaaacttttggggacaaaatttgaatggcaatatctgaccaaattttggtggcttagcctatctccatgcccatataaaaaaaatattggtaaaaccaaaacatgtttttttgctacttttttctctaggcacacatttagtcacggttattagatttcaattggacttatagatgatatatatataattatagaagaccttagttttgtatgatgcacaacaagggcgaggtatgaacccatgatggcataaaaatccattgcctagtaagatttaagaatgtgccagcttttgaatttatgattataaagatttaagtacaagagaggaggccctattggacatatgagcttagttccaagaagatcgttatgagtggatttttacagcggatgaagaaacatggtatttgccatactaaagtttataaaccgaagagtatcccaatcacccaaacaaccaaacaatacttgtttgaatatccaccataaaaagtttggttcactttcatgccacaaaaaatgttgaagccatctcagatcagacatatcactttgttcccttccatccaaactcctgactcactaatgttgactcatgcctaggccatgttccatctagtctactacctaaacccagtcgttctgtgctcctttggtccttccccagaattctgttcctgcatcatcttcacagttaatgtcctgcaggtatgatgtttgtgtacccactcaaaattataaggacataattactcctaagagaccaaatataggactacatacatgattaaatagctaatacacgatcttcctcataatatcgcctgctgcattcatcagccaaaatgagcaaagctcactgaaatccttagctcctgtctttaacatactcaaactgggaagttagtggccatggcagcatgactggagcgataggttgtgcctcttacatatggttgcgatggagtcactatctcagcatggaagagcacagtgagggtgaaatcatttgatatgacactgattctcacttagcagggagggcgcagtgatgtgcttgtagatggacatggcattttggagattgcggggtactaggagtaagaaagtaggtaatgcagtggctcaagagacaagcggagcttcagtgaagaaagagtgtagggaggagcaggtctggttgagccattaaatatgatgggggcctggtgataagttgccatcagagactttggatggaagataccatagtggtatcagagagttgcgaagctttggttgtttttggtgaactagactttttatggtatttatgaaaaacaaaaacatttcgggctccttggaagttgaatgctgaaatttcacaggagtttcatagaggcagtttacatccaacaggaatcaggaaaaaaaattccatgttcaaaggagaccttaggttatatacttgatgttctccttaaaaagccatgcaaatagggatggataatgagcaagtttggctcgttagacttggctggtcaggttcattatgataaggagccaacttggatcagctcattaaccttaccgagctaaaagactggctcggcttattttgctaacttgagctggctcgttagcaagctagaaatgttcaaacatgtcatgtacaatttaatatttaccaatttatcatatattagcaaaatagtagcaccaagttatcatatattagtaaaatatttattaaatataaaaggatatgaagtaattctgacattaagtaatacaaatagaatggtcttttatacaaacatgcttaatgagtagcttgcaaactggctggcttggtattggctgattaagctaacgagctaaacagccagtttggcttggcttgtttagaacatgagttcaagctgaactggtccacgagctttgagcgttttgttcacccctacatgggaactccaaaaagggtacatatgcaacatgcccttaggggcatgctattgtacaagtaggtcaattgattagtgttgtcaagaaaagtaggctcctatttacatgattgcatcacagccatatggtactagtggcgctcaaatatatgttttcttaactttggatatacattgagcaccaaaagaggtgtaagcaagttacttttgaccaaactatgcaccttttttaggaaactgtcagtcatacatttcaagcaaaccagtactttatgccataatttatgtgattcccatacttttgtattgaccttttctttctcaattttggtaaagaatttgagcacttgacctagtcctgcattaataagaagactgaattgtgcgatggatcccattccttggaatatgaagtagttctataagtctgtgcttacacaatcatgatggcctcttattctagttttttcctgcatcctattttgactgccttaaaggcttaaacataccatgtttgttcaacatgcaatcatgaccgaatatatcagagtttacaatgtgatctcttttgctggaatatgggacaattaattttatctccaatgtttaaatttccatctctttacaagaatcattcattctctttggactcattatttgacatgctaccttggttaacgtaatgtccgaaaaatttgtgacagagaagatggtaaactgaaatgtggatattcaagttttagagggaagagagccaccatggaggatttctatgatgtaaagttaactgaaatcgatggacaggctgttagcctatttggtgtatttgatggtatggtttccatctttccttgtctactttcgtgattccgtgcccaccatgtttttcttttgaagatttggtgcattaggtcatggaggaccacgtgctgctgagtatttgaaggaaaatttgttcgaaaatcttctgaaacaccctgagttcctgacagatacaaagcttgccataagtaatttttctctttgattcttacctttccagttctctgtt

SEQ ID NO: 2218 - DNA, 7323 bp, Oryza sativa
tgctaacgattatttcctgtaccataatttaaggctagtgacaagggttgcttattttctagacattctggatctgatatctaggtgggatctgaattggtaacttaattactgaactcttgaaagaactaagtttacctgcatggtgctgtttctaatttgcttgggcatgtttggtttcccttcccaacctggctagccttggttcactctacaaaagtgcacatgggagtccggtttcaatactttctagtttttttattcagtttatatttgtcttccccacccatccattaacacctaaagtgcccatgggactcctgtttcaatattttctagttttttttattcagtttatatttgtcttccatacccatccattaacacctaaagattttcacttattcgttttttctagctatggcactgtcagaagatcacaaacctaacaggagtgatgagcggaagagaattgaaaatgcaggaggagttgtcatttgggctggtaagctaaatcttcattcttggatgcactgggcatagtttgcctttgtaagctcacatggacaaggcaggttgcacaaggcttgtccatttggtgccttctgatctccttgtagtttatgttaggttctctatgtcatacctgggttgtttagcattgcagccttatttacctaaaatcatgccatctctgtatatatttttctgtttgttttttaaaagtgagtttattcccaggtacttggagggtaggaggtgtactggcaatgtcgcgtgcatttggcaatcgtctactgaagccatttgtggtggcagagcctgaaattcaggtatcttattgcacttaatcatgctatgatttgtaggcctcattttatgtagtttaacctactctagttaaaggcttagcctagtctagatgaaagtcagaataggaggtatttgcagttcaacttgtctctttgtatgactcctctgctgtataattctgatcatgaccatatagcttgtgtgtgaagcttgattaatgtcttaagaaattacaggaagaacttgtcaatgaagacttggaatgcctcgttcttgctagcgatggactttgggatgtcgtggaaaatgaggtaataaaccaccaagcacattatctcaacctgaaaacgattcgaatttctcaatgaaaccactgctgcttatgtagcattgaacaaagcatcactttattgtcttctctgtctgatctgggtatacatttttaatgattgctaaattctctgataattctgttaccaaaataggaagctgtttcccttgcgaaaacagaagacctgcctgagtcggtggctaggaaactcacggaaatagcctattctcgaggcagcgctgacaacattacatgcatcgtggtgcaatttcaccatgataaaactgaataataagatgggactagagctgatgaaaggttgaaggtttttctacttcaagctactttccagcagtccaaccacagagggggttccccaggagatgttgctcctgtagcatttgctaaggattgtttcgttgattcttttccttgtgtaggaatcattttttgttttcagaggtgttacgaacagaaaattttatttcgagtgtaacacacagttttaattggatggatactaataaatcaattgcttgtttacctaattacctgccattacgggcatggcatataattctcgatgatatatagttcttttttggcaatagtagggtacataggtctgtttaatgttttgcatggtccgaatttcaacaagcttaatgttgattctgggccgaacttgtgtggatcatttggtccatttaacgttagtgacgggccaaatttaactatgctcatatgcataataacttatcaatagccgaagcaaagcgatacaacaattgcggtttagcgtacaccccaatgataaaatggtgagattaggcccgcaaacaacattatttggcctaagcttgttgtaactaaatttagcccaccctcacattaacgggtagaattaagcactgttaacacaggccggatttactcattaaacaatctgaagctggttaaaacaggccctaaaactgctaaatcagacggacaaatgacgattaccgtcctagttaaacatgccgaatttagctaacttcggcttaatcgtaagtttactgggccgcttaatcgtaagtttactgggccagagacaccagtcaccttagagcactgatcacacgcatgaacacaatgatttcagagaaaaaaaacctttcagtacaggcaagatttcagagaagcttgtgtatcagatacaaactgtcatactctggaccatatcttctccggtcgagaggatagctatgtaggagtaactccaaaatcaagatgcaatagtctacagaaagaacagtccaacgaaggattacaatctttttctttaacaattggcattttctagtgctctgagctgtatcttttatgcgttattgcatttcctgttggccatgaacaaaagcaacaacactcaaaagtacaaaaaaaaaaaaagagttcagtgataacacacaggagaacaaggccagacataacaagacaggaaaacaatgttacttctcaatgaaaataaccaagcacttgcccgcccacattctgcttaattgcttcctcatgatccagtacaccatttggagttgtgatcacgacatagccccactgcatgacaaacagcgcactgagtcagcaataatacactatgtaaaataaggggtgtagaagtgataatgaattgagttacgacgataactcaatcacaaaaacgctaggtaacaccaattagttgcttaatattaatgaaagtgggcaaaaaaaaccatgtttttgcgagaaatcaaatttgccaatgtggcctatcaccctgaagggatagccaatggtccatggatcttatcatttgctttgttttctgaaagggactttgcatcagtgacacttaacaaacatgctagttataattcttctcatcatccatattctatcaattcagctccttaaaaatatttttcaaaatggattttacactgccatgttgaaagagtttgctgtgtcagaaaataattgcaacaaagaagatacagtacgatcgtgttaactacaaacatcaattatgaagttttctaaggaattaaatgttcatgatactaagatattgtaggctactgtctgatctagttaaatattttgttgctcctatacatgatttactttacatgattgacattacatacattccgttactttcaacaagagagtacataaaatatctagcatttaaaaccaagaacttataggaacttcagcttcttaattctccaagacactatttgcagtgtaaaaaaggataagaagaatagtccaacaactaactaaatatttcaatggtcacaaattagtagatggaatacctgccgtgttggaagcatccgaactctgtattgttctatttccttggctctaatatcctgcctataagtaagagccttacaatctttaatccttccatgaagctctacattgatttttccaactctatggggatcgatgacctcaaactttttaatgtaccctgtaaaatattaaaagcccaaatgtcagaaaaaaactagacaggcaacatatgtgggctaaacaaatggagggcaccgagcaatatcagaatatttccttttgtttttcgcatgaagaagccaaaatacaaggagaaaacaggcgagtcagtatgccaagtatcattttgttttccttgggtctgttatcggtttattgcggtgcataatttcaagtgaccggtgcaatgcaaacactcttgtgttagatgaaatgggtataagaagctcaagcacagaacgatctagggaatagcaaacaaatgcccgacctgacctgaccgattgaagagataaaaggatagtaggatatagcaaagcctaaacatcaagctaccaataaaacaaaaatctagcatcttaagaatatgcacactcgccttcattttccgatagcaatccacagtttcccacaataagaaatgacaatgctaactctaactcatcacatttcgtccatccagatgacgcaaatataagacacaaaaacaagtcaattatctaatctagccgtctaggtaccgaaagatcccaaaaatcgttcttagcatgaccatctcacttcgtgttcgtttctgtagtttcctccgtaaaacccaaaacccccaaaagtaaagcatcatccctcacaactaatccaaacatttgctatgctcggtgggtgggattacttgagtaaagactagtaaatcgcacattgaacccaacagactcctcccccgcccccacatgaatgaaaccctcgtgttcgacagtagtagaacagctcaagcagcagcagcagcaagcagtgcagactacgcgggcggaagcagtaggggcgctccgaaatgaagaggaagcccacctcggtgcttcatgatgttgaggaaggagaccatgacgccggagatgggctgcagcagcgccgtcgccttccccctccgctccgcgttcaccatcgtccgcagcgcgtcgttcaggatccgccgccccatcctctctctcctcgcctcgccgccgccgccgccgccgccgccggagcagatggagttctgcacccgcagcaagggcaacgcacgcacgcacacggccgcacgagtcgcgggctggaaaggaggtgttattcggcctaatgggccttgggcctttggggttacagatgagccttctagggttgctggtgggctttgtgttttctttgtttggaccttcggttatcttgtacttcctccgtcgtagaaaaagattaatttccgattataatgaaaaacatggtatatatccgaaattcgtagtttgtattttcctttttcgaaagcgttgcatgtagtgagtgatttttgatttttgatattcacaggtggaactcataatgcgtctcgttcttagaaacaatctcggtctaagatggaaaaattgccactctcaaactcgtttgaggttagtcaatctcgaggtcacatgtagggataaagtggacaatcccataaaccgtataaaaattcgtttactagtttatttttttatatggtagtataaattttagagaaaaagaattaaataaaaaatgggataagcgggataaaaaatcttgcttgcccgtgccgcttgcatccctaatcacatgtgttgacagaagcacgattgcttagggtagctccacggattgcacttgatagagttaactgagtatcattctcggttcaagccatcaatcaatagtgataactacgctccaagctgatcagttcatttaaaaatgaagatcactttcaatgcttgaactctacctcttaactgcctgaaaagtccccattttttctctcatccccctagatctcctcctcccattcattttgtagtttctctaaattttctccactaaaaaaaggaagcatgcatattatgggttctcccaagatacaatactatggcaatcgctattggttgatggcttgaaccatggtaagagaatgtaaatgttttggtaatgcaaacgtaaatgttttcccatcactctgtgaatggaaacagaacaagcgttaccgtgctttgtttggattcgagcagaagatcacttaccgtaatgttttccgaaaacacttgatatcggacggtaacgagtttgtattgggtccatatcgcttcccatggtacccgatcccgtcgtatgcaaagcaaggcccggtcctgccaatttagtggcccggagcgaagctagaaagatgagccctttaatacaactctgataatataatgatgtttctaataaatgcaaacaagttatatatctttctcctgtgctttctaaatctaagttcatatggtctatggacttctatatctatagcatacatatatgttgtgaggctccttaacttcgagggcctagtgcgatggcatagctcgacccccctagggctgggccttaagcaaacacataataacttgatcagattgcagtgcgaatagattgtggaagaaaactctccaaccaaacagcacctgagtaaaaccttttgcgcgaagtaaggtcgaacacataaggcattgctacgattgcgtaacctagcttattccataaaggtgcttgccttttagcgaaaacaactagtacatacacatgacatagcaaaatcatgctctctcaccaatgttaacaattatttttggagggaagatcatcaccaatgttaatatcaacatatcttaacactgaaagggacctaacacacacagtacaccggcctggttgaaagttcgaaggatgctgttccagctaccaactactatacctcgcattgggtgacatgaatatacatctctacaaggcacaaggtgattactagctcacaaggtgatcatcatcattctgtcccatcatgcctgttttctctctagccatcttgtggaatgctctttatttcactgtcaggccgtccttttcccccacaaaaagaaaataatgctggtggctccaccttttgtcatcactgatcagctctggtttctgttttattttgagcttttgataattgagtaggtgcaccctatgatggctggtttctgggacatgccaaattttgcatgcctcatcattattcacctcttttggtcattaaattagtcctcctctgtggtaaaagaaaaactactcccatatgtctgtcttatgtgcattattatcaggaagagaatatggaaaggttgttcttgataagtactctcctcattcctaaatataagaacctaatactcgatgggattgtctatatttgcagtattatgatatgtcccatctaatattatgttttttatatcttgggacgaagaaaatactaggtaaggagaaacttttgactctaaccatatatgtgtgacctgcgaccacacaatattgttaccatcaggaaaaaattagtatcatgtatatatggagaacattaatttatatgaatacatcttccctatgtctactctttgctaggaatgaccatttcaacttatctattgccaaagtgcaatcatccttaagtccaagcaacccatcgaatatcagaaaacccaacaacaaagaaacatattgattaagtattaacattgctaatgggactcaaaactgtggcaataaactgcacatatctatat

SEQ ID NO: 2219 - DNA, 12160 bp, Oryza sativa
atcatttgtctcacaagaagaaatatttcagtccaagaagctatagaggatttgcaaagaaagtaacatgcataacccttttttatatggagatcatcattttaatggcatggagcatttagacctcaaggaacaacaagatattcagaaacacaaccccttcgactcaagtttgcaaagatatataagttcagaatagagtttgccttggtcacccatatatattttttagagaaggttttttttttacccagcctctatatccaatcgaatatatgcagcattttttttaaaaaccggaacttagctattccccttccttcccattccaaatctcatgtataaaagacgctccttgaccaatctttacctacttaaaacattggtagagtttttgtcttccatcaatcgaataatcatgatccttcatccaatagatctaacagcaagatccctactcctcgactcctgcccctcgctttccgtctccgccccccgcttcttcagttagttgatgagcataaaagaagccatatcggacatggagagagaaagaggagaactgatttgttgatgatcggactccaatcaccctaaacaaaatcagtattaccaaaggaaaaggaagagattgatcgattaatttcataggttgagttgatttgaacgcgatgggccgaggtcctgcaacgtgcggtggcaagagagctcttggttggtgccgactgctttgtgaggaggcaattgaggggaggtccggcagcggattcctatattgtcgatggatcttatcgatgttttgcatctttacaatgataagctatctaatgtgattattattattattgttgtaaaaacctgagataatatgtggtttaatatatttgtcttcacccattgcaacgcgcaggtattcttgctagtcgagtgtacggaagaagagaacaaaaatattaaaccaagttcaccatatcgtatcctgttgcaacgcacccagcagctagtttcttggaaaaaggtaagtgggtccggtgcaattgtgcaaatccccctccctctgtccctcaccggtgtgtggcctcgcttcccattggctccggcgccctcgattcgtacggtgaacggcaaggcacaccgcggcttaaacacagcgtttgctcggttgcaccggaaacctcacctcactctcctcagctagctgcttaattacttgcagctagctcagctgcccggaatggtggagatggacgccggcggccggccggagccaagtccaccgtcgggccagtgctcctccgccgtcaccatgcgcatcaacgcgcccgtccacctcgtaagtgctcaggctcacccatctgatctctccagtagcgccaaacctgtcaatctttcgatcggccggttaattaatttctcttctctgaaatttggttcttgcattgatttttgagacttcttgatcttggatgtgtgtttcttgggtctctctttgttttcactgataatgatgttgtatatgctagctcttgctggcagtttaccagcacacgctgaaacttcactgaaaacgaagattttccacgaaaaaaaatgaaataagtacacaagtggaagagaacaggttgcagaagttcagaagaactgaacctaaaaaaataagtgttttttcccctcgagagttagctgaatttttacaaatttaaatgaagccctctgttttagatatactcttctagtagctaatggacaacaacaatggaaaatggatcaagtgtatgcgtatctgcaggtaattaaggtcttccagctgctatatatacattacgttgtaggttgttagatgcatcttgaagaaaaaacaagattcaaacaaatatgtgaaacaggctcgtcctttgtttgttcaaaagtttgatgagcctctgcattcaatgacaaattgataatagcaagaagaatatatgttttgtatgctaacagacctagagggatgtctgttaccatcctgttgctctttcttcgcaaaatccatattattataaagggaaagttttaagtgttttaatgagtatcattatagacaaagcacattgaaaagaacatcagctagaagtaattggtaagacaagaatcttactttttccttttttggcatgcacttatgtttcattaattgtagggacaagctagtccctctgtttcatccatatttcttgaatttacttatatatattatagagaaaatcccctgtgtatccctgaaagttcacctaatcccttctgtacctttgaattttgctcaatcccttaaatatccctgaattttagtttggatcctttccatgccctttccgctagttgactgttaaattcttatgaaaaagtccattttaccctttggtataaagaagcatataaattaatagagtatattgttgaagcatagaaatttgttatatgagactattatgtttatgagatagttatgcaccatattatttgcgataaatatacttttagatgtgatataaaaaattaatacttatttattagttattaatagatttttttagcatatgtgttctgatagtaataaataaatctgttgtattactatgaaaacacatatgctacataaaagaacttttaataactaataaataagtattaactttttatatcatatgtaaaagtaaatttgtcacaaataatatggtgcatcacatactcataaatataatagtctcatccaataaatttttacattctaacaatatacttcattaatttattatgtttcttcatagcaaagggcaaaatggactttttcaaaagaatttaacggtcaactaacagtcaactagcggaaagggcatggaagggatccaaactaaaattcaagggtatgtaagagattgagcaaaattcagggatatagaagggattaggtgaactttcatgggtacataggggattttctctatattatataatgcaatcagtcttacttttttttatcctgttgttttattaaaacgagatacaattagatatcggtattttttttaataaaacaagtataacttccaaactcgtgtaccaactagagctttaaaaatcatattaatccatatcaacatttgaattttagtgggttgagttatgcatccacaacttctgtaggaatgactgtaaattgtagatgattttgatcacttattctctagtccggtggccttagtctgatgtggttcttgtagatagacttaaatcatagaactaaatcaaaatgttagggatgaaacacttttttggtgtagtgcagttgtaggtgtatgattctgcccactacagttttactctccgtgctcatatttacacacacaagatcttgcgcttaataagtatgtaggaatcttgtttatttcactgttttatgtttgatttttatctttcagtttgttttagaggggtgcatttatgtgcatgtacagtggtgtagatgtgcgtcttcagtgtaataaagaaaataatcttacatcatatacccattgtaaggaaagggccttactcttgtaaactgccagatgtccatttttcatcaacaacatactgaaaaactatctaatttcacctcacaattatcaaaatatgtaatcagttgtaaataagattatattgtaccagacatcaaaataagaagtggaaggatgagaaaaagatattactgagctttgtcaaattgtaactaaagatggtcttcttccccaaaagtgaaattttctcttatcagttaaatgaatttgattcactaaaaaaattactgaatttaaatgtaccagtttgataccaacattttttttaactctgcttccaagattcctctgttggcagtttacgccatggtttcatatctcctcttcctaaccggccaaataaatcagattgcatctctagtcaatgccttccagctgctatgcatactgtgaaagttttctgaatccatctgaagccaaacatgtttgtaatgttatgcagttgtttcagctgctagcctgctaccatcctaatttgtctatttgaacggcagaattattcaacaaatgtgtcaagcaggcatatcgatcccgatgttccacttttctgaacattagctaaagcagaaaggacagtctgtgttttcgtttatttccacttcattgaataccttataatggataacctggctgctgcgtcaaagacgcacaaagcatagcatgacacatatcattacaataattccacaccaagaagaataatatgcatgaccccactaacttgtttctgatgatagtttaggtgtttcatttttggcaaattctaatagcccaccaagaagaataacttgcatgagcccaccaagttgtttctatcttcataaccagatgcatgagaatcttacttttatttctttctttttggaaatgtttttatctttcattcattaattaagctttgaacataccagctggtgggtctaccaatattttgcagtagaaattagtagtcaaagttacatctcaaatcaataccggtggatgttcaaaacaacatctttaaccacaagagtacctatctgactgaaaaaaaatactacatctgtcccattataagtgcagttgtgggtttacgtgtccaattttgattgtctgtcttatttaaaaatttatgaaaaataaaaaaaatattagtcatatataaaatactattcatgttttatcatctaataacaataaaaatactatcataaaaaaatttcaaataagacagacggtcaaatgttgaatataaacagtgtaaaaccataatttttctaggatggaggtagtaagttatcgtctgcactagagcactaggagggagtttttaagagggattgaaagtttagaggaatgagactattaagtgttttgtttggttgggagacatagaaattttggtgggataaggatggggaattgagaaggaactctctccttttcaatacctgtgtaggggcatccgggcatgtaattgggagggaattcctcctttactttgtctaagcaaatctcagccatccgtttttattgatgacctaatcaccaactaaactccctgtcaatttctatcacctccaccaaacaagatattgaaattaaaaataaaatgtccatcttaatctcatcatcaattccctcgttgaaacttccaattcccttcactcgagttaccaaacaagccgtagaatttcctggcggattgaagtttttttttttggcttccggtcacttgcaggtttggtccatagtgagaagatttgaagagccacacatcttccagcccttcgtgcgcggctgcacgatgcgagggagtactagtctcgccgttggttgtgtgcgagaggttgatttcaagtcgggcttccctgccaagagcagtgtagaaaggcttgagatccttgacgacaaggagcacgtcttcggtgtcaggatcattggaggtgaccataggctcaaggtatgctcgttcatatctcagaggcctgtttgatttgtcactaaacgaattctacaaccaagatttgacgttattgacttttggtaagtttgctaaatatttcgtattaccaaaatttatgtttttactttttttttctttcccccccgatgtaagactctcctttttccttctaatataaccagcaattctcttaccatctactataaattttttttttgttgaagtaacgttcggtttaaagcctcattaaattttggtgtggttttaaattccacctactttctaaggatctgtttggttgagctcgtagaagctacagcttctccaagaatcaaaagttcttccaaatactttagatttttatctagattttaaaaagtagttatagaatcaagaaaataaactagaagccagaagctggttttccgacttctccttattctcactagttgcttatctgaatccaaagctctctatacagggccttaacatctgtgtatattttaggctggaggcagtacatattttgtctggtgtatatcaaaatttggtaggttgaatttatcaacaaaccaagctgtctccatattttttgatgacatagaaaattaatcagtttgatcatggatggccaacctaaagcaaaaaaaaaaggagtagctaggtagtattccctccgttccatatgataagtggtttgacctttttttctagtcaaactttgttaagattgatcaagtttatggaaaaatttagcaatatataaaatattagattaatttcattagatctaacattgaatatatttttttaatagtttgttttgcgttgaaaacactactatattttttgaaaacttattcaaatttgaagaggtttgactaaaaaaaagtaaataacttataatatgaaatggatggagtaatatttgttacagaaatggttcaaactaacaaatagaatccgacagacacatttgcggagtagaatttgtgttctaaaaatgggcgaacatgttcactaatattcatggtaaacatgttcatccctttagtcctacataataagacatactccatccattaaaaaaaattaattctatatgtgtccagatttatctttaaatgaattttttttggacggagggagtactttttttcctcacattgaaaaatattacacatacaaaaaatcttgcaccccacaagctcacccaattaagcgtataatttccactttcaagtttcaatatgactcacaccatagtgaaaaatattacacaatgttgcagtacagtaattcttctcggtttttttttttgtgacaagagtcaaagtaatgtggaaatcctcgaaaaaaaaatagtaacgtggaaatctcctagaaaagcctgatcagtatatgaaaagatagaacgaatgctttcccatcctggtgttgtcgtgcttgtgtaggttaggccaactactgtctactggctggctgaccacaaacataaattaattaattaactgatgatcccatgcttaattaattttttaatagttaaaaaggtttgtatctccaatctctgcttttgagactatttatattctgcagaattactcgtcagtgttgacggccaagcccgaggccatcgacggcgagccggcgacgctggtgtcggagtccttcgtcgtcgacgtccccgaagggaacaccgccgacgagacgcgccacttcgtcgagttcctcatccggtgcaacctcaggtcactcgcgatggtttctcaacgtctcctgcttgcccagggggatctcgccgagcctcctgcacaatgactggattttagacaagacattaattggagggtttttttttttttgcattgttggcttgttgccatttgcatagcagcagcaaaattggggtaatcccagaagtatacatattcttttacgtgatgctaggtgaggaaggttactactgtaataccgtcgtcgagatatatgttagagtgcgtgacccaatccaccaatcatgggtcattaaggtcacattagactggcaacatcacatgttcaaccagaaccataactttactttataggtttacacaactcgaaaaactagacttgtagatatggatcaggctactcctatttaaattaccaaaatgaaactaaacttaacaatctcctctttcacacatcaggtccaacaatctactcatttacatcaactcatatgatcacaaagacttgtctgtgagctatgcttaacaatccctctcgtcatatcagagcccatacgaccctaattaaagacttgttaatatcattccctatcatatcaacccatatgacatcgaaaatttatttacgcgccatgcctaccatcaatctatcatattgtataagagctcatacaaccccagagacttgttctgagctcccccataacctcgtgaccctaggaaattgatccacgtttctaaactccagttctgataccacttgttttattgcaaagctcgttccactaaatgtggtccttccaaatcacattgggtctaatacaccaataaatctaaccacatgcacaactttagatcatatatttacacaacccaaaaggttattatgaggtgtgagaatttataatttccaccttttaagttatgctttctcatcatcaaatacttatataagaataaatctaacaaaatatagttataatcctttatattttaccaaacttgggtatagaacgatatatgaaacatgtttagattgctaccttgacatgccaaaatttagcataaggtgtgtttagtttttttgtgtaaagtttttgaagtatacagacacacatttgatgtattaaacgtagactaataacaaaacaaattacatatttcgcctgtaaactgcgagacgaatttattaagcctaattaatccatcattagcaaatgtttactgtagcatcacattgtcaaattatgacgtaattaggcttaaaagattcgtctcgcaatttacatgcaaactgtgcaattggttttttcccccacatttaataccccatgtatgtgtccaaatatttgatgtgacgtttttgaccaatttttttttaggatctaaacaatgcctaactggaaagatcgtagcggatcaaacagcaacatctatccctgacagtgtccccatgcatgcataatacgacataaatataattaatgcaccatttgactgtgcattgcgtaaataaattactttgtataattattttaagttctatattgtcaaccaatcgctctatatatataccttaatttgcgatagtcaactcgattgcgatgcccgtggtgtggtaccagcgtggtcactacattggattggacaacactttaggtccatgaattattactgtgaaagtgttttgacaaacagtaataagtcattagttttgtcaaatgggatgaaatgaagccatttattgcatagtccaaattaggcccacacttctacgttaaatgggctgaaattaggtcgacccgatcgaatgtaaaatagaaaaagtatactttgactccctcaagtatcgcccgagtattattcatgtcctccgaccataaaaccgggtatatcgactcttctaactatcaaaaccggtgcaaacaatacccctcagtggttttggaggacgtggcgcctacatggcggtcttgactaagtctttgtccaacgtggcgcttacgtggcactagaataaaaccaaaaataaaaaatatgtgggacccatacgtcattcacacgaagaagtacggtggaaccactgacatgtgggacccacatgtcatcctccctctcctctcctctctccgttatctctccccccccggcctttctgttcactgcggcggggacgacagtggggagcggcggtcgggacaacagcggtggggagcgggcggtggtggcggtggggacgaggcggtggggaacggttgcggcgacggtcagttgctgcggcagcggcggtagcggtggggagcggcggcggcgacggtcggctgcggcagcagcggtggcggtggggagcgacggcagcgacggtcggcggcggcagcggtggcggcgacggtcggcggcagcggcggttgcggtggggacgaggcggtggggagcggcggcggcgacagtcagctgcggcagtggcagtggcggtggggagcggctgcggtggcggtggggacgatggtggcggggagcggcggcagctgttgcggtggggagtggcagctttgctcgcgccctcgcccgcacagaacgttaggcagccgctctgctccagccgccgcgccatctcctccggcatcatcatcgccgccgtctcctcatccggcacgcattccacatagccgagatcggtgttgtccctgctcacctctaacatggccgcggtcttcttggggctcgggtactccgcggagcttgggcgccgccgtttcttgccctttttcattgcaatcatggcgcaaagaagcacggccatgaacgatccggcggtagccgcaccgaatgaatccaactagctgatgttgtcacgttgcagtccgtcgccggtggccgcggcactctgcatcgggggagcggtggagctgttcttgccaggtccgtgaaagaagaggaggtgggacccctggcacttgcggtggagaacctcgccccagagctctggattgcgaacgcggcggcgcccatctgcgccatgacgggggtgatcgacacaatactctttcttttaatgacatatgggtcccacattttttaaaaattttattctaatgacacgtaagcgccacgtaggacaaagacttgtcaagaccgccacatcagccaaaaccatctccaaaaccacagagggatattgtttgcaccggttttgatagttggaggagtggatttacccggttttatggttggaggatatgaatcatacttgggtgatagttgagggagtcaaagtatactttttccatgtaaaattaattaagcctcccacgagataaaatgggtcgtaaattgacaaattaattaggcccatttcaaagttccaacgattaataagctggatttaggcctattgatgggctaaattagaccactcaaatcgcgcaagtttcaactttcagttcagaaagggctttgtgttcaacatgcgcggtcgcccactcccacggtcatctacatctaagcatgtggatctccctccactcgttttctgcgtgcataattcccaaactgccgatgtgttctttaaaaaagtttctatacgaaagttacttaaaaaaatcatattattctatttttttaaaaaaatagataatatttaattaatcacgcaccaatagaccgttttattttccgtgtgcaattcgcttatcggtaaccagctccaacaaacacacactaaacaattaaacatgggagtccctattgcgaatttcctgcagtttacaaatccgttggatcgttttttcttaacaaaactcggaataaaaaaatggatgggattagtttacccaatcttttgatgatgatgctctttactataccgtagtaaaaaaatcaacagcgaaagcaacgagtgagagaaaggtgggtggtgcgccgcaagtgcatgcgccgcccaaaccggcctattggattggattttggcccggtcgtgctggaacaccaacacatactttgctttatacttggccggctgatctagtgtccacagcattttgcacctgtcatgcgtacggtatatctttatgtttgtctccatggtggattccactcaaatatatactgtctagctaggacgagattgtgatattttctaatacaacaaacttaaaattaaaagagaggggtatatctagattcattttattagaaaatatcatatccgatccgttgattttttataggacggagaaagtatgtactaccacttgaaaaaacaactttgtacatttttatactccaacactgattaattaccgtgcgacttagtaattcacaactaaatattatatatatatattttgttttcctttggaagcaccaattgtaattaaggtgtggtggagtcgtgttggtgggtacatacatgattttaaccattacgattattttttctatttttgtaagtattatacattcgataattaagattataacgaagcacagacaaatattatagtcgcacgtacgaatacgttttcggtggaatccgttttcggtggaatcctgatgtagtcgggtatctgatgacgctagtctctttaaccatatcttaggagatgcattgatcatgtccgatgcgcgcactcgtagaattaaaaaataaatctcttgttttaagaaaagatgaatttgcaggagaggggttgacattattcaaaaagaaaaagactcaattattctcgaacttgttgaatagttaaattggtcgaacaacaaccttttatccctgcacagcttatccggagtatcgtaccttatcatgtatccagcatgtgtccctacttatctcgcatggatgcggtttctcatgcggagataagggtaccaaaggaaaa

SEQ ID NO: 2220 - DNA, 615 bp, Oryza sativa
tagaggatcccctgggtacgcacttgaagataacctgcctgagatctgggacatctgtattatcatccagcaacaatgcacatgcccgcgccagtaacaatgcggcctgatcaagatctttcagtgtcctgagtctttttttttgcccggttttctttgcttcgcggataatgtccagaattagcatatcaagcacatcaacggcatcgtctaatgccgttatttcctgtgctttaacgaatgcagtaagtacagcaagctttctctgctgtggcattcgagcgatatattttaccgacgccatgccagcataacgagccagattacgcagttgaatggcaggcagaccggaaaagttcagtcgggaaaactcaagacttcgtaatcggatatatcgttccagcgcttcattaaacgcaggtccactgactgtaacagggccttttttcaactgttccagtgctgatacacgctgaccttccggaatgaccagaagctccatcacttgagctgcctgccatttgttcggcagtgcggccagctttttccacagccgctgatttgccctttcacgaatttcactgatgagacgtactagtgtggttgctccgggca

SEQ ID NO: 2221 - DNA, 559 bp, Oryza sativa
caatgtttgcttttcatgcgctggagagagttccgtggatgaggcagttgatgctgacggaatgcgtccaataatggagctcaccttgtgactttgcgagtaatgtgtatggatatctccaaaattcactgaagagaaatagaggatgctattgctcctgtcctaaggaccagttcggataaatggatgtcggatatatattatctaattttgtgataatactcgagagttaacaataaattaattattgtaaattggaaaaagtacaaattaccccctgaactatcgcggtcgatcgaattacccccctgaatctgaaaccagacattgttcaccctgaacttttaatatcggacgaattatccccccttagacccaatccagagcgattttttcctacatagcgtacgcgtgtcaatccaatcaacattttcttttaaaaaattggtgggacccacctgtcatttctccccttcacctctctctgcgcaaaggggccggcggcggacgaccgcaacgtaagaccaggaggggcatggatgaggatggacgccgccac

SEQ ID NO: 2222 - DNA, 5906 bp, Oryza sativa
gcccgcggttatgggcggtcgaccagattcaccgtgattagtttcaccctagttagcttttggaactggttagttcaggtggtggtttgggcctgtggcaacgtggtgtaacgttggacagtgattggttaatatggattaattactacaactgttttactgctttcaactactgctttgaaatgccggctttatgcaaaagaacctttagcctccccttggatatatcttgcatcatacctcctcttccggtgtgacttgctgagtacagtgggtagtactcagtcttgctctcttttcccccacaccagagttgaagtccttctcagttgaagatgtctcggagaggttggtttcgtcgctgccgtcaaggtttgcctgtggaatggagtcgcccgctgcaggagtcaagtcttcaggcttagctcgcttgtatcttttccgctgcatttgtaatcttttatatttttgtaaggcgtgggtctgtatgtcaacaattgtcgtttgtgtaccctggctggtcctggacaggggtttaatacacattcagcttagaaattctggttcgtgaatttctgggcgtgacaggagataacttgtgccgatctcgtgtagtttgaattttcctcaaaactaggtcaccgactaaaaaggcacgagatcgaacattgcgattatgatagcgccgcaacccttgtaaatatcgagccgaccgaatcaaagctgcttcgcgggcttcttccaatcggtgcaagtcatccactcggtcttcttcgtagcgttcttcacggaaattacgaaagcgcaaagactcaaattcgacttcactcggcaacattgcctctgccccatagacaaggaaaaaaggtgactggcctgtggcccgactgggtgtagttcgcaaagaccaaagtaccgatggcagttgttgcacccatttgccggcatagggttttagccggtcaaagacacgcgctttaatcccttgaagtatcatgccattagctcgctccacctgtccattgctcatggggtgtgccactgaggcgtagcaaatcttaattccaaagtcctcacaaaagtctttaaaaactccgccagtgaattgtgtgccattatcagtgattatccgattgggcactccaaatctatgcacaatgttgatgaagaagtctcgagcattatctgctgtgattgtgacaaccggtttagcttcaatccacttggaaaatttatcaatggccacaaagagatgcgtgtaaccgccgactgcctttttaaacgggccaaccatgtcgagcccccaaaccgcaaacggccaagacagcgggatagtttgcaactcttgagctggtaagtgaatttgtctggcgaaaaattggcaaccttcacatgtgcgcacaattttgtcggcgtcggacactgcagtaggccagaaaaaaccctgccggtaagctttgccgacaatggtgcgtgcagcagcatggtttccgcatatcccagaatgtatgtctttcagcaattgtctcccttcctctaaagatacgcagcgttgcagaattcctgaagggcttttcttgtataactcagattcatgcataacataaagtttgctctgccttgaaatccgctcggcttcatctttgtcttgagggagttcttgagaagtcaaaaatcgtatgaggggttctcgccagtcggtttcaaccatagcgacgtcatgagtgcccgcaacttgagtggtatctttgtgaggtactgtcggcgtataaaggtgttcaacgaaaacatcagagggcgccacctcgcgcttggatccaaagttggcaagtctatcggcggcttcattattatgtcgaagaacatgactgagctcgagtccatcgaacttatcttccaatttgcgtacctcttgtcgatacgccatcatgttgtcgtcaaggcaggaccactctttcataacttggtggacaaccagctgtgaatcgcctcgaactattagacgctttatccctagggaaattgcaatccgcagtccatgaaggagggcctcatactcggcgacgttgtgggacgccgaaaaatgtatccaaagcacgtagctcaatctttctccagttggggaaatcaaaaccactcctgctccagtgcccgaaagtcgtttggatccgtcaaaatgcatggtccagtgctccatgttctccgcgggggtatcctcctggcactcggtccattcggcgacaaaatcagctaacgcttgggacttgattgaaatccggggcttgaatgatatgtccaaagacatcaactccaaagcccacttagcaatacgtccgtttgcttcgcggttgtgcagtatatcaccgagtggaaatgatgtgaccaccgttaccgagtgaccttgaaagtagtgagatagcttcctggtagtaattagaataccatataacagcttctgaacctgagggtacctcgttttggagtcggctaggacctcgctgacaaaataaatcggccgctggactttttggacatggccttcttcctcgcgctcaacgaccaagactgtgctcacaacctgggaggtggctgatacgtatagcaacaacggctcctgcgggtgtgatgaggctaagactggtggctcggtgagaagtttcttgaaatcttcgaaggccttttgtgcttcgggtccccactggaagttatctgttttcttcagcagcttaaagaagggcatcccccgctcgccaagtcttgaaacaaatcggctgagcgccgccatgcatccagtcagcttctgaacatctttctgggtacttggcggtttcatgttgaggatagcagtaactttctccgggttggcttggatgcccctatgagacaccataaaaccaagcagcttccctgacggtactccgaaggtgcatttttcagggttcaatttcatcctgaaagcacggatgctcacgaaggtttcttctagatccgagatcaaatcatccttttgcttggtcttgacgactacatcatccacataggcttcaacgttgcggccgatctgcgttgagaagcatctttggatcatacgttgataagttgctcctgcgttttttagtccgaacggcatggtgacatagcaataagctccaaagggcgtgatgaatgaagtcttcaagcagtcagattccttcagtcggatctgatgataccccgagtagcaatccagaaaactgagaagctcacagccggcggttgagtcaactacctggtcaatgcgaggcaacccaaaaggatctttgggacaagacttgttgaggtcggtataatcaacacacatgcgccattgccctgttttcttccgaactagaaccgggtttgccagccagtcgggatgaaggacttctttgatgaagcctgctgctaacagcttggttaattcctccttgatcgcgtccttcctgtcttgtgcgaatcggcggagtcgttgtttgataggcttggcatcttctttgacatgtaaggagtgctcaatcacctctctaggaataccgggcatatcagatggtttccacgcaaagatatctttattgttctgaagaaaggtgatgagcgcgctttcctatttacaatctaactcggcgcctattacagcagttttagtaggatcagagggatctaggggaatcttcttagtcttggcttcgctttctccactttttgaagtcttggtagcaggtatttctccttcgctcgccgtggctgcagccagtcggatatcctctcgggcagacgccatctcgcgggtttgagccatgtcgcaactctccttgtcgcatgtgacggcttgcttgatgtcactccgtagggatagcactcctcggggaccaggcatcttcatcatcatgtaagtgtagtgcgggacggccatgaacttggctaacgccgggcgtccgagtatggcatggtatgctgtctcgaaatcggcgacttcaaagctgatattctctgtgcgaaagttttcccgagtgccgaaagtgaccgggagggtgatctggccgagtggagttgcggataatcctggaattactccgtgaaaaggcgcattgcttggttttaactcggagcgaggaatctgcatatcatccaaggttttggcgaagaggatattgagtgcactgccaccgtcgatgagggttctgcgaagcttgacattacggaccactgggtctagtaccagggggtaccgccccgggtggaccactcggtcaggatgatccgagcggtcaaacttaattgcgatttctgaccatcgaagatactggggcgtgtcgggttgaacagcattgatctctcgttcagtcaacttctgcttccgtttagactcataagctaaggggccgccgaagatatggttgagctccttgcggtggtcttgaaatcctgccggggcgtcgccgtcgtctttcttcctcgacgtgctttgttcttcgtcagagttcttccgtgcagtcttggtgtattgatccgcgaattgcttgtagacgaaacaatctttggccacgtggttggagttaggatggtgcgggcattgggagttcatgatcttgtcgaacgtgttgacgcgcgaacgctgtcgagaagagtgactggcggttgcaacaagttccgcaggcttacgcttgcggtccttatgattgttacttccaccacctcccgtagccggcgtacccttgttttgcttccaactggggcccgactgctttgatgcggtgacggcgtcttcagctttggcgtactcgttggctttttcaaacataagcttgactgtcctgggaggcttacgcccaaacttgccgactagttcttcgtggcgaattcctttggtgaacgcggcgatgatgacgtcgtcggtgatgtcggagatcttgttacgttgttcagaaaatcgccggatgtaatctcgaagggattctccggacttctgaatgacgttgtagagatcatattgtgtgccgggacgctcgaaggtgccttggaagttggcgatgaagtggtcgcgtagttcggcccaagatccaattgtaccacggggcaatccatggagccaagatcgggcggaatccgctaaagccactggtaaatagttcgccatggccttgctgtctcctcctgctgcgcggatcgcgagaccgtagacggtaagccacgattcggggttagtggtgccgtcgtacttctctattccagtcggcttgaagccggctggccaatccactcgacgcaggtcgtcggtgaaggctgctactccgtcaaggtcgtcgtcgtggcggtccggcgagtgatggtagcctcgagctgctcggcgctgtatgattgtgtcgcgaagatcgatggggcggcgacgaggtggtgagcgaggccgttccactcggcgctccctatgaaggtcgggaggtgagtgaacagaccgctcgtcgtgacccctgctcctgcggttggatcctgcgccggtgatgctgaggcttggatgacggtagtcatgagatcggaagtggggaactcggctgccagtcggcgtgtggacgctttcggagttaactgggaccgaagccgcaatcatggtcttcgtctggttcaagatgttgacgacgtggtcggattgattgagctcgttttggttgaggagggtgtcgagaagggtgatcgcggcaaccgcattctgttgaggggtgcggaaaaccggtgtcccttcgacatcttgctggccgatgagatcacgcgctcggcgccctgcttccaaagctcgctgacgtcgatcctgtcacaccccgaagttttcctccctagccaaaatcgtaattttcaaatgaccccaagaaaatgcaggtgaaatcaggagaaaa

SEQ ID NO: 2223 - DNA, 763 bp, Oryza sativa
tcgtagtcgtgacggtccgtcgagtaatggtagcctcgagctgctcggcgctgtatgattgtgtcgcgaagatcgatgggccgccgacgaggtggtgagcaagaccgttccactcggcgctccctatgaaggtcggaaggtgagtgaacagaccgctcgtcgtgacccctgctcctgcggttggatcctgcgccggtgatgctgaggcttggatgacggtagtcatgagatcgaaagtggggaactcggctgccagtcggcgtgtgaacgctttcggagttaactgggaccgaagccgcaatcatggtcttcgtctggttcaagatgttgacgacgtggtcggattgattgagctcgttttggttgaggagggtgtcgagaagggtgatcgcggcaaccgcattctgttgaggggtgcggaaaaccggtgtcccttcgacatcttgctggccgatgagatcacgcgctcggcgccctgcttccaaagctcgctgacgtcgatcctgtcacaccccgaagttttcctccctagccaaaatcgtaattttcaaatgaccccaagaaaatgcaggtgaaatcaggagaaaaccctaagaaagtaatgcaaataataatcggacttgacatgtggaatttttcttaagttctacatgtcaaaattcattaacaggatttttagtggaattttcagagctctagaaataattttaaccaattaaaattgagcaagcaatattttattccagggaaaatcctttttcct

SEQ ID NO: 2224 - DNA, 661 bp, Oryza sativa
tcagaacaaggaagctccggggggcctttgctgaatggtcaggttcaagttacgggcctcttgcatggtggcaatggcagttttcattttcatttctcttccgaatggggtaaggcacaagaacgacctaccttctaatgttcacatatgtttcctaatttaaattaatgcctattatataagtttctaatttcgattgtttgtatttgtaggattccttgtatgatttgctggccctgattcaacattgctccgccccctttacctctttctggatgctgtgtgtatgggtgaacatgctgcgacttttttgagatagttgcaacttgctctacgtttgcgatgatctatgaatttttggtagaacctactttacctgtctgttcctggtaaagatgagaattttgtacctaagatattttccttaagctcaaagattcctggtcctgtttgaaaatgatcggatacggttatatcttaaagatgagaattttgtatctaagatattttccttaagctcaaagattccttttcctgtttgaaaatgaagatacggttatatttgccaagtccaataatggacttcgttatgaagttgtgcacgtgtagtgacgctggatgtcagcatgtgtggttagttgatggatttcccctgccactt

SEQ ID NO: 2225 - DNA, 1299 bp, Oryza sativa
tttggtttggtgatctgaggatggacgccggcgatgaggaagaacatggttcgctcgtctgaacggtgggttatttacccaccttgcagattttaaaagtagtctgagccgatgcaaatttcctctggattcatcgttttccttgatgagttactggctttacagttttagaccttaaaaatcctttgttttcacttatgtttctgtccagtgaaatctctccgttgggatattcagttgcagtgatgagtatctcttttttcgagagcaggtctcgatctgcttgatgagtctgggaaataatcaccttatttcctcctgagcggttacctgagcaactcttagcaccatccaaactctttggagtttccccaacacatctgacttttcttggaatacaattttttttttttgctttcttagcttcttgtttgtctcactttgctgatttaatagattaacgtttgcatataatctcaattttcaggttcattttcaactgcaaattcagaatgtacttaaaaacatcattacgcaagagacacaaactctctagaatggcacacatatcattacatcaagtttagtagaaagctacatcatatgattgaggaccaacacttaacctgcgattgcaagttgccctcaaacaagatcagggcaacgcaagcaacgaaggagatggcaaaaaacacatcccccgacaagttacaatgttcagctacagcagcatccacagatgacacttatgacagatgcatcatctgcttggcacaagacaaccataaggtcgaagaaacttgcaagagcaatgaagaacggtgtgtatggaagagagctatgattgatatgttaggaggcttgatcattcgtcggtctctctggcaggtgattctcctgctccaagaaacggacgacgaggcaggtgatgttgtctgcgcttcccctctgtgaggcctcctggaggagcttctttgcagcctgctctgaatccagaattggcttcaccatggccacagcttcctgggatcacacgagaatacatgttattgcttcatttttttcacaagagaacacatgttattacttgcatttcatataggagattttgagaaattaaaaatacatttcagataggagatttggagattgaaaaaacatgtcattagtactttattactggcttcagacttcagagttcagaaacatgcatttcagagaggagatttggataaattaaaatgattcagagatcagaaacatgcatttcagaaagatatttggagaaattaaaatgat

SEQ ID NO: 2226 - DNA, 12385 bp, Oryza sativa
aagcagccgcccatggcgacacggccgtcgccgcggtcgcgagacagcgcgcggccgaaaagcacaagcgggaggcctccgtcgagcccgcgaagctccgacaccacccgccgctcctccttcaccgccgcctcgtcgtccgacaagccggtgccgtccttcctccgccccaccgtgagctcgtccctgcacagctcgtcttcgtcatcgccgtcgtcgtcgtcgttgttgtcgtcgtctccctcctccaagggcaccggcaccacgccgaggaggtccgcggacaaggccccgtctgcgtctgcagcttcgtcgcggccgatcacgcccaaggacaaggcccccgctgtagcgacgtcgcggccgatcacgcccaaagacaaggccaaggcggcggcggcgtcgacgtcgcgatggtccgcggtgtcgccgaggcagctgatgcagaaggcgtccaatgcctttacaagaggcagcagcagcaagtcgcgcgctgccaagaaagacaaggaggcggccaccccggcggcgacctcggccgccgccaaggacgcggccactccggcgtcgacctcggccgtccgcaagaaggccgccacaccggcgacctcggcggctggaaaggcggtggccggtgcttcgcccgggccgacgagagcccagcccacggaggagcaccaccagcaacccactgaagcgccgccggccgaaccgtcacctgccgccgccgcggtgcaagaagaggcggtgacttcgagagcccagctcacggaggagcaccaccagcaaccacctgaagcgcccgccgagccgtcacctgccgccgtcgccgtgcaagaagaagcagcggctgcggagaccgaagcagagcaagaaaaacaaccggatgagacgccgcaagaagtcgtcgcggcagtggaggagaaagttcaagacgagcaggttagcacggaagcagcggaggaagccatcgccgtcgaggaggatgccgccgccgtgaagaccgatgcgccggagccggaagagacgcagacgcaaaccggtgccattgcagagtcggaaacagagtttcagaggagttcagaggatgagccggcatccgacgccattgtcgaagaagcggcgatcgaatctgcaacgcagaatgagccagatgaaccagaatccaccacggttgaagagatggccgtcgaggaggagatcaagaccgatgagagccaacaagaagagacgccaaaaccagaagagagaatggagaactctgaaacaagcgtgatctctgaagatccaaaagaaatggatgcaatctctgaagaccaaaaggtggaagaacccgtggttgctgaagaacaagaggaactctccgaggttgtaaaaatggctgtcgagccgagcatctcgtcagagccagcaacgccgctggaggaagaagatcgcgacgacgtggagacggagcaagcgaactcgtcggagcccgcaacgacggtggaggaagaagaagatcgcgacgacgtggagacggagcaagcgagctcgtcagaccccgcaacgccgttgaacgaagaagctatcaacgaggagggcacgtcgacggagacggggaagacgaagaaggtggcgttcaaggggagcaaggtgaagacggcgatggagaggcggccggagggggagcagccgaggaagaaggacgtggcgcggagcaacgacgtgatcgaggagaccaagaggacgctgatgatgaagaggaagagcaaggtgaaggcgctggttggggcgttcgagacggtcatggacacccccagcccgggaaaatcgagctgattttgatttggatttttttttctttttttttggagggaaagcttcagcggtgatgcacgtattgagtggtttgaattgaactgcgaggtgtgctttgtggtgtgatgtttcggtttcttgttctctttgttgcattgatcgttgattgattcttctgataactgaaacaaatggaaatgttattgtcgatttgtttgtttgttgatcattcgatctagtgttgtttactaggcttagttgtatgtaactaaaaagggaaatagctgtgtgttcttgagagctgagactggtgtggttgtcaacttgtgctacattgctgagttttgagatttatgcttgtaaacaattattgatgacatgcaatccattttgtacgttttttacatgttcatggatatggatttctttatagtacatgccctcatttcatacatgaaatttgaatatttattgaaaataactaaagaaatgatgatatcatctaccctctctgctccaaaatataaacactagttgaaataccaaaaatataataacttccaatactattgatctcatcaatcacctttcatttaattctttttctgatcttacctctaaccattccgataacaaagtatttttcttgttaggtttactctcagttaatttttttttaataatggaatagaacatcatcctcaacaagctacaaccaattattacatccaaacactcaaagtgagtgtagtctctgttaaataacctagagattattatattttgaaatgaaaggaagtaccattgtatcgtactccctccgtcctacaatataagggattttgagtttttgcagcgtttgaccactcgtcatattcaaaaattttttgcaaatataaaaaacgaaaaagttgtgcttaaagtactgtggataataaaataagtcacaaataataatttaaaatttttttgaataagacaagtggtcaaacgttgcaagcaaaaacttaaaatcccttataatctgggacggagggagtaccaaatttcattttagtagtgtaccaatattacaggcaaaaatacaatgtcggagcctcggaggccactagggtttagataaaagaatatttaccaaaatgcattttatggccagtagggttgagatcatctcaccacaaaatttccgacatagtatacaggcataatctcaacttctcaagattacaggtacacatccgaatcacacaaacggaagaagcgtcatacagaggaggaggagatcgtcgtgccagtcttcagctgagctcgaggaagcgccgtgccatggggtgcttggcctcggacagctccgacggcgggagcacctcgacgacctcgccggcgacgaggaggcagaccaggtcggcgatccgctggatctgcttcacgctgtgcgacaccatcaccgtggtgagccccctcgtcttcttcagccgcacgatcgcctcctcgatgttctgcgtcgagatgggatccaacgcgctcgtcggctcatccagcagaagcacctgcacacacactccaacatcagaatccgatcctgaatccgaaacaccaagatgcgtcgcgttgcaatcagcgaaaaggctgaataatccaacatgcctccggatcgttggcgagggtgcgagccaatgcgacgcgctgcgcctggccgacggagagctcggaggcgggcttggagcagagagcagggtccaggtcggcgaggctcagtaggctctgcacctcggcgtccgtcagcttcttgccctgcagctgtggcccgtatcgcacgttgtcagccacggttcctggcacaagtgtcagaccacttcagtttttttgcatgagaaatatcaaatactcctgtcaaatctgtgtttggtgcattgagcttttgcatctggggggatatatacttgagccatgtgcctcaaatgagaaaaataggactcaatggggaaatggagtgtgccagagtagatcggatctgttgaatcaattttaacttggaataaaaaattaaaattatagctttggaaaacctggcatattaagggtgtgttcttaactacaatttttaagctgttccaatttttactctcttttttacgtgcacgtttcctaaactgcgaaacgatatgtttttttgtaaaaaaaaattctatggaaaggttgctttggaaaattgcgttaatttattattcaatttctttagttaatacttaattaattaggtgctaatgagtcattttgttgtgtgtgctatagaggaagtgtttccaaaatgcaccttcaaacacaaccttagggagcttcgggtagttgtagtttctcccacaataaaaatacttttcaaaatagtttttatcttcaaattaaaatgagttgtagttgtagaatgaaaaaataaactagagcagaagctaggtttttccaaatttctacatattctcaccagccgaatccttacctgttgcttcttagaatttaagctcccctaaacaatcccacggagtcttatgaaatttgactttttaaaacttctttttgtcatgaatcatatgaaatttgaccgttttttactttttttttctagataatatattgaacgccctctgttattttgcttagaataagtccccctgtcgcattgaaacgtcagccacgagcttggaagattctagttactgtaggttactcatcgccacgttggtagaggcgtaccaattgacatgcatgtcccactcaactgacgttagcaagcagtgacatcttctaagaaaaaaaatatttgaagcaagattccacttacgttggtagacaaattaagcatccattttatcaagtacattgcactagctttagaccttgtttaagcctctaataatcagttgacgagtagcgagtagataagaatttggaaaagttaagtttcacaacttctagtttctagtattttttaaaaatattttgtatctactacctccgtctcagaatgtaacaaactaagatggatttaatctcatactagaaatacgaatgttcagattcacagtcgtctcatcctaggttgaaatattctggcaaactgaggagtatcaattatcagaatttaggttagaatctgaactatttaagggagctataaagtctagaagaagttacaactagcaaaagctctcatgtatttggccttagcgtaaaaactctttcaactaaaagtacccgtcctctagtgtaaaagttcactgcaagttgaaaattgatgcggtttcttaggtagaaaaaaacttatcacccatttctaggaaacaagacgagggcaaaaaagtgctcaacttggttttatctgtttatcaaatgctataactcggctttcatttgttaggttttgactgcgacattggtacattttatcattatttcccccttattataacttattattgacacaactaggctaatcaatcgtaagagtggcgaatagttaattattcatatgaaaaatgccaaacctagttgtctgttgatcgtctaaaacttactcgttactgtttttttttttggacaggatcttggtaatctcaaatcaagttcttgtttatttttgaaggaaaagcatctttttgcagagaagaacatttaaatttggaaaaggtaccgcattcatggaatccatgtacagtttcttccaggatcggatcaccgtgcgtatgtgcagtgtgtgtggacagcggcgggcgtacgtacttaccgtcgaacatggcggggagctggaagagcatgccgaccttccggcggagcgcgaggacctcgatgccgcagatgtcgacgccgtcgaggagcacggcgcccggcgcgggctcccagaggcggttgagcgcgcggagcagcgtggacttgccgctgccgctggggccgatgacgccgacgaccaccccgcgcggcacgtccaggtcgacgccccgcaggatctcctcgcctctcgcctccgaccgccgcgtcagcccccgcacccgtatcttcggccccgccgccgccgccgccccttcttccccgacgccgtccacgtccagcaggtgctccctgacatcatgctcttcaaattcgatcgttgatcacacgcacatgtcgtcagcacgtacactggaacacgaagctgacgcacaagagacgacgaggtgtactcgctcacctgaagctgagcccatcggagagacagcggagaggtcgagaggaagacgaaggtgaggggggatcgaagtgggaatccgggcaatgcgcatcgtcttttttattggctttttgccaacttttcccggctccaactgaggtgggcggcttttggagcacgcgtgaacggtgccattcggtggcggccgctggttgcaagcaagggcagcgaagcttggactcgtgtcgtggtgaagggaaagtcccagacgacgcatggcttatcgccgtggtcggtttggacccttgtcgatctacacagtgatcaccaacaatagatgcaatacactgatacagtatcaagtactcgcagcaatgttgctgacagttgccgtggatctgtgtgggaaatacaagattcggttgctagctcttaccccagaaaacaccaggaccagataagcacatcggcaacttggtgttggtgatgaaaagtttggagaggttatatcgcgagcggtgtccgtggttatcaccggtacgacggaaacgtacgcaggattttccgcgtggaccgtgtgcgcggtcatggatagctacgccaccaggcgacgcccgcaccgagacgcacatgcaggttcctctcgtcgtgacaccaagcgtgtgggacgtccgctatctccatatgggcttctgtcaattcgtgtcccatgtaaggcccgcaaagagaactccaattgaacgtttctatgggctgtaccggacggggccttctgtccattccttctctttcacatatcttgacagatcaggccttcaggcccagttctatcccttctccatggcccaaaagctaactgctaatctgatgcccttgctggtcccctgtcattagctttggctccacataccacagcacacatgcgcaaccctagaaactggcagctttgtgttccggaaaaatacaaatggtttacgctggattgattatccaagtcactatctctaactaggaaaaaggaagcgggattatcattatccagatgctatcttgtcagcatcacaccgctatccaacatggcaccattattgaacggaatcagttgttagtaggttgagtcacgattggatggtcaatgccgtaattgctatagctagctagtcctactccagctcgctagttgagctggcgtctttcttggcactgcagtttgatgcaatgttgcacgatggctcaacagtgaaactaatcagcagccactagtatagttctctcccatctcatcaatcattgaaccgtgcaaacagtttcacagcacaacgttacatatagaaacagacggcttgcatgcatgatttcagtccatagctagcttagttatagctactacgagtagtagtactactattgctaccatccggtcctcctagcaagcttgatcggctgagaacatcgtcgtcggtggtcctccaagtctctatcagagaaacccttacaactatcacatcgccagattgacgacgggagacgtgcatgttcaccatcgggtagtagtagcagccgatcgttgaaaggaacagtgcacgtgatgtgatggtctctagctgaactctgaagattaggcagatatactgtagtacatagggtgtcagggaatgctttgcccgttttaaattcagatgaaaacggcaaatgtcagtaacaaccaatagtaagttgtttaaccacaaaggattatgaggaggagtgtccttgacagtggcaacgggtagtacgctgctttcatccgaggcagggtgaataaaaaagcgagagagaactcaagtgcagagaagaacacgatgtacaatcatccagtcggagagccattgattgttcgtcacgagaaacatgtcggctgtacaacaacctctgaggcagtgaacgcagcgttccctgtctaccaccccagaaaaaaaagagagagatactagtacttgaatgcttctgcttcgtgcacaccatacaaaaagtgcatcctctggcaccggataccgtatcgatccagtgatcatcactggatgtcacgaggagacgaactgtgccgaatcatgatcaatgtttttttcgtacgttaccaacacacttcatcaatttttcagatggagaacacgagtagcagtagtacgtgcaaaattctggttcacttccatgtgctcacgggccgtgatcacagggcgcggtgctgatgcgaatcagatcgctgctgccgtgttttgctcgcgctcgcatacgaggtacagcggccatcgcccgcctagtagtgacaaaaagagaaggcgactgccacgcccatacacctccgttgcagacgcaccgctgtgccgctgtgtgctcgcctgcccgagaaacgtacttaaaaaaacggcacgaaaaaccagccgagtacgatggaatcagggagcattcagccatgtcaggaaaccgatttcgtcacggccaaataaacgggatggatgaaaaaacactcgagtaaacacacgaagcgaaatgaacacgggtttacctacggcaccaatgataatgttggtagaaactttctttttacagtggagtgagctcgagtgatgagagagcaaacaagaagaaatggacgcgtggtaacctagccgttgaggcgtgggagtagtggtaggttggggagaagcatacgggccaggagagcacgaggccacgacggtgttgctttcaatgccgcaacatgacgggcaagtacgaggcaagtgtgcggccgccgattgctcctcccacatgtgccactgatagtactactgccactacgctagaatgcaaaacggaaccgagtctagcaacacgacgcaacaaaaaaaccaagaggatagtagatgagaaatgcgagatgggctttagctgctttactaactgagccattgcccgggagatgctttgcaacaggttacaccaaaaagttgcagcgcttttcctcttacacagacaagaattttacacgcatacgaccagctttttttttctttttctctcttgtgtagcatgggctggttgcctggttccctcgtcccccgacccggccgacgcgacgcgccaaaagcccttgtcagcgcacggcgccgcagaagatccacggcgcattgggctacgacgccttcgccggcgccatatgcgggccgtagccgatcgatccaggccgcccgaattcaggaagaaaccagcacctttgcctcgagatccccgcggaaagcaacataccatcaccaccaccatcttatctctctctagcggcgcggctcccgaggcgggcatggcatggactcatcttgcagtcttgtgccccagctgcgtgtaattaccatggtgcccatcacgtgagccacgggttcgggcatagggtgccgtggtttacgtggaagtggcgggggcagtatggggagagaaaaaattgggagcctttttccgggctgcgaagtgggccccgcggaacagcggcctaggtgctagggccgttaagggcgggcgggccccgggcccaccagctcgagcccggccaccgacgcgcgccggctcgtggctcgccgctggcgcggatgggagggagccggctcacgccggcgagctccgataggctcctcgcgctgattacgctcctgccgttgccggagtggacggcggcggagcaggagtaccggccggcctccgtcaccagcatctccgaccggacgaacatcagatcggatggtcgcacctcgctccaccgctgcttcgccgccggtgccgtctcgtcctcgcagccaccggcggtgctcaccaggatgcggtgcccgaaccgccggtcgtaggcttccgggtcaggctccgccaccgcggccgccggctccatcaacagcaccctgtccttgcgaaccttggcggcctcgaagcatcccaccaccgcaccgccgtcgcctccgacgagatcggccgaccggcgtgaggcagggccaaccctccctggcgcccgtaccgaccccgtcgagtgccggccggagaagaagcctctaaacgctggagacggagcaggagcagcaggagctaagctcgcctccttgtccttggccgtagcagccgccgccgccgccgccaccttcgtctccggcggatcagggggccccgtggtggacggctttggcggctccgggaggagcaggacgtcctcggggtcgacgcgggagcggcacagcgggcacgtcgagtgcgcgtccagccacgtatccacgcactcgacgtggaacccatggcggcatttcggcagcagccggagcgcctccgtcggctcgaaccggccgaggcacaccgcgcactcgagcccagccttctgcccacggagcgcgccgaaccggaacaccggcagcgactccaccacggcgcggtcgacgccggagttccgccgctcgcccgccccgcccccaccggacgacccgaacgcgccgccgctcccgtacgggcccgacgactccgcggcgttccgcttgcagtgcttcgcgtacagcagcagcaggaacgtgatggagaacacgctcgtcaggatgcccacgaccaccgcgacgcccggcctgaacggcgtggccgacgacggcggcggcgacggcagcggcgacacgatcgcgccgtcgtagtcggacagcagcagccgccgcgacggctccatcggcggcaagcttagcagcgacaagacgagggattttagatgtactccacctccactacacgagacaaccacgagtgtgatttgtaaccaagcggtagggggtaataatagcggtggagactagcgctctgcggtggtgaccggatcttccgggcggtggggcccagtggcagtggcagcgggagaagggtggggccactcgccgctgcgctgctccgccggtgaggataaccagttcgacgccgtgcgggttgtcgcggagtggcagtacactacgggtggcactgagccactgacagtttagttgtggggatgtgggcccatgtgtcagtagatgaatggagtattttttttcccttttttcccgaaagaaaagggcaaagggagcagcatgggctggggagcagagacccctgtttcgagctagtaatgcgcatttaagaacgttaggacgcgagattactgttttgtccgtcattaaatagcctactaatgctgacagctcaagggcaatatcgggaatttttcaaataaaaataaaattcgtgcgcgcgttgcgagggaatgaatgctcgtgggaggaggaggaaaaaaaaaaggatgagcgcacagacgcacacgcgaggtgattaccagttcagtcgctgacatggctgtcatgacacggcgtgggtcccacatggcagtgaggaattactgttccggatggggtaggtggcacgtcgatgctttgcgaggcagcacggaaagaggtgggggctctggactggatcatccaagttcgggacacgtgaggctctggctagtgatctcagcgaaatttgaatgtttgctcctgaaaatttttaattttccggaggttgcccgtgcggcattcaggctcatcagcaggcagcaggaccagtacttcattcgcgagttatttctgtggaattttatggcgtaaattaatccaagttcattatctacgtaagtacagtacactgctccagatcgagttcgattaatactacagcatccaccatatacttgcccgccccattcataatttcagaatctgaaactccgaaacgcacatcagcgaattgctcactgtgaaatgcttttactgttaccgcgtagtacagcttccatggccattcgtactgtacaggtgaacctgcgttaaaactgagagaggaaataagaagaacagtacgaatttatatgctactgctcgggacatcgcccacgttgcatctccgtggatctggacgcggcggcactgtgcaagtacactccaatgatagctgcgccatggcaacttgctcccggtgaagccatcgacgcatcaccatggcccatagaggctgcaaacctgtcgacctgccatgccaagccaaccgatacgacgacgttcgtatacatgtacgccccttgaaacttctacgcacgcccgcatgtacgtacgctcgcccctcgaatccccctgtacaattcaccggtgtcgccgtgcgcctgcgtcctagtagcaatgttgagcaatagttggcgtcgctgcagcgcaacaattttgctggcgattttcggcccatctcccgcgcggcgccggggatttttacgcttttttcagccggtcccccgcggcaacgcgcgacaggccgtgcgctgcaggcgacataaggctgtttgagccgcctgcg

SEQ ID NO: 2227 - DNA, 2365 bp, Oryza sativa
atctctgcagtggattgcgcaggtgttcatggcgtcacagtggtggatcgagcgagcggcttgtcgtctacgtctactccctccgtctcataaaatcaacctaacaccaccaaatataacacaacataatactataaatttagatttatattcatcgtactagaatatgtcatatatccgatcctactccgtacatgggagtacgatggcatgcacgagccgattgatcgtcgtaagcgcacgcacgcgtgacgactgacgcgtgcatgggaggaatatgacatgacacgatcaaaacgaggattgatttatcgtgttactccctctgtcccaaaaaaagtcaaaccctagatttccgtgccaacgttttactgtccgtcttatataattttttttataattagtatttttattattgttagataataaaaaatgattaatactttatgcgtgacttatctttttaattttttttatattttttttaaataagacagacggtcaaacgttggacacggaaatcagggtttgtttttttttgggacggagggagtacactgttagctctggcagccagttggggcgcctgaatgacggtactgttaagaatggaaggtatcacatcaatggagctgacaagagctagcgtgccattcatctgccgacgctgttcttgtacccaaaacggcactgtttaattcagccttttcgtcggcttgctccgattcagtagctcatacaataatgtagggatttccggtgtattgggaaacatccttcaatagttcaatttcactgttttaatccattttctaaaaaaaaagggttcaatttcacagcatgacgtcttctatatcgaaaatgttgttccgtatactctctgtgagtctgtgtgcaaggtacgggcaaaagccgcatgtctatgctccttataagcttattgtgttatttttccggcccaaagcatcgagcccaaaatagataacagggccatattctgggtattctgccggcccacatgaattcttcttattgaaaccaaaaggaataagttcactttaggtcccttaatttgtcgcccagttcgattttcgtcctcagtccacaaaaccggatacaacgcatcccccaacttaccaaaaccgtgcagacgagatccctcggcagtattgtgcccggttttggatgacgtggcgcctacgtagctggtttgactaagtctccgtcctacgtggcattggcgtggcgcttacgtggcaattgatcccaaaaataatagaaaactgtaggacccacgtgtcaattacacataaaataataaaaaaggtggggccatgttgcggcggtcgcctccagtagctggctgggcgcgaagcgagttgcggcggcgttcccaccgcagctcctcggccttccgcggctgctgcggcgtcggcgacaaggaggaggaggcaacccgtcagttagtagcacaccccgagagttcaatctaagcggccgtggcatggagaagggcacattgatgcagcacacattaccttggagtggcgatagggcacgccggaggaggaagcggggccggaggtggaggaggaggagacgtggagcgcgacgacgagcagcgttgcatcggcggtgatggtggcgcctatcgcggcgagcgagagcagccaccaccgcaccgccgcccaccgccccgctgcagcggcgcccctcacctttcgccgcagtggcaatggcgtcgcatccgccctgtcatggctaccacacgggaggtaggaaggtcgatccaggcacgggggtcgctccgtgtctcaccgatggggatcgatcctcgccggcctcgtcgtcacggctgtctacgccatctccaccgtgtgatctcgctccggcttgacgatgacgaccccggcaagcctatcactgtcacgcggtgccgcacagtagtaggaggacgatgcccacgaccagcttcgtctccaagtctgaattttctcctttccttttcttcaactgaagaaactgttgatgtttgattaatctgcagcttgaatggagaatgcatgcgtgcataggccgggtatttgtagccattgattcgggcaatttcgcttggaagcaaaggctccgaaagtgagaacattgagtgtttgacgaatcatgcgaggaggaatgggaagatgcggtgcatgaaaacccccttcttcgccaacggcgcctttggcggtgacgcggggtcgggctttcaggcggcggccatcgcggcgggtgcggacgggaaggtcgcggtcgacgggcggcggcgaggcgactgcttctgcgagcctaaaatctcccccccaaccacgccgctggtctcctccaa

SEQ ID NO: 2228 - DNA, 620 bp, Oryza sativa
ttttcttgatgtaagttcttttttatgtatgtataaaagtaacaatatggcgcaggaagtgaagcatagaaactgttcatcatctattgaattgctctgacctctgagtttatatctagtagttaaccacttatcattggtataatgcaggcaagggcaaacaaggtgaaactctttgatgcaatgggaacattctttgcaaggtttgattggatccatttggctttcttctttcattgctacaaatttctagcttcactttgacttttgatctaggtcaagtagaccggtcaatgagacacagaactccatagaaactgtgagaccatgtgctgcatgcaatgaatctgaaatgtttctgaagcaaaggccggtaaaattatcttcccatacatcttttctttcttgaaatggttctgaagcttaggcatattggaagtgtcgcactatgtccatgcttgagctttgcttttctttcctcagactggcgaatttatggttgggtgtcggggcttccctcaagtgagtaacatgtgtgctttgcttagttaccagacctcttgttagtaaaaaaggaaataagaaccattcattaatcttgccagaaaagagcatatgga

SEQ ID NO: 2229 - DNA, 1330 bp, Oryza sativa
cagatatcgcaatcttggacctcgatagaaaaaagggtcaagaaaaacgcctcttgtttttgtcataggacgtactactaattaaccaacagcatcagatccctagagcagacttacacagaagcaatgacaaaacagcaatggtccctgtcatcccaacatcagattaattgcttttcggactaacacacatcagatcagtttatttattatcaaataattaaacaagattaggaaatctcaacactttgacaagaaaaatatccccaccgcaaacagcacatcaacacattactctcaaggagacgagacgaaaatgcgttgagacttgaaacagtacagaacatcactgtcattttcccttgtaagactcaatgtcactaaaaaacaatcgactccacccgaataaatcacttgctagaattttgtaacccggataatcaagaactagttgctcaaaggtagcatgtgctacggtgcatcttttattacgctactgtaagtttataccaacaggttcatgctttttaatcaataacagtgattaaacagtggcattgcgaatccgaattgcgaaacagtattagcactggtatgaaaaagaatggctgagggagaagaattgagccctaacctcctcctccgctcccgcgttcctggcagctcatcgacctcccgaccttgccggcggcgcgttcttggtggcggctatcgttggccaccttcgccgagtgaaccctgaatccggcgccagccctgccggcgtcggggaccacatcgtcgggcgccgtctcgacatacttggcggcgcccatctccatctgcgcgatgcgcacggcgccgaagagcctctcggggagctcctcctcggactgggactcgacgaggaaccccatgtcgatggtgacggaggtgaccgcgccgagcgcgaggtggaggatggcgctggcgatggcggagctgccgatgtcgacgtcgatctcgaggtagccgtccccgccgtggtagcggcaggtgagcgcgcggccgaggaggcaggcggcgtagttgccgacggtggcgcgcaccagccacgggcccttcacgatccggttcacgatcttgaaccgcgcgttccggtacgcgtcgtcgccgtggacgaaccgccccagcagcgactccgccgggatcgccgcctccgccgcgaagtagaacaccgcgctgtacgcgtccggccgccccggcacctgcacacgaaccgaaccaagagattgattgtcacaaacaattcgatcggcgtcgacgcgcagatgcgatcgatcgggggggggggggggggggaacggacctg

SEQ ID NO: 2230 - DNA, 3317 bp, Oryza sativa
ccacccttttccaacctaaacctctcctcctcctccccctcctcgccgccgcctctcttcccatctcccctcacctactactacctctccatgtcgccggataactagcgtcccaaccagcctcgccggcgaggaggaaggtggtgtctcgcattcttcttcgggggatgggggtgggggaggaggagggacgcgggatggcgagcctgctggcggcgaggcgggcgctgcgggccggggtggagaggtcgcgggcgctcagccacgcgctggcgcgggcggggcccaggctcggggagatccgggcgaggctcccgccgatggaggcggccgtgcgcccgatccgcgccccgcgggacgcgctcgagggcgccggggagtgcgtcgaccgcgccgtggggcctgccgccgccgtgctcaaggtgttcgacgccgtgcacggcctcgagccgccgctcctagccgcctcagccgccgccgacgacctccccggatacctcgccgtgctgtcccgcctcgaggaggcgctccacttcctctccgacaactgcggcatcgcctcccagtggctcgctgacatcgtcgagtacctcggggaccgcagcctcgccgacccccgcttcgtctccgacctcgccgaggcgctctcccacctcaagaccccctccgcgaacctagacggcggcctcctcgccgctgcactggacattcttgaggccgagttccgtcgcctcctcaccgaacactcagctccgctcgccatgaaagaacccaacaacagctccgaccctggctccatcacgccgccgcggatccccgcctccgccgtgcacaagctgagcttgatccttgaccggctcgccgctaatgggcggctcggcacctgcacggctgcctacgccgatgctcgtggagacacggtgagcgccagccttcgagcgctcggccttgattacttgcacgacccagctgaggatgctcaggttctcaccccaaacgtcgagcattgggggcggcatctggagttcgccgtgcgccacctcctagaggcggagcggaagctctgcgtcgctgtgtttgaacggcggcctgaagccgcatcctcatgcttcgccgagattgcgtcgcgtgctggcatccttgattttctcaagtttggccgtgctatatgtgatgccaggaaggatcccatcaagctcttgcggttgctcgatgtgtttgattctttgagcaagctgagaatggacttcaaccggttgtttggtggaaaggcatgtgtcgagatccaaacccgaaccagggagcttgtcaagagggtggtggatggttccgtggagatatttgaggaattgctcgtgcaggtagagctgcagcgcaatatgccgcctccagctgatggcggagtgccacgcatagttagctttgttgccaagtactgcaatcagctccttggggacccgtatcgctctgtgctcacgcaggtgctcgtcatccatcgcagctggcgcaaggaaaccttcaatgacaagatgcttgttgatgcagtgcttaatattgtcaaggcccttgaggccaactttgaagcatggtcaaaagcgtatgaggatgtgacactgtcgtatctcttcatgatgaacacgcactggcacttcttcaagcacctgaaaggtaccaagatgggtgagatcttaggtgatgaatggctccgggagcatgaacagtacaaggattactactcagcagtgtttttgagggagagctggggaacacttgcaccgctgttgagcagggagggtataatcttgttctccaaaggccgggctacagcaagagatttagtgaagcagcgacttaaatcgttcaatgcaaactttgatgagatgtatcagaagcaatctgcgtggatcatatcagatagggatttgcaacagaagacctgccaccttgtggtgcaggctatagtgcctgtataccggagcttcatgcaaaactatgggccgcttgtcgatcagcaggatgccagtgcaaacaagtatgtgaagttcactgctgaaggtctagataagatgctcagcacactcttcttgcccaagccaaggagagctggaagcttccagatcagacactcaaatggcaagattacgagcgcaatgacagggttgtatcgaagctcttccacactgaagtagcttcagttgaagttcagggatattggatgtacaatttgtgcaataccattaaagatcccggttggccgggagacataattatggcccagtgacaagaacaaccggatcataacaagaactaagcttctccagtactgacaagtggcgaggagaacatgagtgactcgctttgcatatctgtgcagtctcctccacccaagttgtttctgtcgcctctgttattatctctagcagtatactcgattcattttaggaactttgtgtgggaaacagaagatgtgtaaccacttacctggtatgtgtaaaagattggttgtatttcaggggggtatttagttgttccacattctataagttttaattttatcaccatgcaatgaaatataaggaaagtacaatattacctctgttgatcaaaatgattgtggctaattgattactgattatatgaggcagtaataaacctctcaaatttctatttgtagacatgttcttgcatcttatatccataattttgtactgcagtaatgcagtttacctttaggattccccatgttcagctgtatacagaaagcttgtgtagtcctgtgaggcagtctctgtatatcgcagtgtgtgtaagttcacttctgtagttctggagatctgtatgttccagttattccccttgatacaggtcctggattactggctacagtacctcgatgaacagaaaggcaagaatgtttactagtaacaatttacctggtgggaagtccatgtcagatatgttcggaacttgaaagtctggaacggaaatattggcgtgagcaccttgttgagatgtcggaagcactggtaaactgagatatttttcaggagtttcctgcagctccatgcaaggcagcaggaagaacatgagggtgaacacccaaaacctggcattccaggttctgttgttctgcatgcggcagttccacaaagaatgttcaggtactgccggcttatcccagcagatatgccatcagattaccactggtttattctgatgcctcaacagaaagctcgctgaacctggtatagcctacctgtatgtaccacatatatccttgctaggagtacttggaaatattggcacaagtacaacgg

SEQ ID NO: 2231 - DNA, 6704 bp, Oryza sativa
ggtttgttgtttggagcactgtgaaattgaagttgttgttcttctccttcttgagcaggaaaatggttgagcacctatcgaggatatcttcactgtgaccaggttcgatcttgatgggaagaagttcgacagaggtataattttacctggctgtacaatgaattgagctctgcgtctactatatggtttgctatgatgcctgacaatatgtctcccggagtatttgttacttgttagagctttgctggtttcgaacttaggccattttctagttcctttacattgtttagatctttgagttgtatgccgttttttgtgcttaatgttggtgcagatctttgttgaagtaatgttatccttttccatgtctatgtacagttagtcgcatcgaagctcgtagcgagcagttcgacatgtacatgcagttagatgttgctactgaggtctatccgatgcgtgctggtgacagattcaccatggttttagctcctactctgaatctggatggaactccggacactggcttctacacgcaggtgatgggccttattcaccttacaagttgattttgaaaaataatgtgccgattgaattatggaaatgccactagaatgtgttttagttcacttgaatcatgttcttgtttcctttgggtttatattcacttaggcgcatatatttaattgccagaactctgtgcatgatgctaacattaaataatgtgctaattgaattatggaaatgccactcagaatgtgtgttagttgcctagaatcatgttgttgtttcgcttgggcttatattcatttaggcacatatttgatagccagaactctgtgcatggtgctaacattatatatcatttctatctttcaggctggcagaaaaacacttgctgacaagtttgactatgtcatgcatggaaagctctacaagatctcagaagacagttccagtggtcaagccaccaaagtgtatggcttctatgaatttcaaatttaatcaatttgcattgtctagcaggagcatggtttatcataatctagtaaggcttaagtggggtttctttgctcatttttcaacatatcccagatgaacttatcctatagggttaattaaccatgctgatgaagtgcgtagttttgattattaaatgctttctttaagcttcaggatcctttaagagaactttcagtatttggttttaggaataaatggctgttttttgtttagtttgagtgcatcaagatggtcttattgatcaatctaatttttctattgtccagggtaaaaacatatcagtgcactcagttttttagcttttccaaagaaaagatgcaaaattagttgaagtgactagcttataatgattttgcatggggtttttctttgtgcactaaaggctattcttactttgatatcatgtaatgtcaacaagattaataatcactagctaaagaactcaggtgttcagtttgttcgaacagttcatatgcatcccattgctgtctgtactgtttcagctacttggttaattcaattcaagtgcatttacttaattaattgtatcattgttatgtgaatcatgttatacgaagataagtaccttcaaagaacaatttttcgccttgccaatatgtaaatctggcctacagctacacagcttgtactagactactgttagtcctgtatcaagtttatttttaacgtaatcctgtatcatgtgatgatgtcaactccctttgtgctatgaattttaatgaattgcattcttttccattctagggagatctatgcatcgtttggtggccttctgatgatgctcaagggtgacccctccagtgccgctagctttgagctggaccagaggctgttcctcctcattcgaaaggtgtagatgcactatctacctaataacctgtgatgatggttaactttcaggctatagccagcctctgatctccatttgatggtttcttgtcatgctaattgcgcaccacccctatccactcccttgggtggcaatgcaactttgtatcaaacatcgacaaatacttgttgaaacataactcatttaagcatgttatgtgaaattgtcccgttgtttcgcatttggtacactgcattgtgcaggttgtccttgtgggtatttatcagggggtatgacattgcgtgcctgaaacttcaatactcgtatcctcagctcttatgagtacaatggaccacccaatctgcagcagcagatcaatgaacaccggatgtatagctgtggctgcctggctggctggtactccactactccctacatacttttggatggttacaaagttcacatgccatttccttccaggtcctcctgaggacaggaaccagttgcagcccaggagcagaagcctttactactaccatatatagagagcaggatatgaattggggacagcttatgatttaataacctactagctcctgcaaggcacagaaaggctcaagaaccattgccaagaaacacaaagagagattgaagatggctggaccactgtctcttgaacaaaatttttttgagagctggaaagggctctgtaccaagaacaatccatggagagcagctcctactcattacacctaggaacagtactcactcaccatatatactgccacagcttttcttttcctgggatcatatcttcagagatttcatgcttcaaattttggtggccatctttattatgtgctgctaggattgtgtacatctgctatcagtactgattttgagcctacatttaatcctgtcatcaattcaagaatcaaatggctgtgctaataaacaacaaggacagaaacaaagagagtacaagagcatttatgcatgctggttcgaagagactgttgatgagtaggaacagtgtattctgagcaactagtaattaaaagaatcatacacatattgtgctcagtatggctattaactaaagcccattctgtcatggggatacaggccctacacagccacaagaaattcatgagttcatgaggaagtactatttttctctaactttctacgcagaagaatacaatcaaaatcttttacttcagagttcaggagatcacatcttgtgaagcttttggggtggaaagaagcgatcctcagacatgatgaactgcagaatcttccacttgtggaatcgaaacaaacaccccatggaggaatagctgatgagggcaattcttgtttctgatagaaatcaaaaccaacacagctagacagaatatacacccaagtgctggcagacaaaagctcagagaagaaaggagcaaatagaattcatcagcaaaaaagatattaaaaaaaatgctaatactctactttactaacttagcttatctagtccatgatgaacagaggtgatgagagcagttgagcaccagcagagaactcactatgcaactgcaacaccaatggctacaatgctgcttgctgcttaactaattgcagctcactgaccctgtatctgtctacaatgcttgccttgattgcttgttagtttgctcttcgattcgcattcgctgttgctcgtcttctagcttgggcatcgcgatggagttcttgccgcgcgatcatcacctgttgtgcaaggggttcgggcccgtcggcacgacgcgcttgtcgtcgtcgtcggagcacggtgacggagcgccgccgtgtccgccgctcttctccttacacggcacgccgccgccggcgtcgaaggcggtcgagcgtccaccacctttcgccttcgccacggcgcgatgcacgggctgctgcagggacgacgccaccgccgccgccgacgccggcagcgccaccctgtggccgtggtcgtgcgcgcggcgcctagacgacgacagtgacctggcagcggcggcggcggcgagctgcagcacgacgacggcgatgcacagtgcggcggcgcagcgtgccggccaccgccgcctcctcatggagctccacgcagaggtggcgccgtggcgcgcgcgcgcgcgctctcgagtacgcacgttcttgttgttgttgatgatggttgggaggaagaagaagaggaggaggagggagacacacgcaggtgaaacgaacactcgccgtttttaacagcgcgcagttgtggtgaccaccacagtaccacactgacaaactacggctaccaatattattaaccacactttctgaggacaattatttacttaattaaccaaaactgcgcttgccagaggacagaacacacgatggaactaaacgtgtttattattggagaatttatgtcgattaatgggatttttttcaacgcttaactattcgtcttatttaaaaaattaatgtaaatataaaaaatgataagtcatacttaaaatacttttgataataaagtaaatcacaaacaaaataaataataatttcataattttttttaataaaacgaacgatcagacattacaaacaaaaactcaaagcgacaagtattttgggacggaggtagtaattaatagctgtacatgtgtgtaagtgtcctaggatttttacagttttgcaaaaagaaaggctgcactgcaccccatgctcctggatgcagctatagctagtaccacacccaaccacattgatgagccttcaatccccttcctcctctcactttgtgcgtgtatttatgcctgtacttattccgtcctaaaataaataactttattatgatatataacatatatagtattgtgaatttgtattatcgacacctctcgtattagttttgttgagaataaatataatatttcaactatttgtctagatttatctatacaatttgatctttttttctagaacgaaaggagtatatatatctttatatctagagagagaacatggcaatggcattgcagaggtcactctcttgtgtatgcatgggccgagacgacgacggaaatgcatgccgggtttgactgccttttgcatgctacctcaccggtgagatccatcgatcgatcgatagatcaacacagtgtgcacatactccatgtgttactcgaattcttctccgtttccggcggccgtgtgaccgtgtccgtgcccataattcttcagtactcttcagttcgtattactccttgggtatctctctctctcgagagagagagggtacagtctacagatagactgtagtgtgtgcatgtgtgatgataataatggagtgctcatcggtggttggttcattacatgtcgatgtctctagggagtggactatgtacctgtccaacgataggtagcactgaaaacgtgcattagagtagcactagcaggacttactagctagcagtagcactgaagaaaatgttgctgctgctagctgcttcttgtactgtatttttcatcttcgttttcttttcttgggccgagtttagttccaaaatttttctttgaacttctaactttttcatcacatcaaattttttctacacacataaactttcaatttttccatcacatcgttccaattttaactaaatttataattttagctgaactaaacacaccccatggtgttgaaactgcactgcacagttttcatctgaagagctacaaactcaaaatacctcacgcaagctgtatatatgcactactgtacgtatactctagctagtctatactactctgtattctgtgtgtacatgtgtacgtgagcttatactgacagaccagacgagttgttaaatgatttcatgagttttgacgcagtttgctgctgcttcttggatttcagctcctgcatcgatctgcatgcttgttttagtatgggggcacttgattcagaaagagacacacaaaccgtctcgggagttacgattcgatcagatacaacaaaaattcagcatgaatttcatccgatgcttccagtttctctgaatccgtgagaaaaaccctctctgtttcatgtacatgcatggctgtcaaaatcatatcaaacctctgcttaacattgatcactcttctcttgtgggatcgagctgtactgattgaccgatgttgtaagcaaaagctgtttccttggtccatttcctgtgctgtttcttactacacgttctatagcgtttgtctgattacaattactgccatatagagataggtagcgagggatgggccggtacatgagttgcaaagcctgggcacaactgatgcatgcatagctcaaagctaaacttatttatgtttctgcctttacccagttcctttttttccctttacctttacaagaatgatcatggctatgcatgaatgcatggtgaccgagtattcgagtgagtgagacaagcatcagcaacaaagaggcctcccaaatgagctataggagatacatagtattatatgcatggttcactgcaatatgataaacaagcatatcgtatcgagatactccttcctatcataaatctttgacattctgaaacaagattttgatcaaaccttttcaaattctaacaatcaacttatatcagaataaatttattttgtttgaacgaaatcggcaagacgccaattttcattgaatagagaagtaataaactgtacaaaaagtaagtatttacaagttataaggccgcgaccctagcaaccgaaaacaattacactatcagccaggcggcaagatgccctacgcccgccagactgggctgcagga

SEQ ID NO: 2232 - DNA, 539 bp, Oryza sativa
gattaccatcaaagacaccaaacagtccaacggtctctccatcgacaccatcaattctggtgtcatagaagtcctccatggaggatctttttccaggagagctcgcataaccatagctaaatttaccatttgcactgtcatgataacacaagaagaacaacaatatcaggtaataataacagaaacgaattctctgtcaatggctatatacagatattcgaaactaacactcccaatccaaaatgaaaaatcacccatctaataaataaaaacccccatcgtttggcttttttcataataagccaaaacggcttattaggaaataaaaataaatttgtaggtaaaacttttatatatgcgttctgggtgatttaaaaaccaatgttgttaaagaaactacgttgaaaatatctcaaaatcaatcttaaaattaagtttaaaaattttaaatttggcttattcgttggctgttcggcccccaacttgcttaaaacggatcaaacgaaaacgaaatcagaaagagagatgaagcgaaacgg

SEQ ID NO: 2233 - DNA, 581 bp, Oryza sativa
ttattatttgcattactttcttagggttttcttctgatttcacctgcattttcttgggggcatttgaaaattaccattttggcttgggaggaaaacttctgggtgtgacaggatcgacctcagcgagctttggaagcagggcgcccagcgcgtgatctcatcggccatcaagatgtctaagggacaccggtttttcccaccccttaacagaatgccgttgccgctatcaccctttttgacacccttcttaaccaaaacgagctcaatcaatccgaccacgttgtcaacattttgaaccaaacgaagaccattattgcggcttcggtcccagttaacttcgaaagcgttcacacgccgactggcagtcgagttccccactttcgatctcatgactaccgtcattcaagccttaacattaccggcgcaggatccaaccgcatgagcatgggtcacgacgagcggtctgttcacttacctcccgaccttcatagggagcgcccagtggaacggactagctcaccaccttgttggcggcccatcgatcttcgcgacacaatcattcagcgccgagcaggttgagg

SEQ ID NO: 2234 - DNA, 574 bp, Oryza sativa
aaatccatttgcaaagagcatatgcaatgaaaaggattcagagggctcttaggtttagagggctcttaggtttccatttggcttgtcatacggtcaaggtcggctctgataccaacttgtcacgcccagaaattcccgaatagaattccaagcagaatgtgcattaaaatccccgtccaggaccagccggggtacacaaacgacaatgttgacattcagatccacgtcttacaaacatcataaaagtcttacaaaaaatgcagcggaaaacaaaaggaactggagctaagccttgactaaactgcagcgggaacaccactccacaggcatcctcgacggcacggacgaagcctactcctcggggaaaccttcatctgacacatacccgtcctctggggttgggaaaaagtagagcaagactgagtactacccactgtactcagcaagtcataccggaataggggtatgatgcagggaattaacaaagaagagctagagtggttcatttgcataaatactggcatttataaacaggaattgaatgcgaaaacggttgtaataattaagcagtatt

SEQ ID NO: 2235 - DNA, 863 bp, Oryza sativa
agaataggcttcaccatggccacagcttcctgggatcacacgagaatacatgttattgcttcatttttttcacaagagaacacatgttattacttgcatttcatataggagattttgagaaattaaaaatacatttcagataggagatttggagattgaaaaaacatgtcattagtactttattactggcttcagacttcagagttcagaaacatgcatttcagagaggagatttggataaattaaaatgattcagagatcagaaacatgcatttcagaaagatatttggagaaattaaaatgattcagagttcagaaacatgcatttcagaaagagatttggagaaattaaaatgattcagagttcagaaacatgcatttcagagaggagatttggagaaattaaaattagtgtgtacctcgttggtcaccacgtcccagaggccatcactagcaaggatgaggaactcgagagagctgtcgaccacctcctcctgtacagatcaaataagcagataaatgtcgaatttcgatttgcaacagtacataacgtaatatggtcgtatcctgaaatcgttcatggcctctatgcatatactttctttatgagctgcatgaattatgaatttgagattggaagaaacttgaggaccttgatctctggatcagcaaccacatattgcttcaggagtttgtcaccaaatgctcgagagacagcaagaacaccacccacgcgccatgttcctacaaaatttccgccaacagaattttagcatttttatagattaaggacttggtgttcaatgtcgaaaaaaagggtaaatgtagcatcagcacaatgaatagatcaagagttgaaatac

SEQ ID NO: 2236 - DNA, 2245 bp, Oryza sativa
ttctccctcccctccccgaagtccatcccacctcccctctcctcccgggcgccgacaggtggggcccacctgtcggtcgtccctaacctcccgccgccgctccccaagccggcaaccgccgagccgccccgcgctccctgccgacccggaccacgttgcccactcccccgctcgccccacactccccgcgcccacgccccactcccgctcaccccgcgcccgcaagatggccgggattcaaatttgaatcccgcctctctctctcttctcctccacctcctccactactccggcgaaattgcgccgttcccggccacgactcgccgccccccctcctatttaagcacgcccgcaccttcctctctctttttcctttctcggccgagccctcccgagccctccatcactcccgcaccgctacacccgccgccgccgccttttccactcctccggtcgccgctcgccgccgctagagccgtcgccgcaccgcgccgtcgacgccgccgggttcgcaagcttgtgcgccaccccgtccgccgtttccccggtcaatcccgccgccggagcttgctcctcctcgcgcgccggtgagtacccccatggccgccgccttcgaccggcgaatccactcgccgttaaccacccctctccctctaatccctcccatcttgttccctagaggtcccggagatcgttcgcccgtcgccgtcgtcctcccgtcgctcgtcgtcgtcgttcgccgtcgtctccactcgcgccggccaacctcggtgaaaaactccccctcctccccctttccctctcttccgtgtgcgtcgccgtcctccgcgcgcgcatcgtcgtcttcggccgccgccgccgcttttcgcgccgtctgccgtcgccgtccgcgccgccggttgccgtcgccggcgaccgcgcgtgccgccgtcgctcgccatgcttggcctgccggctttgaggccgagccgagccaccagccgcgcccctcccgccttgtgccactgccagtggggcccacgtgccggcgcccctccctctctctcttgagccgccgctcggtggggcccgcttgccagccacccctctctctccttgagtcactgacccgcgggtcccgcatgtcggcgccgccccaccccttgctgacgtcagccctggggcaatattgcgcaataattaattaaggactttttctttattagtaaaaacacagtgaatcttctaaaattcataactaattcatccgagctccgattaagtccattcaagtctcagtaaattcataaaaatgtgtagaatccattaaaaatggctttgttatctgtttcagtagtcttatagcatgttttgcttgtgtgctttgtttgtcgcgtagatttcgcccgtttcgtcgattcgcggtttctcgaagacgttgctgtggcctcatcagtgcgagagcaaggcaagtcatacattgcaattgatcatattgtacctaatttacaaatgtcccgcatttctattaaatattgcattgttttacaatatcatgtgggatgggtcctattactcagctatatgttgtttcccttatgccattgataacttgggtattaaaatgactagatgttggtttaggagatgcttagccatgcttagttcaactagtgcacaaaaggggatcacattaaagcatagactttgattattggcaatagctttggattagtgccaccgcaatggtgttggttaattaaaatacacttcatggtgggctgtgggtgcatggttttgctagacgtgcccatggcgattaaggaccggttcgcgggatgccctggaagaatttatcgtacttaccacaagccagcgtgggcaacggctgggcttgagtgtagcttttctctagccgacgtacccaggcgagggtgggcgtgatggagttgggtcggccggggtgtccggttgatcggctgccggattcaccgcggcacgaaaggggggctgcccgttgcctgctggggacgggggcgaaccctaaggtgtggtgcgatcggttagagggggttatacgaagggtcctgtcacggcctctttccggtatgtcgtggtggcatgtcggcgcacgggaacgtgtcgtggggctgtgtcttgtgggtacagttgtacacctctgatcagagtaaaactattcgaatagccgtgcccgcggttatgggcggtcgaccagattcaccgtgattagtttcaccctagttag

SEQ ID NO: 2237 - DNA, 771 bp, Oryza sativa
atgtttaatactgcttaattattacaaccgttttcgcattcaattcctgtttataaatgccagtatttatgcaaatgaaccactctagctcttctttgttaattccctgcatcatacccctattccggtatgacttgctgagtacagtgggtagtactcagtcttgctctactttttcccaaccccagaggacaggtatgtgtcagatgaaggtttccccgaggagtaggcttcgtccgtgccgtcgaggatgcctgtggagtggtgttcccgctgcagtttagtcaaggcttagctccagttccttttgttttccgctgcattttttgtaagacttttatgatgtttgtaagacgtggatctgaatgtcaacattgtcgtttgtgtaccccggctggtcctggacggggattttaatgcacattctgcttggaattctattcgggaatttctgggcgtgacagatcctcagcctccttcgcggtccgctcacggtcctgctgctcacgccgtagccattcttgttcttgtgcttgatgctcctcctccagtcggcgacgttcttcggtctcccgggcttggcgttgctcctccgtctcattattggccatgaaaaagccaaagtagagaggggtgtagttgtcatctaggctttccgtcgaagtcgtccaaatcgtcgaagtcgttgtagcgagaactaaattcgtcgtactccacaatgtcagtaggacgtgagtcgaccgtgggagaactgtttagtcattcagctga

SEQ ID NO: 2238 - DNA, 607 bp, Oryza sativa
acaccgaaatgcactactcgcaaagaagtgcatttgtgtgtcatcttttcagtactgtacagtgtacacattgcatgtctagtgaccagtgacacgggtgtgacagggaaggggggcctgattgtctggatcttggtgtcctctctctgacactccgatattcatcttcaattaaatttaggtctctcaccaaaattttagtctctgagaggactaaagtttagtccctcccacccaaacatcaccttaaatcgtgtaactaaagattaagggactatttagtttacgaacaaaaacttttggcgtgtcatattggatatacgaacacacatttaaagtattaaacatggattaataacaaaacaaattgcagattccgtcttaaaattgcgagacgaatttattaagcctaattaatccgtcattagtaaatatttactgtagtaccacattgtcaaatcatggcgtaattaggcttaaaagattcgtctcgcaatttacacgcaatttgtgtaattggatatttttaatctatatttaatatcctatatatatgtccaaatatttaacgtgacggagtgaaaaactttttgtttcgaaactaagg

SEQ ID NO: 2239 - DNA, 592 bp, Oryza sativa
cttctcattttgagtgattgtagatttcaaagactgcaacccccaaaacacagaacttgttctttagatctgagctagattacatggatgatttccttgacacctcagagagtttcttgttacttcctgttacttgcaaacaagattcaaatactccttcagaatgatttgtgtatcctcaattgaagttcacatttctttgctcaatgctaacaggtaaagtggttctgcaagcagcaatcctaacggcggttgctgtcatcggcctcaccattttcacattctgggcagcccacaggggccatgatttcaccttcatgtatcccttcctggccgccagccttctggtgcttctggcatacctcatcattcaggttatcttcttcttccctgctcaacctgctccgtttttcttttcttctcaagtgctgtctaactcattgtgcaattcaccgtgacccggcagatctgtttccctctggggagggctggcatgacgatctacggctgcctcgccaccgtgctgttttccgccttcatcgtcttcgacaccaatcagctgatcaagcgccacacctacaacgagtacgtc

SEQ ID NO: 2240 - DNA, 580 bp, Oryza sativa
cttgggcatgtattagaagactttacaggcatgcgactgaaagtgctattttggcattctcagcttccctctccgagtttgaactagaccagacaactatccgtaagatggtcatggaattaagagaacatgcaagaagtatagtagaagagaaagctagagaagaagctgggaacgttctgatgcgtatgaaagaaaggtagaatctgctactattatttttggaggaaaacttagcaaacatatcttgacttttcagggatcacacttaccatttttggaacatttatcttatctctacctgtttaattggactctaggttttccactgtgttgagccgtgataaggattccatgcctaggacatggaaaggaaatgaagatatacgtgcaatcactagagaagcacgcttagcggtatattctttcctgttgatcaatattgcactcatttatcctgatctatgctgtagaaacatgatctatgtatcgccttcccactgcagacaaaagacttatgtcggtaatggcagctgtacgtttggacgataaaccagataaaatagatcgggctctaacg

SEQ ID NO: 2241 - DNA, 4696 bp, Oryza sativa
  unsure (1)..(4696): unsure at all n locations
cgcggtacggatcatcatcctttttagggttccactatatatacctcttgtaagccgccgtgcagcgatgtaacctcaccttagatatagtgaagatattttaccggctgacgcccgtggttttttctctcctgttttggaagggttttccacgttaaatctcatgtcttttatgattgatctattgttttttatcgtttgttcacccatcgtttcctaacagtcgcccggcgcgacagttcttggtgcggcagaagcggtgtcgttcccggcgaagctcctgggccccggcggcggaggtgtcagcccgcggggatggttggcgctggcgcgcacgcgcgcacccgcgatcgccggcgggttcttggccaggggagctcccggtggcagaggcggcgtcgtcttccccgacggttcttggctcaaccgagctccgggcgtcgcacgtgtcgcccgcgggaaaggttggcgcgcgtggacccgcggtcgccggcgcaggaaccagccgagccgcgagaggaacccacgggcgtttcttgcttcttgccgcgtcgaggcagaaacagcggaggcgccgcggcgggttcctgtgttggcggcggagttcttggcgagttcttggtggaggaagaagatggaagcgcgagtttttggtggcaagaagagagcggaattgcgggagttactggcgagatggtggtggagggagaaaatgatttgacggcgagttcttggcggcgacgagggggcgtgatttggggaattcttggcgagaaggtggaggaagaagatgattatgacggcgatttcttggttgtttaagagggaatggggagagaggggagatggagaaggaaatgttgtggtatttatcggggaaagaatcgtctcgatccttccaccgaccatcccggaaggccatcgtcttctccggcgccgtcatgtgttcgatggcgagctctgcaaactcgaagcttctcgaagcgttcttgcggctggaacgcaatacttcttctccggtggctccgttttggtggcgagcgtggctcgcaccggcttggcgagagtatcgccgccggcgtgcacgagcgccatggcagctcacggcgccggtgacatcttagcagaagcagatgggctgtgggcgcacgtatgagacgtgggcctatcacttgcatttcaactttcaaggcccaaagagtgcggtgtttaatcccacctcgctaaccaaaccacagcagcaccgcttataaattgaaccgtgttttttgtttgcaagtgatatcaggcatttgagtattgaagtttcattggtctaaagacttatttttgttcagtctgtgttctctctctcccattctttttttattttttttctacaatgttttttttaagaattacacttactattgtttagtgtgtgttctctctctcacattcttttttattttttctacagttctctctctcccattcttttttattttttttctacaatgtttttttcagaattacacttattattgtttagtgtgtgttctctttctcacattattttttattttttacaatgttttttaattacacagtacaacgcagacactcataacgcacgcacgcaaaccctacccctatgagcatcttcaaagactggaccggcaaatccatcttggagattgacgaagtcatcacaggcgcttcgctgtcgacggatacgtcgcctaccactaaaagtataaagctgaatatgcaagatacactcccatagaaagtcgaacccatgactttttttttctacaatgtttttttttagaattacacttattattgtttagtgtgtgttctctctctcccattctttttatttttttctacaatgtttttttagaattacacagtacaacgtagacactcataatgcacgtatgcaaaccctacccttacgagcatcttcaaagactgggccggcaaatccatcttggagattgacgaagtaccacaggcgcttcgctgtctacggatacgtcgcctatcactgaaaataaaaagccattaaatcctgaaaaatacgctcccatggaaagtcgaacccaagacctaagatgctactgagactcttgtaaccattagccagcttgtttaatatagaccagtaaaattgtacacatcacttttctggtctacaatgttacattgatttatttgttattcatgcaggccaattaaaatttagatgtcaacctattaagaaaacaatatattataaagaaatgtacgtaattatcgaatgaatttcaatgataattattaatgagtaaagtgcatgtgcggttcttaaacttgtagcggtgtgtcatataggtccccaaactctcaaaatgcatatccaggtcccagaacttatcaaagtgtatcatgtaggtcccaaatcaacacatccccacttagattctacgtggcgctgatgtgacctgccacaccgacgtgacgtgtcctttttttcttttccttttcttttccattttcttctcaaggagaagaaaggaaaatacaatagaaggaaaaaagaatatttttaaatgggtcccatttgtcagtcaaaattacgccatgttatatctgtgtcacatgccacatcagcgccacgtaggatcctaaaaggactataagtgatttacaatataaatctcatactataacaaatgngnngccgcgatatgcattttgagatattaaggacctatatggcacacctctacaagtttaaggaccgcccgtgcactttactcattattaattctaggtatgaattaattatagactaccgactaaaatttatacgccaactgattaaaaaatagtactccctccattccaaaatactataaggcacaaccaccattattatcatcttgtagtttggatcatcctaataaagataatgcatgcatccaataggattagataacatgagtggagaatttaaaataataataatttaatagagaagatgtcatagttaattacatacttgcatgtatgccttatattatggaacatttaagaaaagtagttgtgacttgtattatgaaattatgaaatagagggagtacatttttactcgatcaacttcccgcagtattttatactgcaaaactctcttcgtcaacattattacagtgtgaatcaatacatcaagctacatatatctgggcctacgccgtagtaccgaaccttgtggtcctaatagcaaggctaatagtgcagctaacagcaagttccaaaattttatcatgtcaaatagagctaacttaaaaaccaactcatataataagctaactacaagttagctataagctaccttggttaaagcatacatacattaaatcattaaatacttatatggatacatcagagaggttctgtgtaggacccacataaacgcatttttatcgtctcttctggctgcacgcaggcgttacggtttggggagctgtgcaagcgccggcgtcaaaacaagcgcccgcttgtttctttttctttctctacaattttctttccttaatctcagattaagttgattaacaagttttggagcgggtttaatagcgctattgtacctgctctaagcctttctcgtattcatgtatttcttttccactcaattctctcaggtctagagtattttgaattttttttgaactcaatagagagttgcatttatatgtatatatttatatttttgaaattgaatatgcctttcaactcaatacaaagttatatttatattcatgatctttttttactttgtcaaatggtttactaaaatctttcaagtttagtgattttttctattgttttaacacaatagagagttatatttattttatctatatacctccaccctctttactttccctctaaactacccctaaactattggtgcagtccaaattactgtcatgaactacaattctaaacatttggcatccttaatttttcacactagacaaacaaccctcgtccattatagtttttgagtggttttggcatgagttagtacatgtagattttcaagatactccctccatcccattttaagcataaccggaagtttcggtgtccaactttaatcgttcatcttatttgaaatttttttataattaatatttttattgttatgagatgataaattatgaattgtactttatatgtgacttatgttttttaattttttttaaaaatttttcaaataagaaagacagttaaatttgtacacagaaaatcatggctgcatttaaaatggaacagagggtgtatatgataaaaaatgtttggaggtgggggggggggggcaacggcagcatcggccgatgtcatggaagataagttttgctctaaagctgatttggcggaggacgatggaaaaatccagaaccctcaatactccgtatatataaacatgaaaaattaaggtataaataaataagaacataattgcatatatatgcgtaaaaaatggatggaaaattaaggtggcataacatagttgcattaataaaaactgactagattaattatatacaatcaatctgttaatatcccattgatagtctaatttaactaaaaattcaccgacattgatcatactaatcaaccactctaatttatactccctccgttttttaatagatga

SEQ ID NO: 2242 - DNA, 4412 bp, Oryza sativa
actactcctattagtaaacatctaccactctaatttatactactactattagtaaacatctcctaagatagtaaggccagcaaggtcgtcatggccaccgcagcagccaccgtaccgatccccattgtcgcaccacgcgctccatgagaggtcggtggcggcggcggtggcggcagtggcgacggcgaagtgaacggcggcggggacgacggcttgggcgcctgtggcagcgaaggcgccgccgttggagattgcgccggcgtggccgccggagactctgctagcttccccgctgatggaggctgctgcggcgacgacggctcgtagggaggaagcaccagaccttgcgctgcaagatccaagaaattaaattaaacggcagagtcagtcagtgtcagtgacacgatccggcgacgcgccggcgccggcacgccggtcgccggcggcgaggtgaggtgtatgcttactgttgcagagctcgatgggcggcgtggcgaggccgcagctgacggggatctcgagggcgtgggtgacgttgacgtcgtagccggtggagcggccgtagacgccgtcggcgatgtagcagaggcagaacgggtcggcgtcgaacgccgcgctgtacgccgcgcagcacgccggcgacgcggccgccgcgccgccgaacatgaagtccctgcacgcgagcagcccgctcagggagtcgcggcagtactcgccgccggcggcggcatcgctggccgccgaggccggcgacgggagccacgccgacgacaccgccgcggtgaccacggcgagtacgaggaggagaggaagcttggaacgcgccatggtgggatatatactgggatcgatcgattgattaattggattggatttttgcatggtccgcgacgtgtatttatagcgccagagtttgagaaatttaagagaacgcgacattggatcgtgcatgagaggttttctcatctttttggaggaattttatccgaactcaaatactgatcgaagtccacgcggcacaaaaacgcatagcttaagcgctttggggagaatagctaatatggtccctaaagtttcgctcctgagttattttagtccttaatctttcatattgtccaaacaagtcctttaaatttgtcatgtgggctaatatagtccttggtcccaccaaaatcgctacatggacatgccatgtcacctttctatgtaaaatctttatgatttgtccaatttacccttatgcataggaaaataaaaaacaaaaggaaaaagttaaaaaaatatatggtatatgtaagagcaaaaatatacctcaaaagggtgaaaaaagaagtatttttttcctatggttatgtctaattcacccttatatttatttttctacgatatacgtaaggctaaattggataattcatcatagattttgcatgaatgatgacatggcatatccatatgatgattttggtggacccaaggactattctaggccttatgacaaaggttaaggatttctttgaaccatttaaaaggttagagactaaactgatcctacagagaaaatttagtgactaaagtagctattctcccaatgctttgaattgttatccagctaaagagtcttaatgggagaaagttacaagttgacacgttagaagataaccaggtcgtagaacgatgtaataattttgtcatccactcctgtatctgtacgagttttatttagtttctttttttaaaagaaaaaatattggtcccagaacttgtacttgattacacaagttttttctgtttccaaattatcctattgacaaaaacaagttaaaatactgcaacatttgggagaaaatttcattgaagagaataaacacgtggccaactaacttcattacacagttttggtgtaaccaaattgtcctattgacaaaacaaatgaaaatagtggaacatttgggagaaatttttagtgaagagaaaaaaaaagactggaatacgtggcgaacaaactttattacacaagtttttattatgtaaccaaattgtcctattgacaaaacaaatgaaaacattgctacatttgggagaatttcagtgaagcgaaaaagaaaaccggaacacgtggccaactaatttggtccgtgtctctaaaaatatatgaggctttgggcccagtaggcctataggagtacgcgccaaaaagaatttgcaaaccccaaatgcgccgagccgccgccgccgcggcggtggcgcccgccgacccgcagctgctggcggcggcgttcgagtcggccatcgcgtcgcgctcgccgcgcctcggccgggccgcgcacgcgcgagcgctgaggctgatcgccccggcactctcgcccttcatctgcgcgcacctcgtcaacctctactccaagctcgacctccccgcggcggcggcggcggctctcgcctccgacccacaccccaccgtggtttcgtacaccgctttcatatccggcgcggcgcagcacggccgccctctcccggcgctctccgcgttcgccggcatgctccgcctcggcctgcgccccaacgacttcaccttcccgtcggccttcaaggccgccgattccgcacctccgcgctccaccatcgggccccagatacactccctcgccatcaggtttggttacctccccgtcgaccccttcgtgtcctgcgcggcgctggacatgtacttcaagaccggacgcctcaagctggcccgccacctgtttggtgaaatgccgaacaggaacgtggttgcgtggaacgctgtcatgacgaatgctgtgctcgacgggaggcccctggagacaattgaggcttattttgggctccgggaggctggtgggcttccgaatgtggtctcggcctgtgcattcttcaacgcgtgtgctggggcgatgtacttgtcactcggggaacagttccatggcttcgttgtaaagtgtgggtttgagatggatgtctctgtgttgaattcaatggttgatttctatgggaagtgccgatgtgcagggaaggcaagggcggtatttgatggcatgggagttaggaatagcgtgtcctggtgttcaatggttgctgcatatgctcagaacggcgcagaagaggaggcttttgcagcatacctgggtgcaaggcgttctggggaagagccaacggatttcatggtttccagtgcgctcactacatgtgcagggctgctaggccttcaccttggacgcgctctgcatgcggttgctgtccgttcttgtattgatgcaaacatttttgttgcgagtgcattggttgacatgtatgggaagtgcggctgtgttgaagatgccgaacagattttttatgagacaccacagaggaatcttgtcacttggaatgcaatgatcggtggttatgctcacattggtgatgctcagaatgcacttctggtatttgatgatatgataaggagtggggagacagcacctaattacatcacccttgtcaatgtgatcacttcatgcagcagaggaggtttaacaaaggacggctatgaattgtttgagacaatgagggagaggttcgggatagagccacggactgagcattatgcttgtgtggttgacttgcttggtcgtgcaggaatggaagaacaggcttacgaggtcatacaggggatgcctatgagaccttccatttctgtatggggagctctacttggggcgtgcaaaatgcatgggaagacagaattgggaaggattgcagctgagaagttgtttgaacttgacccccaggactctggcaatcatgtactgctctcaaatatgtttgcttcagctggcaggtaaaattaccttattcactttgatgtttacgttaaagttccaggttccaggctatctcaggtccaaacacagatacacacacacaaacaaacaaaaagccactcccggtgatttctcagtaaatttcatactcctgatgtcatttgattgaacttagctctaggacatagcgaagtatattttgatgtctcttggcttcttctgaatgtggaatgtccctgagtttttaatgattataaataatctccatcattgatggacaagcggtaaactaatataaaaggctaagttgaagcactatattgcagaattgtaaggtacatttgtcagcatatctgccagaattcaatgcagattagatgagcatttgtatgccataatccatatacttccaatcagctgtgaaaatataatctcgaaagtgcttgttgagagcttgaagtagactaatgctgattcctgaaacttgttgctcataatttttgttatgagtgaagtgcaccagtggtccctaaacttgtgcaagtgtgtcacttaagtccctgaactctcaaattgcatttttaggtccctcaactt

SEQ ID NO: 2243 - DNA, 10141 bp, Oryza sativa
tgcataccacctggggtacctatcagaatcatgaagaacctgcgaatatgtgtggatagtcatcgcgcattctagttcatatctggtatcgttggtagagagataattgtgagggacaataataggtttcatcacttcaaacaataccaatgctcatgtggagattattggtgacttctatctatgtgcctattgatgaatattatctgcaaaaagaaaaaaaaaacacttcttcaaagccaaaaggaaaaggtatgcaatttttgttcctgtgcaatagttatatcagcatattttttcttatgtgatttctttagttgctgtattagttgaaacttgaaagtttgaaacttttgataagcttccaaatgagtataagtcttgttagtaatatgataactgtgttatctgatttctacagtagaaattagaagctaccaaatcacgcacccactcacagcacacacatgcatcttttactacaaactccagagaaactcagacatccaagaaaccaaggtccaacttgtccgttgaacacacatgcatgtgcatattctaaacaaatgagacacactatgtcatcctagggattgaattcagggtgggtcagaacaagctccctcataatggtaacagttacagaaatggctaaatgggaaatgagtgtgttggaaatcattatttcttttgtttagacacaaatatatttttttctgacagttgtttgtaaggatatctttcctaatgttttacacctttactttccttttatttattttggcttctgtctgtacaggatttggcattaaacatggaacatatgtcctggtttacctaattaccttgctccattactgaagaaggcatactgataaatcaaaagaagagaccagctggaacaaaatttggggttgatgagcagaagcatacactgcctgtttgatgtgccacccatgttagctcaggttgcacatagcctggatttaggggcatcaagggcagaatatgtactattcaagagaagctcagggatatcaatatatgattgctgggtgcaccgtgcacgtaggttgtgatgctggctcaaggatctaaattcctgctatccttttttgggggtgtgaataatatttcttattggtactatttcttggtagtagggacaattccactgtctcaaaatcgtggtaaatattaagcagtaaaacgattttaactttttctatatcttgattttcaggtcatgctagattgagcctattactgtttctaccctgaagcgctaatgtttgcaggcctgaagtgtctcgtattcagcttggaggtgttggtgaattacttaaagcgacgaatgcagaaatctgcacggaagcgatgcatcccatttttgccatttggttaagtaggttttggttattcttatacgttgagaggatacttatcatgggtttggtggattagacgtggtataatccagttctcattttggttttcctttttgtttgctagctgaccttaattacttggtgccatttcctgctttgatttttaggtgttactgtaaatgaagagatgatttattatatatactacagaatatagttcacgcgtattacaaagaaaaccggtgttttgtttctgttgggcactttagttagcaaaagagtaaaatagcctttccaactggggctcttcccatccatttgtttgtgatcataattttccgaaccatatgtttcattttttcttctaagcttatcttagttaaaacattcaacacactttcagtttcagttttcagtctttgagcaaggttgcttcagaattatcaggcatatacatggaaatgaaatgattccattctctgttcagtttattttccttgtaggcttagattgatcatacagcgagttaaatgaatataacttcaaacaaggctcgagtaaaaactacggaggaaaatgcagtcaatagtgacttgtgattgtgatctgcatcgaggattaaaaagatttgtctcgtaccacatgaagtccttcagtagatttgtatacttgttcaaaagattgtaagagcgatgcatcaacttgtttagttgcagaggtatatgatctgagcttgttcattcggattattcagatagaaagacgctgtactaacggaaatcttatacaggttgaattcgaatcttcataccccactggaccggggcccacacgtcagtgacccatctcaagactcaaattaaattggtcacgtctcgttcgtcctcatctcgctcgcgtctcgtcggcatgacgactccgccggcggcgaagcgccgccgccgctgctgttcgctgccgccggagctgaacgacgacgtcatcggcgagatcctcctccgcctcccacctggcgaccccgcgctgctcgtccgctgctccctcgtctgcaagccatggcggcggctcctctcctccgaccccgtcttcctccgccgccaccgcgagctacaccttcgccgccggacgcctcgccccctcctcggcttactctttaaccagctcggggaagaccccggcgtcgcctggttcggccccacctagttccatcgccgcctccccacccccaccattgggactggtacgcgctcgacgcccggcacgggctcgttctcttcagcaccatgctctcgcgcgacgcggcggagcacgagctcgtcgtctgggaccccatgacggggcgccggtggcggctcgacttcccgggctacctcgaggacttcaactggtccgcgtcggtgctctgcgccgccgacggctgcgaccaccgccactgccacggcgcccccttcctcgtcgcggtcgtgtccaccggccgctactgcaacacctccgcggccatctactcctcggagaccggcgcctggggcgacgcgatcgcgctcgagcgcgagcaccccgatcccgatgatgccgtcaaggtcgggaagcccggcgtccaagtggggaacgcgatctacttcccctgcgtccggagcgcccaaatcctcgagtgcgacatgagcggccacacgctggcgatgttcgactcgccggcggccggccggggatggccggacaacggcctcctcatgacggcggaaagcggcggcggcggcgggctggggttcgctttcgtgcggcggtccatgctccacctctggtcgagggagcccaccggcgacggcgccatggcatggtcgccgctccgaggcatcaacctggagccgctgctcaccgtgctgatccggagaccacctgagcaccactccgtcacgcctaatctggtcggcttcgccgacggcgtcggcgtcatcttcgccgagatcgatggcgacgtcttcaccattgaggtgagctctcgacgaggcaagaaggtgtacaggagggaagacatccacaccatcttcccttacacgagcttctacactcctcgcggtggtatcaactttgatccattgccatgaactcactcgcgctgctgctgctgctgttagctttgttgtggatttgacgttagtgatttctttcagtttggaagcccaggaacagtattgtttgctctggtttcagtggttagtttaagccataaaaagagttaagtagcgatggcctattttgtaacctctgtgtctagttgggcagttttaaccaggaaaagagttgactgctcatgatcacttcactatgtgattgtatcaactcatctacctatttctttttcgtttttcatttcctcgctgcctaaagcatactctcgaagatacaatacctctattttttttataatgctacgccgttaaatttttctttacaatagtttgatcattcgtcttatttaaatttgttttgtaaatataaaaaattgaagtcatacttaaaaaatatttgacgataaatcaagtcacaataaaataaataataattatataatttattaataatacaaatgatcaaacatatattaaattgatcaatcaattctaaggttgtgttcggcagccaactttcccaactcatctgtatcatttttcgcgtgcatgcttttaaattgctaaacggtatatttttctttttgcaaaaaacttctataggaaagttgcttaaaattatattaatctatttttttaaaaaatagctaatacttaattaatcatgtactaatgagtcactttgttttaagtgagcgagagattaggtaccaacctcacaattagcctaagtgggaatactaagagtgggtggactaggcaaaatccccccccccctttttccctaaccctcctagagtcgttggatcaaacattgtctgtcagattcaaccaaatacaaggctgggttcccaacccaagctgttcgcacggaaaatgaagtgatccattagcgcatgattaattaagtatttgctattttttttcaaaaatgaatcaatatgattttttaagcaacttttgtatataaactttttacaaaaaaaacacaccgtttagcaatttgaaaagcgtgcgcgcgaaaaacgagatatgtgctaaattggtttcctgattccacacttccccatcaatggtggaagcatccacatctacactctcagtcttagatcaaactatagaaataaatctgaataagcacatgtcggattcatagctaaagtttgatttattctttttatgaagagagtatatgtttgtgcgcagcaaggcacctctgggttaactcttaactgtacagccggccggcaccctgttacgctggccaacttactcctattctcttcctccactagccagctgctgcgaaatcatgcccaagggaagcaactccacccgaatgtgcctccccagtccccagtccccacacgcgcacagatcttggagtaaaatcaatgcccatcaaaatagactgattgaaatcacaaaaagtcagttgactgaaagtaaacaaacctgttttctttaacattgtgtcactaccactgtggttagctgctaccaaggtacattgaaataagtttcaccttggactaggtgttatattatatgattgaaggaaaatcttgtaaaatatgaggaaaagttataaaactttttgaatttagatcacatattcacatttgatgatgatttattcaaaattctacgaaatgccatggaaattctatattattgatgatgtatcctagattcctagtgctccgtattaagtgaaagttttttttgacggtttaaacagtaggagaggctcatactgtgctatattagaatatagaataaaaaaagagtatgtacaaaggatggatataaggggggagaggaaagaaaaaaggaaaacaaggaaaaaacaaagacaattagctaatgatgttaatccatgattgccagctgggtttgtctgatgcttttactctgtgcatatgccgagtaaagaaggatggatataaggggggagaggaaagaaaaaaggaaaacaaggaaaaaacaaagacaattagctaatgatgttaatccatgattgccagctgggtttgtctgatgcttttactctgtgcatatgccgagtaaaatcttctttgaagtccaatttccatttactgaagttgatgggcacattattgaaaatatgatcatttcttctattccagatattccaacatccaattcctaatacttccataaagaaaggttgtgggaaaagccttcttgcagtcatgatcatgttcatgaattctaatgtcagatcccaatttatcccaatacagttccaacattgttgggcaaaaggacaagagaagaacagatgaatgtagtcttctgtggttgtcaaattgcaaatgttacaagtgactcctccttgagtgttgaaatgttttctttgaagtaaatctttagtgtttaatatgtccatcagtagaagccatagaaataccttgatcttcattgtgcctttgcttttccatatgagagtgagtggtatgtctggttgaatatgagaaaagaagagatcatacatcttttggatttgtacaagtttgggttccacacatagttccattgatttgaatgatggcctcatactccactaaatcaaaagctttctcaaaatatattttcagaattacaatttccctgttactttgatggcactgatggatgtattcaaagctccatgctaggcaatcctggatggttctacctttaataaacacatattgattctcatgaataatatcaaggataactgattgcagtctgttggccataatcttggagacaaatttcagaacagagttttgcaaagcaataggcctgtaatcatttggactttcaggattgggtttctttggaactagggttatgaaagagttgttcaggttctgaattgagattcctccactgaaaaattgatctgccatagcatagaaatcctcagagatgatatgccagcatttcttgagaaacataccattgaaaccatcaggtcctagagctctatcacttggcatttgctttattatttggtccatttcatccttggaaggcatggaggataaaagatttaggttagagttatgctgtatcaaactgctcagatttagatcagactgtaagtgctcgggagtgcccattctgtctgtaaagagttgaataaaatttgggccttttcttcatgagatgatattattctgtcatccaactttcatgtgagatcttatttctgttgtgactgtctgttgctgcagcttggaagtattttgggttttcatctccaaatttaacccatcttattgtacatcttttcttccaaaactcattcttgtattttaagagctgaaggatatggtcctttaatatggttctgaaattccattcttgaatggctagatctctttgctcttcaattttgtccagaaaaagcaaaacctcattgcagtttgagacgagggtatgcatatttgagagtcttttcctcaaattttgagtcctttccttaaatttttcatctttccattcaacttgatagcttgatttgatcctctgacaggaatgttccagaactgtgaaacgacatccataaatcctggcatgtcaacccataagttttcaaacctaaataatcttgatttaggaactgaagtttcaatagaaatcagacagggagcatgatcagagatgtatttagatagagctgttaatgatgtgtggagaaatttcagattccaggctggagatgtaaagacccaatcaagttgctggagcagaggttggtcttgcatgttgctccatgtgaaagacatgcctctcagagagatttctaccaatccaatgttgcttatgatttcattgaaaatcacaatatcattcatatctccaccagagagatttctattttgcactgatctaatgaaattgaaatcacccatgaaaatccaattttgatcaatgtctatctcaatggtgttcatccatgaaacaaattcatctcttaattctccagcacaagggccattggccatagatgttagatagggaccaattttcatgtaaagaggagtttgacacaaactgcatagtgatgacatatggatggctttcaatcatggtaccagttgcaacactactgttccaaatgacaattaaaccccctgagtttccaaaagaaggttgaaaaacaaacttatcaaaccttctaggacaaaattttctaatataggagtggtcaaaatgctctcttttggtttcttgcagacagataattgagcatgaagattcaaaaattttgtcagataaagccagccactttcgctcagaattaatacctccgatgttccaacataagatattgcagcttctattattctgttgattcattattctggtttgtgagaaagataaaataggtcacagaataactgtgtaccccgagatgagagccaccagcagagacccgcaacattagatgaaaaaccaaagcatgacaaaatatgcagcataaccaaagtacttatccagcagattaacaagttccaggcataatccaagagaaaagtgtcacaaaagtgaaattctaccctattacataagtgggtagaggggctaagcatagcccaattattacaaagcttagagactttattcatttctttgatctgagaagcttcacttcggacacttcctcaggaagaagtccacatttttccaccccatctcgggagagcattcacatgattacaaagaggaggcaggagccgcaggatagccttgtttagttcccaatttttttttcccaaaaacgtcgcatcgaatctttggacatatacatggagcattaaatatagataaaatgaaaaattaattgtatagtttgcatggaaatcgcgagacgaatcttttgagccaaattagttcacgattagccataagtgctacagtaaccccacatgtgctaatgacggattaattaggcttaataaattcgtcttgtggtttccatgcgagttatgaaatcagttttttcactcgtgtccgaaaaccctttccgatatccggtcaaacgtccgatgtgacacccaaaaaatttgttttcgtgaactaaacaaggcctaagataaaaacacaaggacaactatgtttgcaacacatgcccaaattatttgagtggaacatcaatcagataatttagaaagccagcaacgttttgcctacagaacagaaccatcctaggacgctagatgctaattaaattgaccctgaaaatgacgaccaacatttaaagcagttaatcacatgtctgcaacataacgttagaaatgtaattaactcggcggctaatctgaccaattcagggttaatttcgatgataaaggaatacaaccagacgcaccagtaagcaggcatgtccccacgaacagaatgcatgacattccaagaggagtacctgatcgcctccctcgagctgagcctcctcttcttttcttggcttgtgtctgtctgaatagatccatgaggtgcaacatttgttgggcggcggggctcctcgtgtcgtggagtcggcggcgatgcgcagtgcacctaaagaggtgcgccgcccatacacagtcgcagcccactccttcaaagctgtcccagacgcagcgcaggcaccctccgaatccgcgtcctcgtcgccctggtgatctctctagcgtcgacgaggatgccggcggtggcggacccggctcttctcggtggcgtccaagatggccttgttcttgtcatcttggcagcacggggcatgggtcagacggtgcagacgcggggcgcgaacggtggacggcggagagcaggacgtgccgcgcgtggcgaaaaagggacggcggcgagcgcgcggatgaggcacgcctcctgtcgaacaggttgcgggcgcgcggcggcgagtatggctccccgcgggcggagcgtcacggcggaggcgttgcaggacggagtcaccgccggggcgacaagcgacggcggcggaggtcgtttcttgggcccggtggtgggaaagtgcccgacggcaaaagaagacggcgtcacggtgggaaccggcgatcggcgcggtggagggcgatttcttggagctcaagacccagaacacgaggttgttattataaccgccttctgcacggccgcctcgccgccggaaatccgtcctcattcggacgccagcttcggcgtctgggttcatccgcattgtttcacagccgctcggtcggtcgcacctggtgcgcgtgcggctcaaccgaagcaagccacagcaatggcgccgccgcggctgcgctccaagcttcgagcaggggcatgagcagccaagccaatctgagggcttttaataattatttcctttttctacgtaggttcgaatctccgttggtgcatatttttttttttagccgctcgaattttcttttctttttttactctcaaataattttctccagtgtttctatataataaaaacatacaattttttttatcattcctttcttttacgctctaatcaccaaaatatgaattagagataataattcataataggtctgctcttgtgtttataaccaggtctaactggcatagttggagctgggctaactcgag

SEQ ID NO: 2244 - DNA, 629 bp, Oryza sativa
gtgcgcggccgtcgctccggtcgtcgtcgctgctcgggaaggtcaccgtcgtggtcaccaagccgtcgccgatctcgtccacccctccgtcgtcgccgtaggttgccgtcgtcgtcaagccgaaggtcgccgccgcttcttcctcgacgccgtcgccgtccgttgatcttctgccgctgttttggtcaccggtgagttcgccacgtcgccctctacgtgttggtgtcctccattcgcggcgtcgcgtcgtcgttcgccggcgagcttgcgcgcccgagccgccgccggtgatgacgtcatcaccgatgtcatcggtgccgtccgtcgtagaccggtcgtagaccgttaaatcttggccgttcgttgtggataggatcgatctcggccgttcgtttccgtgagccgccgccgtgcacccggtccaccgcgaaccctaaccgctgacgcaataatttccttttccttttaaaaaataattcattattgcgtcatcattcaattaaaacccatataagtgttttaatccgatttaatctataaaaattcataactaattcatcttagctcggatttagttggttcaagtctctaattttttctaaaattgagatcggggatcctctagagtc

SEQ ID NO: 2245 - DNA, 697 bp, Oryza sativa
cctgcagcccctcaagctgtaacacttatttctcatctccctaatctctggattttcctcttgtcctggctcatcaggcttgggcttgatggacgtcagatcggacagtttcatctcatgaatcccactatagaaatagctatgaaactgcttttctaaatcagcccaactgttaattgatccatatggtaaagaagaaaaccaagtaaaggttgacccagctaaagacaaccgaataacctaactttcaaagcatccacagccgatgcttcaccacattgagctaaaaatcggctaatgtgctcataagttgatgtactatcttgccatgagaactttgaaaaatctggaactttgaaccggttgggcaaaggaactctctcaaaccacttaggatatggctgccgatatagatttccagcatctttcggcctaagcctgaactgctccttcatgacatctgcaatcaaatcggcccatggccactattgaggtgtcccttaggttgttgtggcatcggctcgaattggttgtattgaagaacaaattggggtgagccgatcctgcttgctggtattgaacatgaggtgatggtggctgatattgataattcaaattgccccctggtaattttgaagatccggctgaatattacgcaccaaatgttcaggaataactagcggaattaccgtgccat

SEQ ID NO: 2246 - DNA, 678 bp, Oryza sativa
  unsure (1)..(678): unsure at all n locations
tagccgatgttctacaatcgatcggctgagtccaggcatctcataatactcccaagcgaagcagtctcggaattctttcaacagctctatcaacttggctctaaattctgtagataaattcttacaaataaatgtcggccttggtcgatcacctggacctatatcaattcttccaaatcatcggccgatataaaaccctgtccttgtttgtcatcgagatcactaccgtgtccttgatgtagacatttgaaccctccacaacgccctcgaaataacagcttgggttctccatcttcaattggctgtatattagaatcggacacttttagaaaatctctatcccaaacttttccagataaacaatcgagaccatccatctcccaaagagctaaatcagcactagcaacattgactgacctgtcggctggcacaatctcaatcttgtcgtcttgccactgaatcaagcattgatgcatggttgaaggaatgcaacaattagcatgaatccaatcccttccaagcaacaagctataagaaccattcccatcgatgacaaagaatgttgtagggatagttttgttaccaactgtcagttccacattcgaaactcctttggtttctgatagattgccgccaaagtctatgagcaccatgnttgtcttgatgagatcttcaacg

SEQ ID NO: 2247 - DNA, 709 bp, Oryza sativa
aaataatcagtcgccaccaatataaacttatgtccttgactcgatggtcgacttatcataccgatcatatcaattccccaacctctgaatggccatggcttaataataggattcatagccgacgccggcgctcgctgaattgctccaaacttctgacaatcttgacaccctttataatatttgaaacaatcttccagcattgtcggccaaaaataccttgcacgccgaagtaaccacttcatcttatgagccgattgatgagtaccacaaattccttcatgaacttcgccgattgcaactttagcctgatcggcactcaaacacttaagtaacactccatcaatcgtccgatagtaaagctcatcatccaatagagtatacttcaacgccttatatctcaatttcctagaagctgattgagatggattatgtaaatattgatgcacatcatacctccaatcaccggctgttattgctgcaatttcagccttaacatctttgatcatcggcttataccccgatgccccctgggccaaatcattagcttcaatattttgttctcgagacacatgctttaaagtaaccagccgaaattcctgcatcagttcttggcacttctcattataaaccattaatgtatcactcttgcattcatatcccctgccaattgactgattaccagcaaagaatcccccatgatttcaatagc

SEQ ID NO: 2248 - DNA, 514 bp, Oryza sativa
ggttccaaaccgactttgccgccctttaaaccaggcgccctcccttcctctttccccccccccccaatgggccccgtttctcgtccgcgccattgccgccgccttccgagctctgtctcgcctccgccgtcatcgccaagcgccgggagagccggtgcgttcgtggacgcggaaggggactccgggcgcgccctctccttcctcttccccggcccgaggccggagagatcactcccgcgccgtcggcctctcgtcacagcgccccacctcatctcggtagtgcctccctccgttctctctcctcgctccatctcctccccttagactcgggtagtagcacgtgtagcctccccgtagctagccggcgccgccccgaccgttgccgccgctcgccgtgtgctcgccgccgtcgccgcccgtgctccgtagcacccgctcgtcgtcggcctcgctcggcgtagcttcgcccaatccgacgctagcaacagattcccgtagccgcgtagatgctctc

SEQ ID NO: 2249 - DNA, 1300 bp, Oryza sativa
cgcgaagcatatcttctaggatctgatttagacgctcggtctgtccatctgtctgcgggtgatacgcggtgctgaaatttaatcgggtatccatctcttcttggagcttcttccaaaagtgagaggtgaattggcttcccctatcggatacaattttcttaggaacgccatggagactcacgatcctagcgaagtagagctcggctagtttgttccctccataggtggtcttcacaggaataaaccgagctaccttggttaatcgatccacaactacccatatagaatcatatccaccttgggtttttggaagtccggtgatgaaatccatcccaatttcatcccatttccattcaggtacttggagaggttggagaagtccggctggtcgttggtgctctgccttgacacgctggcaaacatcacaaagggccacgaactctgcaatttcccgcttcatactaacccaccagtatttctccttcaagtctaagtacatcttcgtgctgccagggtggatggaataaggactttcgtgagcttcctgaagtatcaactgtttaagttctctgttatctggaacgcatacccgatttccgttccatagggttccgtgttcatcctctgtgaaaccagcggctttaccctgtttcatattcttgaggagcccatgcatgtctggatcattcttctgagcctcgcggatttgatcgagcaaggtgggcttggcttccagcgcagccaaaaatccgcgactaactatgcttaggttcagggcttccatctgttgattaagttcgggtggaatgccacggacgttaagagtgttgcaatggcctttttgacttagagcgtcggcgaccacgttggccttaccaggatgatagtgaattcccacatcataatccttgatgagttctaaccatctcctttgccgaagattcagatccgactgggtgaagatgtatttcaaactcttatgatcagtatatatttcatagcgattcccaatgagataatgccgccagatttttagagcatgaaccaccgcggctaactccaaatcatgggtagggtagttgccttcatgaggccgtagctggcgtaaggcataggccaccacatgaccttcctgcatgagcacgcaccccaatccttggcgcgaagcgtcacaatacaccatgaagtccttgcgagtatccggcaagattaacactggcgaggaaaccagcttttcttgaacgccttctcgcattgcgggctccacacaaatttctcttctttcttcaacaactgtgtc

SEQ ID NO: 2250 - DNA, 675 bp, Oryza sativa
ggaaaggccagtgaaaatcctggacaccatggagcgcgggaccaggaaccgagtaattcgtttttgcaaggtccaatggagcaaccacgccgaggaagaagctacctgggagcgtgaagacgagctgaaggcagcccatcccgatctcttcgccagttcttccgaatctcggggtcgaaattccgtttaaggggggtaggtttgtcgcatcccaaaacgactctaaaatacatcctcgaaattatgcctagaaaaaataaaatccgtgtgaaagcctccaacaattaaaatgtgcaaagttaaaagtcaaataaggcttggaggatttttgtatatttcctaaaagcctaaaatgcgtaaataaattttagtggaattttcagagcacaaacaataattattaagaaataaacaaagttaaaatgattttataaaaagaaaagctctaaaaagtcctttttccccctccccctcttgggccggttcggcccatctctctccctctctctccgcttccccgcggcccattcggtctcctccccgcacgcgcgccgttgacgagcgggcccgcccgcctccctcgctgacgggtggggcccacccgtcatccccttcctcccgccgttcccgcgcttgcccgcgccctaacgccaccgccggcgggaatccggccgt

SEQ ID NO: 2251 - DNA, 1317 bp, Oryza sativa
caaatagctttgagccactaaatggcttaaagctgtttactgcacccctaacccttatagtataattcccttgtactcccttgcattattctgcagttgcgggtgtgtcttgttaagtacggtggttgtactcagtcttgctcaatttttcccaaccccagaaaagagttccttgaaaataaaggctttggtgtctagctcgtgcctgccgtcaagcgcctgtggtcgtcgccctattcttccgctgtttcccgtttgtctttgtgtgtgctgggccttcgctgcccatgtaataagttaactatttacgcttccgcttgttaaactctgaattgtatcaacttttggtgtaccttgcctcctgggacaaggattaatgcacgcacgtcaggaacgcccgttgggttatttccggtcgtgacagaagtccaagaggatctgacctatgttgagaaaccaatccgtatcttggaaacaaatgagagaagaaccaggaatcgagttatctgtttttgtaaagtccagtggagtaatcactcggaagaagaatcaacttgggaacgagaagatgaattgaagtcagctcatccgcatctgttcgccagttcttccgaatctcgaggacgagattctgtttaaggggggtaggtttgtcacaccctgaaaatcataaatatataaattgttgtttaaatggaatttttagaatttattttaaaagcctagaagagaagatctagttttaattaataaattccaatataaaatggggccaaataaaattttattaaatactttgcttaattctataattcctagatttttctgggatttatttgacctaaggaagtatttttaataaatggaattgcatttaagaaataatttaaattgaaaaaggttttaaaagtcttcttttggctttgggccgaaagtcggcccaaaaccgctctctctctcctcggcccaagtcggcccagtccgcagccgcgcgcgccctcgctgtcgctgacaggtgggtcccgcttgtcaggttcgtcttccccgagccgccgtcgcccggccgaaaccctagcgcgccaccgccgccgttcctttccaaattcggccgctcctttccttctccggccgaatcaaaagaggggaaatgatcctcgggatctcctctaccttttcttctttggaagcttcggctagatcggttcggaaatcgatggattcgagttcgattcggatcggcctctttccttcaagccgcgagctttccttcgccgttgccgccgccgtgggccttcgccgccgcctccgagccccttt

SEQ ID NO: 2252 - DNA, 1269 bp, Oryza sativa
taattgaccctttcaattggtatcagagcctaatctactaattaggcttaaccgcttggagagatcatgtcgggccaaacgggggatggcaaagatggtgataagggatctacgtttccttatgactatccatccacatctacctcttatgtgagtacctatagcggcaaagcttcgtacttcaacggcacggactatgccgcttggaaacataagatgaagatgcatttgaagtttattaacccatctatttggagaatagtcgaaaagggctatgttttgcaaaaacctgaggatcccaccaaggaggatgacgagaacgagcacaagaacgctcaagccgctaatgcaatacttagcgccttgagtggaagtgagttcaaccgcgtggacggtattgagagtgccaaggtgatttgggacacgcttcgaatttgcatgaaggcacggatagtgttcgcgagtccaaggtggagatcctcaaagggcaatttgagaggtttgtgatgttggatggagagagcccaagcgacatgtatgaccgtttgagcaagatcgtcaatgagatcaagggacttggctccaaggacatgaccgatgaggttgtggtcaagaagatggttcgagcaatcactccaaggaactctaccttagtaactatcattcgtgagcgtctggacaacaagactctcacacctcatgatttgctcgggcgcatcctagcccatgacatgcttgtgcaagagtccaaggaggtcatccaatacatcaaccaaagctcaacgacaagcatcaagaaggaagatttggcattgaaggcaaaggaagaagaagaatagagccgcaagagcaagagcaaggaggagatcgatgatgaagaaatggctctcttcgtcaagaagttcggcaagttgatgaggtgaagctgcttcttcaagggaagttcttccaagcaccactccaacaagtcaagtggaagacattctgcagggtgtgctacgtgtgcaaagagcccgggcaattcattgcggattgccttacctcaaggatggttcccacatcaaggaagataagaagggcgaaaagaaggatgagaagaaggagaagcacaagcatagcaagcgggaacgttatggccaagctcaccttgggatgattttcggttccgactccgagtcaagctcaagtgatgaaggagttgccacgtttgccgtcaagccttcatcaccaccaagactcttcaactactcaagtgatgaggatgctccc

SEQ ID NO: 2253 - DNA, 783 bp, Oryza sativa
  unsure (1)..(783): unsure at all n locations
cggactgggannnagtgagcttgcgatcgtattcctgcagcccttcccttgattgctttgacagacatgcaaattggtgcccatttgtagtttatgccaaccgggtgtagggtaatgcctaccaaaaaaaaaccatggcttctctttttttcaggatgttaaatttcaaaaattgtggcctattaagaaagggcctgctattcatattgcgttcttggctgtgttttcatatatgatatatggaaatggttttgcttactcaacaatccatatacatttctaaactgtgacacctattgtttggtacactcaagttctacaaaacaattttgtgcaaaagtatgttactactattgcatataagtacttcaatttatatacttttcgtgatacactgaataatatatttgtcttgtaatttgatctgggcgttgtttatatatgacctccaaccattcctttttggcactgtatatgtattctttagaactcattctcaacctgttttaggtgaggaaaacgcttaagaactttttcctaggaaggaatgatctatacctactacaagttgacacttccaaggtaacgtgtgtcagtgtatttaaactccattggatgtagtcacataatagatcattntaaattaaactagttgcgcggctagcacccatataaaattatatantttttaatatgatttacttanaacttatagataactatcttgtggcttagacttagactttgaaagacaaactttatatcccttgttttaatttatag

SEQ ID NO: 2254 - DNA, 788 bp, Oryza sativa
  unsure (1)..(788): unsure at all n locations
cctgggaannagtgactgcgatcatttctgcaccctatgagtgtatgaacagagactaaattctttgattgcttggggaccatgaattatatttttaagaggtaagggactactaggggtaggaacaatggtatgaccaatatgttaaatattcataccttcgccactagcagtgtggatctgatctgttcccttgtacttctccatgtagtcacgtttatctagctgccctgtgatgtgatctgttgccccggtgtccacataccaattggtgtcaacaccatacgcatatgtggccgcgtcgcctagcttctcgtcggagacgtacttctcatcatagcggtgccagcagtcacttgcaatgtgacctcctttatggcacgctcgacacaccgggtgggtgtccttaccgcgccctcgcccagtgttggccccgactgcgccaccacggccggcactgcgaccggcgggaggagcaccgaccgcgatttccaccgcgaccaccacgaccgccacgatttgcagcgtttgccgaaatacggaggtaagtttggcgaatactgatcctgttttcatagctcaaaagttgggaatacacatgagagattaagagaggagcaattcttgtcgctggcatcaatcctataaccgatgagtcaaagtctgagtcgaagccgttgatgatgtacgctatcagctcttcatcgtaaggagctttccttgccccgtcatctcatagtcaaaggatcgcatcttggcaatgaactcacttatggacatgggtccct

SEQ ID NO: 2255 - DNA, 764 bp, Oryza sativa
tgagtgatgtatcttgtcatatgcatatgcatgaggttatattgtgatttctaatcttttgcatagattaagggggagctctcatattcttttctagcttatctttagggggagctccacctaaatcctaatcttttattatttctaattgtgttgtcatcaatcaccaaaaagggggagattgaaagtgcatctaggacccctcatttattttggtgtttatgacaacacaattagaggttcactaatgctctttgttgagatggatgcaaggataaaaaggagtggaacttgaatttacaagctttgcggcatattttctggtaattgtcttctattccatgtatatcttgtgttttgtattaggatgccgtactattaagagggataccacatgcatataattggtagaacactagttctcaaaatcctttatttggactgttcctattttattcctgtcagactatccgatcctgatcagactatccgatgctcagactatccgaaatttcttagaactttgccctctatctttggtctgagtgttggctaaaaaatatcggactatccgatataaggtcggattgtccgatacatcggactgtctgaactttctcagaacttcactctctgtcttgaattgctttttattcctcttgagtgatttttcaaatcagacaatccaatgtgatcggagtatcggatgacccagagactccgaaattcaatggaacttgagtccctgtgagaggggctgcagg

SEQ ID NO: 2256 - DNA, 796 bp, Oryza sativa
cttcacttcttgtaccaagatgtggactatgagttaggcaccatcaaaggtctccttcctttctatgcctatctcaacaagctcttgcgcaaaactcttaatcctaaggaaggtgatgctagcaatgtccttgcctatacaagaaatttgctccacaagatgaaggcacacccacagctctttgatgcttttgacttcatctttgaaaaaatctggcttatctccatgatacctaagcgaggacatggctatgggccttacattatgaagatgattgagattgtgtccaagaagaagtttcacaaggaagtggctcacaccggttaccaagttcgtcccatcaaggctgtttccgtgccggctggtcgaaccactcgtgcttcttctcgtgctggtccctccgctactgtcacctcgtcggactccaactcttctttgcggttcttcaagtccatctttaacatgtgcaaaaccatctcagttcatcaagccaaggagcccaaagcaaggaaaaaggacactcggcggatcaaaaacctccttcacaacgcccatttgctgttgacggagcgtggggctcctcaccgggagaccgcccaggcccccctttgccggttcggccgggggcgctaagtgaggttcttcgccctcatctgaggaacgtcagcgagagaggaaatgcacaagacacgggcgacgtaaacaggttcgggccgctgagaagcgtaacaccctactcctgtgttctggtggatctgtgcgtgaaggaatacagagagccggagagcgagagaga

SEQ ID NO: 2257 - DNA, 789 bp, Oryza sativa
  unsure (1)..(789): unsure at all n locations
cggatggtannttacgatctgccatcttagtactgcaccncctaccccttcctacctctctcctcccgttctctctcctctccatcatcttccccatccttcttcgagagccgcaactgggtgtgggcggcggcggcggcgtttactttggcagcatgcgggggtggcgagcgcgggccacggcgtgttggcgtcggctcgcgggcggcggccgcgttctcaggcggcagcgtcgacaggtggcggcctaggtggcggcgtgcgcgagcagccggggaggcggcggcgtctacagtcggtggccagaggcggtggcggagatgcgtgggccaaccggcggcggtggctcgcgggctgaccggtgccagcggcttgcgggctgcccggcggcggcaacgccagggtaacgcctacaaggtgttggacgaaatggcgatgagggatgtggtaacgtggagctgagtaatctagccaaacacttttttacctacctcaactcctaaaggagccagctctcacttggagttgaagtttacagttgtgagtttgaattaggagctctactaaatggcgcctaaatatgaaccaagaatttgattttaaatttcttaattggctttgcactataaaaggccttgaaaaagccaaacttttggacataattacaacctattatctcgcttacacttacccttgaagccaaaattggtgacttttaaatttaattttgggaatggtcttcggggcttttccacatagtgtatcttatagcccatactgtaaataaag

SEQ ID NO: 2258 - DNA, 760 bp, Oryza sativa
  unsure (1)..(760): unsure at all n locations
tgttggannagtgactgcgtcatgtctgcagcccgtctcctcagctcctcgggagccgctcgaggcccccggcattttttaaaaggccttggccaaggcccccttggttggcggcttacttcgcgttttgcccgccccaaaggcccgcctgccgcccggcgcggtctaaacgggagacggcgtcccgaagcatgccgggccctacctcgttcgccaagcggagggcctcgacctccccggcggacaagtccagcgcgccctgcagctcggcaatggtgtgttcggcggctgcaaggcgggcggttaggtcgccgtggcccgtggccgccccgccgttgtgcgctttcgcgtccagctccttcgcccgcgcttcgagctcacgggcccgttgatccagtggcgccctttcggggcgggcgctttcagaattgcggggcgcctgctcttccgcgctggctcgcggaggaacaggctgttcggccagccctgggccggggcctcggcttcttaaagctcgccccgctcgggagcgcctcctccggaggcgagtgcgacttcttttcggcgcaagcggcttgtgcgccgccaatgttggcttccgggtgcgaacggggacttccggtcccccagtttttttcttttcgttcaagggcgggggcccttcttcaaacccaggggggagcctaaaggcttttttggcttccggaccccaattttttttccgcccccctttcccggcagggaggttgaaggatttcac

SEQ ID NO: 2259 - DNA, 14598 bp, Oryza sativa
tattgcggtgaaagataagcagttagtctgaaatctgtacagatctgtcagctgttaccgaagcaaaaggttcaatgtgaacttaaagatgcagtactgatccttttaagaggatttaacacagatttaacaggtacgtgccccttgtgattctttgttagttttcttgttataatgatgtttttatcctctgaattcaagcagggtgttctgtatgcgagctgtgatgggatggttctcttcagaagcattttattttaactaaattcagaagcatttcgatggcatgaggactgttcgattgacaatttgtatgtacatttccaccgtttacgcagcttaggaattggaccataattagttgtgtacctgcaagttttgtatacgaattatcctgaagggtgttcggtggattgaatattgcccttttggttgttttgcgcatcgtggatgcggctgctctacatttttcttataggaaatcagcttctgataaaagggattattatctgtgtgatctactgatcgatattttacccctctagctgagtttattaagccaattgattatcgagtgggatcctctcaacgacacatgagcatgagcatccggctgtttgttgattaaggccctcttttgtttatgtttaaacctaaataaatagatattttttcgtttgtattttttaaggtcataagtcactctatgttaagctaaaagctaggttacagtagcttttctggtctatgtgaagctaacagtctactacttaaggtttaaaaaacagcggcttaaacaataaaaatattcaaaagaaccaaagcgagagggcttaaatggttcagccgtactttaacggaaaattttttggaaagacaaaatggcaaagttgattgtcacccattattatccaatttcgacgtttggacaaatcctcaaattttaaatgataaaaagtactccctccgtattttaaacgacaccgttgacttttcgaccaatgtttgaccatttattttattcaaaacttttatgtaaatatgaaaatatttatgtcatgcttaaagaacatttgataacgaatcaggtcataataaaataaatgataattacataaattttttaaataagacgaatgattaaacgttgaacaaaacgtcaatggcgtcatacattaaaatatggaggtagtaatttagaaggtaagatattcctttacatgtgtggtagtttttatggcttggggactggggaccaagatctggtgtggttgctagtataactacaacttagcagttgcattagcaatgcatgatgagaaatctaggtttacacaaatgttctttaatacataatctagatcatcgaatcaaaatctggggttgcgaatctgccctagactgcttcgatccttattgcacagttgcagtaagcatataatctccatgcggggacaagaaagtcgattaaggtaatcaatgctagtctttgaggaaggcaacatagggtaattctagttgctaatagctgcgttcgcgacaatgatttgttggggtttacaccctctaccataatgacactaccattatagacattgatatgtgtaacactaagaaagcggaactcacatataagtgaccgtaatggtatagtgatattatggtagaggatcctcacccgatttgttgtcctctttatttccctttttttaagaaagatgacgtgtgtgacttgttagttgtaagatagattcacttgttttaggcgggattatttctcacactacagcaaaagagggggagcaaacacctgattttggtaaccttggtaaagactagaaatgtttctattttctctcaaaatgaaagatagcgaaagtggtgatttggcaaacccaattcaatggcacaagggctttcgccattgtgaaaaggtgagctctcagaagattttggggtgtaggtggatgcatataaatggatgaggttgtttattttgaagttattggctaccatctttgttgctgtagagactaggttttattctattgttaaaaaaaacttgattcaagtgtaatcaactaagagttgagaaggccaatacatatttattccttaccattgtcaatgtacatttactatgcaaaaaaccacatcactaacatttaaaacaagagaaattatatgtttcgttattgacaaactaccgattttaaaagttgccattagaaagctcgagctctagaaaaatatcatcgtacaagtgttttttttctcgttttgtcactgccattaggtttccatccataaacctccattaagtctttagaaaaccaatttgcccctagaatttgataaaaactgtatgaaaaaaatgtttgcacacttaatggagatctttttatgagcagaatggtccttttagaagaatgcaggtctatggatggaaacctagtggcgatgataaaaagggacagaaatgcttgtaccaaggtattttgtatttcgtagaactcacgttcgtcgatgccaatttataggacatgtcgcttgtcaatcgtaaaacgtagaatttctcttacaacaaacaatgcttacttttttcatcacaaatgtagttagtaataaaagttgtaagccttgttattccttgggtttatcccgagaaaactcacaaataaattactaagtctgagttgagctactagctatagtttttttttttggaaaaaaaaaagggttggcttactaactagtgtcaacatcattgagtcacggtgatgagaatgcaatatgttctgcaagctatgctaccttcatatagcatgcctctacccattacatgcctatgtcataattttgcacctatgaagggatgagctagatatacttaagttggcactacttcttaagataactccttatataccatccaaagctaccttatatcccaatagggcaaaaccaatggtagaatttgcttgcacggtaggcattgttaggtctatcaactaaggaaacatttcgcttattggaaggttggttgaagagtaaggacagaggagacaccactacaacataaaagctcatcgtggataggctatcaagaactatttgaaattcctcttatatgaatatagagatgcttggttaccatgtccatctacatttgttgataccaagctaaagattgtctttggtgagagtattcggtacttataaggttcatcatcactatatatagttaatgttaattctctcttctctcctgaagccacatcatcctagttatttgtagcctttggatcattcatctacgatgtaaattgtctatgttctctaggtatacacacatctaatttatttctagcatttttaatacaccatctcaattatttgtaccctttgatctcatatgaagatacattatcttaatatttttagcatgatatataatatataaatgatatttacttatatgatgtccaatcatttaaaataaagcaaatctaatttgcatctcatgtttacttatctcatacattttttccgcggcaacacgcatgggggttcccctctagtatacctaataaacacgaccattgtttttgtatatgcatacatgcatgcagatcacgcgaattataacgtagaggatgaagcaatgtgcttacatgcaataatggtgaaaaggtgtcactaatggaccaaaatgggaatgcatcctgctaagtgctagctaaataggcaatagctccgataacaaagttactgcaatgtacacatgcagtaggtagttttttttttcctggcctgtttaaattaaaagcctagctaattaaagccattttcctgtactttgtgccttagttttgctacgtataactacaaatataaacttgcctaactgatgcacagtaaaattagagaaccttgattgtgttttcttttaagataattgaagtgaacactcccgctctacgtataactacaaatataaacttgcctaattatctcttattacataattcactcaaaacaacggagattttaactgaaaaactctgatgtgtccttactcgaaaataatttcttggtaacagttgagatgatgtagacgaaggaaaataaaggatgttgtcaacacgatgaaaatattgaacatttataagtttgtgcatgtttgaaatatcaaacagtattagtgggaaaattaattatgcatatcatagacggtcagatatcgggaaactatccttcagacatactgtcgcagaaatttgtgaattctgaataaacagcactgacaaatttatctccaccggaaaccaaattaatcaggctttcatctgtgcgatgatcaaatttatcttgttcaattacgcttgaaaagagataaatagtattccggcagggggtgtagtgcatgtgcatatgtccaaccaaaacactggaactaacccaaatgaatagatgatgtcaaaggattatttcgatctctgttcttatttttagttaagtactgcattaattagaacaacttgctagctcctgcatgctttttttattaatctctgttgagttaatttctctcaggttagagtttagaaaggttagttctctgttatatatatgaagacgctacaaaactcctaaacaacacaaatgacagagatcggcagaagaagaaatatgtttagttgcagtcatcaaggcataccttcagctccgagttggggtttgcgacgtgctgctgctcctccttagctcgcccatatcgatcaatcactgacttcatgctgcacaaaacgaatggccggcacaactcttactaagattatttttgtaatctgaaagcacatgcatgcgtgtgctagcttttgagtgtaagagtacggcaaaaagggtaaattaacaattatatgaagtgagcagaaatcatacgtataagtgtacagttatcacacaattttattccaagagtgctagatcaattattgcttcactgcaaagcatagttgacatatttattccttcgaaaaatatgcatgacaaaatagtaaacacacaactgacatatggccatacatagggggaccctagctagaagaaggttaaaaacaaagatgaacaactagtagttaatctgagactaacaggaaattgaagaacctgacacatgcattagttcttaaacacttatggccgatgtatatgtatacatatgacagggaataataggtgcaaagatgcaaaaaaaaaatatatataaaattttcacgataaccttttgtactactgaagctgtcaaaggtaaaactcattcataagattctaatctttcatggagagaaaaaaaaaccgtagaaacggagaacaataataagaagaaagatgccaaccaaataaagtgtttacgcatggagagttgaagacgatcgaggaaaacatgctaataatcataagccaaagcaagaacggaatctatagaaaagctaataagctagggccggagggagaagccattgacctggtgctggcatactcgtagaggcggccggtgctggagaagatgacgaggccgacctcggcgtcgcacaggatggccagctccttggccttcttgaagatcccgttgcgccgcttcgagaacgtcacctgccggctcgtcgagttgtcgatccgccggatcactatcttgcccctccccatcgatcgatcgatcgatctcagctggattgtcgccgctcaggcgagagcacagatagaaatggacagaaagagagagagagagagagagaaagagaggaggagatctagctagcagggagctcttgaaggagaaagctcccaggtttcccagaagagggggttgaattattggagggggggggagaagagaggaagaggaggaatggaaatggaggggtcttttgttggtgcctttgcaagttggctttcctttaattgcttccttcctttatttagttaggaggggagagatatccccccattggctaggatcacaaggtgggttattttaactgtgaatgctaaataaatggctgcaattaagaggccagggcaaggccaggcacaggtagctagcttctagaaattgtgcagtgcctggaattggtcgcactactgaggaaagttaaaggggatgctaaggttgtgcatccatagttgtgctactaattaatccatgtttggtctcttaatattttttattcatgaagaactgatatatatactttctataaaatatatatgccattactcatctttatatttttctagcaatttttagaattttgtattaatttgcaccaacgttacttcaaagtttcaatcatttgccatgatttatatattagacatatatagagacatactgaaaaaaataatcacatgcctagttcattaatttcacattgaatttttttcctctacttttttttttgcatatatataatactgcatttgtcccaaaatataatgatgtcaaaagttgctatattttggaacaaatgtactatatacaaactgaatactctaatttaatttaatcttactcaaccataaaaattgccagctaaaattacctacaccactagaatgtcatcgattacgggtggtttaaatcttttactagcattagagaaggtttgattaaccgcctttggaaaagagtaagtgagataaagagggccatcactgcctcacaaaaccgtcttgaaaactgctgcagctatagtttgaaactaatagatcagaacaatgttctccatacggttctaattaagtcgagaacaattaaccatgataggtgtaacaagtgcgtcaaagagaaatggctaaccttttatagtggctatggattgagctcattcgatttccataacatagcaaggtttatcatctacctaccaaaatagtttcaactagaaaaagacttgtaggaggagaaaagaaaataatgtcatttcgagtaaagtgacccaattttaataaccctgatgataattaaagtgatccaaagatagatttcaatttgcagtgatgatagctgctgcctgagcaatctctactatggctggatgcatgctgtcatcatttttccatggacaatttaaaacataaagcctactactctctctgtattttaatgtataacgccgttgactctttgatcaacgtttgaccattcgtcttatttaatttttttgtgcaaatataaaaatatttatgtcatgtttaaagaacatttgatgataaatcaagtcataataaaataaatgataattacattttttttaataagacgaaaggtcaaacatttattaaaaagtcaaaggcgtcatacattaaaatacggaagaagtacaatgtaaaattctttacatgtactccatccgtacttgtaaaggaagtcgttttggacagcgacacggtctccaaaacacaactttgacttcttgtttctataaaaatatttattgaaagtgatatatatgtatacttttatgaaattattttttaagacaaatctattcatataatttttatatttttaaactcaacaacttgagagttatttctgatttatatttccaagacttgacttaaacattatcataaacgactttctttatgagtagtgaaggaatacatgcatgttcatccatgcacttttgtacatctaaatgtagaacttcatctccttaattagctggtgaggtcaggcatctctatcatagctaatgaggtggtcacacaaacctcggcatctctccctaattaagctccgtttcgtcttaaacaacgttggagtactagagtagtatagtagtactagagtacgccaagctgaaaattttaattaatcgatactaaaattgagacgtgcatctcgtaacaattgtcgcgctgatcacatgggagcctaatataatgcacgcccatgagagggccaccatggcccatccaatgagagctagctagctagctcttaattacttggtggtttagttgcttcgagtttcgctgaagaaaggcaacaacctgtgtcacggtgtgtggttaattagtgtagtttattgttctaaatcgagcaaaacgacagagtgcgtgaccaacgatcctcttaattccgacctcaagagattaattagtcctgtttaatttgccccataagctaaacgtaattagagcaggtacaatagcaggctataagccagctgcaaacatattttaagaagataaataaggagagagaagagcagcgggctacagatttgtaatcagctgtagcacggactctaagacgcggtgtgtgtatgataggtgggactagatatttatagtgtagtatgtaactattgtatgaatgagctattagattggctatatatgaattggagctagtagttggctatactattaaacttgctcttaagctatcaagctatacctcatgtgactagatagccaattgattggctgagacggctactaccctactactaataattaatgataggtgtatatatattagatgaatcaagtgtatatatatatatatacatatatatatatatatagatagaactatgtatagattaatttgtacagattgataagatctatggactgcatgtttcggagttcagctagctgtagagatcgtgcagggtttctgaatagggaaagatggaaattagtgacatcgatccgccattaagtggaggattaactatagcaagttgatgccttttgaattcttacgtacgtaccgcgcaccttcttacaagagaaccacactatactaacactcctttttggatcttctagctcgtagtcgtagacatatgcagcttttctagaatctacatctcactcaaacagtagaaaaataaattcgaaatcaaaatggaaatctagattttccatattctcactatggctgtgtttagatcctaagtttgatccaaacttcagtctttttccatcacatcaacctgtcatagacacataacttttcaatcaaatcatctctaatttcaaccaaaatctaaactttacgctgaactaaacacagcctataactgcacctcaaaatttcgagttccaccgaatagggcctaagtatatctcaaaataatagcaataatatgtcccacattaagtttctgaatttccttaatttctgtaagaatattccctgctaatcaggtcttctatgagcttttttaattattcttgaacttgttttattatcatggtcaacaacttacatgctaggatcctttttttatacatcatgctaggaacttgttcgtcatgtaatgccagttgctaaaagtcaagatataggtgataaaaccattatacacacgccctagctaggtattcctccggtcataatgttgtcttcaattatgtgtatatatatgtagctaatccgcgttaaccttaaccatatgtagttactactctatcgaaaatgtaggttttgggtatatatatatatatatatatatatatatatatatatatatatgaaaataaataatatagtcacatttatcataacgatatatatttttaataatactacacttataccactctctttttcatttatgcaagagaattagaatattagatcatcaaagtcattccatatgtatattggcttttagaaataaaatacataagcttttttatgagggtaggtaccactctcatctctaaactcgaaattaagctaccatgaggcagtgttaagaaaggatagatgctctctccctccgttccaaaatatcttattttaagagtaaattgcattggtggtacataaacttgttagttgggtgcaatttagtatataaacttgtaaaatgcttgtttcagtacacgaacttgtctagttcgtgcaaacgaggataaaaataacttggcaatgttaattttacgaagctgatgttgattaggatatgacgtgcatacgtgtagtaagtatacataagacatgcaatatttataaatttggtctctaattttatcttttatcatggaaaagatgaatttggtatatttctaacccttataccattgctcggttttttaatctttttctactatcgctatatcctactctattttttattgaagcttttttattgaagaggtgtatttctaatagcaaccttctcagatatatgtttacatagtatcctaaccagccctaaatcaataagattagccatgttttattgaagaggtatatgtctaatagcaaccttctctcagatatatgtttacatagtatcctaatcagcccctaaatcaataagattagctatgtagtgtctttttcaccttcctccgcacgcacagacaagttcatataccaaagcgagtattttacaagttcgtgtactagattgcacctacctgacaagttcgtgtaccgatgattcaatttactcttattttaatatgggatgtgatataatcgtagtgttaaaatgtgtcacatattttactaggttaatttattttgatatgacacgaggataatatttaattaaggtcttgtttagttctaaactttttcttcaaacttccaactttttcatcacatcaaaactttcctacatatacaaactttcaacttttccatcacatcgttccaatttcaaccaaacttccaattttaacgttaactaaacacaccctaaaacacaccctaagtactgtaaggaattgcattcaccgatgacaggaagtcttgtcgtaggagaagcactaggtccgtctttttgagtgaatatgcgtttctgagtttgagccagccaagaggttcatggtaccaatgctctattattgcacaagagtgcacgtgaacacgtcaccctgaacggcctgcgcagtgcgcacgagagccaatacatttggttttgcacctttgcttatcacgggttaatcacaaattatttgctccacacttttaacaatacaatttcttaaaaaaaaacgttttctagtgtattgattaaactacttattctaagttatttgttaaatttatttattaaaatatttaatttatacctttaataaatatataatgtgcatcaataatacaataaattattaataatttggttcaatcactgccatagatgagcaaatgtagcagttgctagctagctactagctagtagtagtaccacttatatatgttaggttcagctctatgctagttgcagattgcatatgagggccattcctttggatccatatgaagccgtatatgagttataattgcactttcgcgcgcgaaatgattgttcttcatgtatatttttttaaaaaaacgaatgttcttcctatctcagaaaagaaatctatctcctttcaaccgcatataaatagaaatagttggttgtaactaaacaccgcatctacaaaccttaatcttcactaaaccaggatgatctaaaaaacggtgggcgcgacgcataacattgcttataaagcaagcaagaataaaatgatcactctaacgtgtctaaataagtttcagaaccgtcggaccaatcacagccacatctgatgcgatatatagggcccaccttgttagaactcgacgtagatggaccccccgaataacctataatatatataaaatattgttatccgttgtcgtcttgcaacactaaccatataacacaaattgtttgttgtagttttaataacttgggaataaaatgttcagacttcaaaatggttttgaccaatttcctcctatctcaagacatcatttctaataaacttaattaggtgacaaaagaggacatagattagagagtaaataactttgagagatgtggatatatatgcatccctgcgtttgttggtagctcaaatcattcgccacaaaggatcgccgctagcgattcctcgggcaactgctcttgcactgtttcaggctttggtgcagagctcgaaattggccatgtctggccaatggccatacgccaaccgtaatgactgcagccgttgtcatgtgacggccatactgataaatgtcgccatagtacaggacttgcacgttgcagcgtagcaaacgagcataggatgcagccttcccgatgtggcaagcagcagatgcagctagcggcaagccggccggcgacctggcttttaatttccgggcactgttaacttttggccatgctaaagtctcgtggattccaagtgtcaatcatcgtctgcatggcagagggcaaaaaaagcaagatcttgtccaacaaaggtaaccatcggtggttatagctttgaccatgggtgcaaagcacaacgatgagtatcgttggttgaatggttgtccagcgtttggattccgttctcttggtaattggtctagtagagcctaagtaaacatactttagagaattttgtggattaaataagtattaataatttgttgtttttaatagtttgatctggcacaacttaaaataaatcaggtagatgaacaaagccgtgcaagctccgacaaattaaagtaacctagctagctagctagtaagcattgtatgagtttagtagataaaagataagctttggactcttaaccaccattcaacaacatgttaacccatgacatggcgttcaagagaagtttctcgaaatataactgctatgcatgtgcatccaatcaatgagataagagaggatagcataaatattaacacgaatcaggtcaatcacgtgtgggagattcgcattgtcgataacctttatctgtatgaccaattttcaggctataggtttcctacttttgtcgatattgggccactctttgttttattaaaatagatattttaatttgtacaaaaaccaatttttagcacgactatgaactgcatcattatttcggcttgaaatctactatgtaaacattataaactttcaaataaaactatatgcatagtttctatatatatggtgaattccccctttaaagaaatgatgaccagactgggtttatcatgaatgctacaaaggttttaggccatgtcaacttaataattgtcgtgtagtgcttgcaaattcaagtggtatattttttctaatctgcccatgaccgatgctgtgtgcctgtgtggtggactggtggatcatcaaaacacgcgcagagaactggttgcaatggttaagtttccgttaatttgttaccgcaatgacaattaacagcacaataacgtgcatgagtatagtattttctctaaaaaaagattatgtattaaaaccagaaatatggtgcccactagatgagtggaattaatatatcatattaagaaatgtagcaataaccatcattaggcacaggatgttcttatcataaaatatgcattttggtaggacctttgattagaaatttttctgtttataatatatttatttgcaaaactggttataataatatcgaatagattaatcaaagataggaataaaggaaacgccaaatagtcaacattaacaaaccacgaaagattatagcatactactctaaatgaaaaactttaaataccacatggaactgtgctcttaattaattgtgtctttggcaatatataacactaggaacttctgctatatgttggactctgtggttgtgcagaaataatgtggtttttgataaatcaccatctattacatatatgcaggtaatttttagggcaacatactggctccggctctggactcaactacaaaggtctaatgaagatggtgagttcataaaagttgcatgccagaaacttgagacgatggttatgcaactctttaccaattttggatggagattcacaaatagacttcaataaatgtgttctccttatcttagtttggtctctctttaaacattggtgattgttttcgatgtctttgatgttttgttgaactacactcttctagagtgttagattgtaataattggttgtagctctttgagcaaaggccggaatgttattccattatctaaaaaatataaactaggatacgggcgctcgcgcactagtgtacctggtgcgtattatgtagaatctgtttaatatgcagagcataatcttttttgtgttttcaatataagaaaacttactacatttgttaaataggataaatatattcttctatttaaaagtatgtttgataaatttacattcgtaaaataaaatgtgtatatgtgaagttttcatcctacttttgtccttcatatatctatacatttaattatgagtaaagttcatcaccggtccctaaacttgtaccgatgtatcatcctggtccctaaactcgcaaatcaaccgtttaggtcctcaaacttgttcgattgtgttatccaggtccctaaacttgcatatcactcgtttaggttctccaacttgttcagttgtgtcaccccggtccctaaacaggacggtctaaaaactttatatcaaaaaataattcataactttttcatgtgaactctaatgaagacaaactttatatcaaaattgtagccctcgacacgaccta

SEQ ID NO: 2260 - DNA, 581 bp, Oryza sativa
cttttccaaccaagccattgtacaacaatcgttttgcaacatatacttatacagaagaaattctccaagaaaatctgttcgagaaaaaagaaaccggaaagagttaaaagcacaaatgttagccctgccccccagcgcatgcagcacgcccaccctgatcaggtgtcctgcacgtctcagccatcacacatatttggtacacacacgaacgtacgcatgcatgaatgtcacctcggatcctctcgtgcaaatctcccatgcacacgtccatgcatcgatcccacccttcacgccatgtagggggctagggtctttagaccttgaagccgaggaagtgcggcgtgccggtgaacttgagccaggtcccgccgtcgacgaacggcccggcggtgaactgctcggcctccttctggccgatgacgcggaaccccttccagttgacgcgcttgctggtgccggcgccggggccgcggttgttgaactcggcgtagtaaagcgtgttgagcgcgaattcgccgttccatggcatgtaaccctccggcttgatgaagtcggcgatggtgctctccatgatgacgagg

SEQ ID NO: 2261 - DNA, 890 bp, Oryza sativa
aggaggaggaggaggggggcagtgaggaggagtcccgcgcggttgttgtcagggagccctcctccacggcgcgcagcggccgggcgaggagaggcggccctcctctgtatcgtacttatctacttattatctacgtgtaccgtgtttatcccatctgttttcccctttatttcttaccgctgaactaatttcccaatctcaaaaggcaggcaaaattacttgaaacagtggcggcggcaacccactgatgagctccggccctccgtggatggtggacgagcgcgcttggctggatggtggtggagcgagctggagaggacggcggccagccaccgcgagcttgtgtggaaaggaggctcgttttgcttcttcttcatccaacccccgttcttgtctttctctttgttgcttgattgtcttcccctggaatcgacatcaaaaaggaatttttctcacagttttcccgtgaccacttactgtgatcaataggaaaggaaaatggcgccttcaacacgcggaagcggcgagccttctcggcggcgtccttgtacgtgcgcccgtgctccggcatgcttcggccgccgttgtcgtcggagctcggaggcggcgggagtgaggaagaagagggagagccgagaggggagagggaatgacatgtggggcccacgtgggacccaccattttttaagctgacatgtgggcccgtggtttttattatttttcgagatataattgccacgtaagcgccacgtcaatgccatgtcagatcgagacggagtcaaattagccacgtaggcgccacatcagctaaaaccgccatcaaaaccaccgagtgacctaatctgcaccggttttaatagttgagggaccgttgtatctggttttggtgt

SEQ ID NO: 2262 - DNA, 538 bp, Oryza sativa
tgcaagccggaagaatcccgggcttttctcttgccgcaacttctctatgagactgaactggctagtgaaaaattctcgtcttttcttcccccatgcgtcttattgcaaatcaacgcatatcatattattgcaccgaccgacaccgacaatgtcacaacttacagcagatgaagcgatcgaccaatgaccacatatgatccatgtatagtcacctaaactagaacgagaacttgtacaccatctcgtgcttgtacacctgtccgggcctcacgatcaccgacgggaagttggggtggttcacggcgtcggggaacccctgcgtctccaggcacagcgcgccgtactgcccgtacgccttcccgcccttccccttcacgtcggccgtgaggaagttgccggtgtagaactgcaccccgggctggttcgcccacagctccagcgaccgcccggacttgccgtcccggacgacggccacccgccgcagcgcgtgcgcgtgcgcgtcgacgtcgtcaccgccgtccacggcgtagttgttgtc

SEQ ID NO: 2263 - DNA, 601 bp, Oryza sativa
agcatcacttgctacaagcacatcatactcattatcctgctcattaaacagctttgcttgctgccgccgtgtctctggtggaagagctccatatataacgcaacacttgtgcttcgtaaacttctcgattgccagtttcacctcaaatatctctctgcgtgaaaacgcgacaatgcagtcaccagagcgcacattcttgaggtctccaagcagtgtctttgcttcaacaacaagcggtttgaagcgctcatattgatgcacctccaaatcatctccagtatctgcgcaaatcttccgaacaatcttcagaacactagggtcaccacagagatgtatctcgtctgccttgagcccaagaacggctcgtgtccacgcatagcccctgacagggtcagccatcatctgtatctcatcaaccactgcaacctcgtagggctcctccgtggagagcatttcgatcgtgcacgcgacgtggttggagaatggcacctccttgatcctcttgtccgtgccgaggctgcagtagacgccccaggcattgaccctgtcgaagacctccatggcgaggagcccgagcgggctgcagtacacccccgacttg

SEQ ID NO: 2264 - DNA, 769 bp, Oryza sativa
tcctgcggcccttaaagactaccgaggagtcatcccttctaaatacggtcacatcaacatcggtaaaaagacaattgtagcccatggaacataattgagaaatggacaagagattatagtttagagattttaccaagaggacgttagaaatggaaagatcattggagattgcaatcttacccaatcccattacttttccctttccatcgtacccgaagagtatgttctcttgcaaagtgccatttggatcaagggaagaaaacattgattcttctctgggcatgtgatttgtgcatccactatcaatcacccaacttcttccaccggagagatattcctacaagagatcaatctctagttttaggtacccacactttgttgggtcatcttatgtcagtgacaagtgccttacgaacccatagaactctcttgatggaaacatttttgcccctaggcccaacatatttagcacccacacgaccactagcattcttcctaagaacatatgatacatcaaaaggacaatgtgaagcatgaccattaggaaggatacttttggccttaacaaagatgctaagaccttggggcttcttgatcaacacactcttgtccacctttccttttggtggaggaacatacccaaggccttcatggttgaagttgtccctttgatagcctaggtatttctttagtaccttactacccatatggcacttaagcaagccattgtgaaggagtcccataagcttctcattttgcttttgcaaag

SEQ ID NO: 2265 - DNA, 2600 bp, Oryza sativa
agggaaaacgcaaggcgtccggcatggatgggtggttccggctacgtcggcgggagaagcgacaacgtcggcggcggcagcgaggcatcgggcgctcggaagccatgggggatgggagcgagcagggctagtgggtcaccaccggaggcatggctgtggattgggggagaggccgccggtgacggggaggtcaatggaggaggcggtggcatgagcaccgacgcccaactcctctccaccggccgccacagtcgccagagccatgcctccgtcgcgagagaggagaggggagagagagttgatgagaggggatggggattgaggaagaagggggttgagaatgacatgtggggcccgcgtgggccccaccattttttattaatttcagtgtgaaactgacatgtgggtcccccgaggtttattattatttttaattgaattgccaggtaaaggccacgcgggccccacatcagatcaagacctagtcaaattagtcatataggcgccacatcaggcaaaaccgccatctaaaccgccgagggacctaatctgaaccggttttaatagttgagggacctgtaatacctggttttgtggctgaaggacgaaaatcagattcgttgacaagttaagggaccgagatgaacttattcctattcatctagatagatagagaattttttgtatttttagatttttttttttaatatttacagaaatattatagcgccgaaaaaatttgcaaaactagaccctgccgcccttcgcaagggcggcaagccgacgtggcacacgccgcgctggacggcgcgggacggccgtcctcctgccctcttgccgccctggcaaagggcggcaggacccacttgccgcccttacagagggcggcaggcctggccgcctataaagcccagccggctcctttgaggagcccattccctcctaacctctccacatcaaaaaaaaaaaaggagaaggggaggagaagaaaagaagaggcgaagccctgccggtttcaaacttcgatttcaggtaatattcgtagattatatacgtgactaaatatatgatgttaactaggatatcacttgtatttttgtagaactttggttggataaatgcattgtatgaaatagagttttacctgtggtactatataaatatatattgttagatgtaggcagggtttcaaaaaccgccgggggctcggttaaacactgtagtcgtttattatgtaaaataacggcctagtaattaactttgcagatatgtccagtaaacttatatttcaactataccatggtcaaggaaacgtccgttatgggccaactggggtagatctgtcagaatttattgtaacagcaaggggaattgataggccagccgagaggagtgtaccttctattaaaaaatggttgatgcggggcttgggagttgatccacagactagtgacattacaatctactgttgtagtaagtcgggcaacagagggtttttattgggaactaatgccggttcaaaactctgggatgtggagatggtatgtggagaatgcattgcaacgtgggtggcctctagctatggttccgtatgttcatccgaaggatccaagtgtacagatgaacatggatgatggcgaggggccaagtgcagaagtgaatgagattgaagtggatcaggtcaacgcaccagaggaagatggagtagctccagtagtagctccagtaggcatgcaacctggtggagtggctgacgagggggagactgtgggtgccattgtggacgaaatggaaaaagaggatcgtgacaacgagcgtgtcgaggaagatgattcgtcagatgatgacgagaacaatattaatccagctgaatgggctagtgatgatttttctggtttggtcatctctgaaggggaaaatgtgagatgggagtacaaggaaaacgagattatcgagggagcgaggtatggtaatggagaagacatgaaggaggcggtgaagcattatgcagtgtcacttcatagggagttttgggttgccaagtctaaccggacacaatatgaagttaggtgtgttaatgaaaaagatgggtgtccgtggagagtgcacgcctataaggggaaatggaaggactactggacagtgtcggtcgttacgaaacatacttgttatctacctggtgttcaaaaataccacaggaacattacatgtgcatttgttgcatctgagatgtatgcgcatgtcgtggacaatctggcatatgaaccgaagtcaataatccgacatatcgaacagactttcaagtatacaattagctatgccaaggcgtggagggccaaacagaaaataatagagatgagatttggaacttatgaagcctcatatgacaatttgccacgtctgctatctgttatccaacaaagaaaccctgggacctcttgtgcactcaagacattcccctcaattgaacatcctggcaagactgtgctgcaaagagcgttcttagctctacatgcatgcaagatggcattcgtgcactgtcgtccagtactttgtattgatggcacatttttgaccgggaagtatcggggccagatact

SEQ ID NO: 2266 - DNA, 651 bp, Oryza sativa
ggagatcatacaactccagaatatccatgaaaaaaatagagaatggccggaccagccccgccattgcgaaagagaggaagaagacggaccgccccgggtagtgtggcccgggcgtccctcgcccagcgcgaccacctcccggccggtggcagattccggatgaatcggcgcggcagcccggcctgcctctcgctcacgatgcgggaaggcggcagcacgctaccatcgagcggtgcggagccccgtgccatgacgccggtggaggaggagcttgagagcgagcgagtgcggcaagggtagggcacaggaaacgaagagttagagcacaagtggcgaaggcaaggggaagagtggcgagaggaaagaaacgaatccctttctcggcgtctttacacccttgccaatgctatgcccggctcctcgcttcccgcgcccgctacctcgccccctcgtttctcgcgcccacgcctccactaaccccactcgcccgtttgcggcgcacgcggcagatgtgcggccgtagcggttgagatggggcagatcgtgcgcgcattaactacgcccgccaaccgtgaaaagcgccatcatcatgtctccaggcgaaacgaaccggctcgtcccgattcgcgcgctgctcgagtaatgtagcag

SEQ ID NO: 2267 - DNA, 2806 bp, Oryza sativa
tcggtcgaccggggtctcgtgcactacgccaggagcatcgccgacgccgcggtcggtgaggtgcctcagtggagttggggctccgcgttgctggcggctcagtaccgtggcctctgcgaggcttgtaccaggacggaccctggcgcgatcttcggtgggtgccctctcttcatttctctttgggcggctgagaggattgcgatcggccgcccccttgtggagcaccacccttacgacgcgtcgctgtacgagaacagaccggcggtcgactacccaacgatgggtactctgtggtgccggcgtcaggtacgtcgctagtatttggtaatgttgtcctactattgttaacttcatcctacgtcacactgaccttattgtattgcagcgccgatgggctcacgtgcaggttaggcggtcgtacgcggagtttgtgatggagttcgaccgccttctgccgacggacgtagtgtgggagccctacagtgccttgcttacccacagtcgggcgccgctaggcctgtccacactctgcacgagggaccaggcgtactggatgactacggttccgatggtgttcgacatctgtgtcgagccgcacgcaccttaccgcgtgatgcggcagttcggcttccgtcagtcctttccagtcccgtttccggcgggcgtcacggctgccgttcaccggtaagccgttttactacgatttaatatgttgcattaacatcgggctgtccataataatttgctttgtttgtcgtttgccctaatacaatacattaatttgcaggtactcgcgcaagggtcagcactcagctggtcactggcctgccaagttggggccttttctcgacgactggttgcttgctaccgaggaggtcgtggaccacgcgggagagtcacacacggaggaggggtatgaggcgtacctacgttggtatcagccacgcacccgtactagagtcacctacgctccgacggagcaacaggcccacgccgcgagcgccagagacctctacgccaggcaccgcgaccaggacttcgctcgtgcggtgagtaccttgcatcgcacatcgtctcatcatcctttctgttggacaaaggctacgaatatttacgttgtaattaaccgtgcaggccgttgagtgcaacagggtcgtcgttgatgctacaacggcgatccaacggttaggcgcggggattgaggtgggggcagacgagcacctgtcgacgtacacgcggatacgggactcgatgcgctcggttctccgtgcgctgacctgtcgtgctgccgacgttgctcaggcagacgcagcaccacaggtgcgtccccgaccgactgctcctcgtccagctgcgcacgttcctaggccgacaccccctcccttcggaggtacgtatattcaaggtctatttgtacatcatcaatcaattgatactcaatttatgtgtaagcttacaagtgtcgcgtcgtcgatgtgtaggcttcgctcagcctgggacgacgccgggcgcccactcctggcaggctgcggggtcatcgtcacaggcaggtgtgtcggcctcgctgtctacacagttttggcaggacgccgggagttcgtcacagccgggcggcacgtctgttgcgtcggcctcgctggctgcgcagttctggcaggacgccgggacttcgtcacagccgcccggcacgtcttggcagggtcctaccgggacttcgtccgagcacgggtgggcttccgccacgcacttcgaccttagtgacttcgacttcccggacattatcggtccctcacagcttggaggcgcaccgccggtgcacacgcaggagcagtcgccctccaccccactcccagaccctcgcgctacccgtgctgtcccaccggatcgcttcacgtactcccaggaccacgtgcgagcacaggcccggaggaccaagcggggtcgcggcgcgagtcacggccagtagagcagacatctctttatttttctttacattcttgtactatatggttgtaaactgaatatgttgttgtttatattcgggactcgcattcctatacttcgctgttacgttttccaaaaacaggagtcccttccagccgttgtgcagaggggagcagtgaaggaagctgccgcccttgcagagggcggcaagccctcggcacaccgcggcccgtgcgcgccgtcaagacgcacacggcgccgtgtgccacgtcggcttgccgccctttcaaagggcggcagggtctagttttgcaaattttttcggcgctataatatttctgtaaatattaaaaaaaaaaaatctaaaaacaaaaaaaactcgatagatagatagtgtgaagctagtgttgctagtgttgagtgtaggcatgtgtgtatttcagcccaacagggcccattacaccaatgtatatgtatagtagaagagagaggaaatagtgtgaagcttctggagaaaaacaatcacctagcaacatggtatcagagggcgaccgcgtcgaggctaaaccctagctagcggcgcgccggtgtgtggtgctgcagcttggagcaacggagtggtggcgttgacagcggagacggcgacagctgctgcagaggatctcgccgcagccggcgtgaaggagggagcagggtgtgcgctcgctggctgagccgcgcaaggggaggacgcacggcgggtgagaggcgcactgtacgagctgtcgtcggcggagaaggggaggtcagcgacgcagcggtagagcttcgcggctgagaagacagagaagagcgaggtgtgcttgtgctgcttggatttggg

SEQ ID NO: 2268 - DNA, 1515 bp, Oryza sativa
tataatgacaacaaatttggcggaagtttacaactgggtgatgcgcggtgtccgtggactcccactagttggtatagtggagttcattttacatgggacatgcaagtatttcagggagcggttccaagcagtttttccctctatgccgaacaacaacattttatttggaactttcatggagaaaaaactagcggagtggcgtgcaaaggccatgaaacatcgagctctagtgcaaggtacccaacaacacaggtttgaggtactctgccaagacaaggcaggcaggggtatctaccgcaagagagtaaagcaggagtgcgttctcaaagacgacggcacatgtcactgctcctgtagaaagccgacgctgctccacaggccatgcacccatgtcatttccgcggcatctgagtgtggcatccaagatgcagtatatgtgtcacaatacttctccaagcaagcaatatatcacacatggagtggcgagatttttggcttcggtgtagctggggagttcacaaagattaacgatccgataatctatattcctgacccaacgaaactccgagacaaggcgggacggaggaagactcggcgcatccgcaacgatatggatgagtcggaggcaggcagggtgaagcggtgcagcaaatgcgatgaacgtggccacacctacaagtattgtcctaaagacaaggaaaaaccaagtgcggcggaggcaggtctatcaggatcagcagcagatggagctcgccctacgggtgaaggcactacttcaaggcgaccccgtcctagacgttctcgtggaacgaccggttacgtggtgtagttcgtgtgttgtatgttggcaaaaggctttgcttgtaatttcgttcgaacttatcgatatgttcgcattgtgttgtgttgcgaaccacttgttagacttccgcatgtaatgtcttcatgttttacggcttgtaattttgttttatgttatttcattctcgttacgtgcctttgtgtaacgaaagttatgttctcaataatctgcactcttgcatgtctctataagtattcttccgtttcagataacttgtttttacaattatattattaccttcttatttaccctaacatgtaacacgttacttgcagagatggcacatcctgagttgttggatccggcgatagatcagcgccaccggtcgtaccttactgcggtggagggggctcagcttgggacgttccgtccacggtcgtcacgtgagcgacttttggttcacgactccttcgtcgagaggtatggttttactgtattcacgacaccgggcttaccttactacggtggagggggcttagcaatgtgttcattttaacgtctggtattatttcgctttcgcaggttgcgtgaggccggtctcttaccgttggctcggctagttgaggccgcgaccggcgacgatgacgtgacgagacgttgggacccggacaggtccctcctagcagcgttggtcgaccggtggaggccggaga

SEQ ID NO: 2269 - DNA, 804 bp, Oryza sativa
ccttgttctcaatcacctccctgaagactccggacatgtcggacggctgctaggtaaatacatctgcattgtcatagaggaaggtgatgagcttgagttccaatttgcagtcgagctcggcgccaatcttggccgtgtttgtcaagtgtgctactagacagcgggattatctttatggcgtcgtctggtttgggtgccaagttgggtttgctcactttcccaggaggctcgattgtggcgggactgcggtagtttgctcgactatatcaaggctcatcttgtcacattgcacggccatcttcgcgttccctggcaccgtgattatccttttaggtcccggaatcttaatcaactggtaggcgtaatgcgaagccgccatgaatttggtgagtgttgttattctgaatatagtgttgtaggcaatatcgaactctgctacatcaaaatgatatgctatgtctgcaagttgtcaactctgccaaaggtcacgggcaatgtaatcttcccccaacaaccttgatgatgactctggggtaatgccatggaagggctgttctgaggggatgagctcgcttctaggaatccccattgcgtcaagcgcgctgaggaagaggagattgattgactgccaccgtcaatgagaaatcgcgcgactagaacgttctgaatagtaggcttgactactatcgggtatcgtccaggggttgtcgtcagagaagggtagtcgatgtcagagaactctatcttctgatttgaccaattcatcttagacgtcgatacccgagatgtagagcatacttcgtg

SEQ ID NO: 2270 - DNA, 777 bp, Oryza sativa
  unsure (1)..(777): unsure at all n locations
agtgactgacttctttcctgcgncccctcatcgtagcgatgccagcagtcacttgcacatgaccttttttgtgacagacttggcacaccgggcgagtgtcattgccacgccctcgcccaggattggcaccgcctgtgttcccacggccaccaccacggccgccgtgaggtgcgctgctgcgcccgccacgatttccaccacggccaccacgaccaccgcgatttgcagcgttcgccgacgtggtgaggtaggcttgacgaatccgaatcctgttttcataactcaagagttgagaatacacatgagaaattgaaaggggtgcgattcttgctgttgccatcaatccttcaactgttgcgtcgaagtcggagttgaggccgttgatgatgtacgctatcagctcttcatcgtcaagaggcttccctgcacccgccatctcgtcgccaagagatcgcatcttggcgatgtactcggagatggaaatgggtcccttctgagttgtcgttagtgcaaggagaacgttgatggcaccagctttggacttgcaggtgaacatgtcgttgatcatgctccatgcttgggccgccgtctttgcgccagccacctgctgcagggacctccgtgacagggagggagagaggaaccccagcacctgttggtcctgggtgaaccacttgatgtattctggaatggagatggtggtcttgactttcttgtcgccatcttctttctcacactcgggccgcggaacttaactgggcccgtgatgtacccttt

SEQ ID NO: 2271 - DNA, 931 bp, Oryza sativa
gtgcggacaacgccaagctgcaggaggagattgccagcgcggaggaatcaccaagtccaaggacaactctgcttcactctggcaagctctgcactagaactacgggcgcctcgatgtggccgcaaaagggcctggggatgagcgttcctcatcccgagtttcctgacgaaaccacggtcctggtgtcccttgggtcgctgataaccaagctggagaccgccgcgagctcccatgcagaccaagtagacaagggaatgaggtctaggatccagaccgacgcatgccacgttcttatgtgcctcaaactcacacgcccggaggtcaacattgaacaaatgatgaccaagggaggagccaacaagcgtcgcgaggacatgatatcagaattggaggatgtcgaggagtctgtgatccccttttttgaagagtaatatgctaattttagtttcattgcaaccttaaggacaagtatttcgtctgttgcccgagaacacttcccttctgttatccttttaaggtttccatcttgtcttttgtattctgtagatgctttgaagtcgagaatgagaacgtccagcaaggcggacgctcgtcaggcttaattgcacatcctagtacgccctaggcctcgtcaaccccgagtgatggcgaccgtgctctggtcgtcgtcacttctgatggcacgttggcctctcaagatgatcaactcacgctccttcgtgagaaatatcaaggtgcgaaaacccgaaattatagtgtattgctcctgtactcagaacaaaggatgctaatggtgtcgctgtctattctagatcttaaacattctctcgaggagatgaaacgctgggccgagtactggagaactaagttcgaaaagaaagagccggagcgagcaaccgacaatatcaagaaaggctagaactcgaagctt

SEQ ID NO: 2272 - DNA, 1534 bp, Oryza sativa
aatttttttaaaaaattgacatgataggttagtatttaatatatcacttcacaaacatacaaatccaaattcgacttctacaagttgtaacaaaaacaataaatttaactgtgaatatatgtatactagttagagtttgatttgttactttcgttacaacttgtagaagtcgaatttgaacttgcatgtttatggagtgatatattacatattaacctatcttatgaatttttttgaaattttttcataatcatttaggtggcatgcaagaaacaagtggacgtccacccgaaagattagaatccatcctcgacaagtcttgcaatcttggtaagaaactaaaatagaacacggactttggatttgttcatatgtaaacaatacaaatttttcgcaagaggacaaacacgggatggtattcaaccatgtaggaaccgttaaaccagaaaccagatttaattttacacaacttcccacgaattaatgcagcgccgccacacggtcaaggcagagaacacgtacagtatacgttgtcagttcacgaggacctccggcagcatggcgtccttggccgccggtggcggctgcacgaagcgcgccagtaccagtgccgcgcccagacggcgcccatggcctcgagcggcacccccttggtctccggcaggaacgcccacacgaaggcggtcatgacggcacccaggccgcgtagtagaggaacgtggcgtacttgaagctgcacagcatggcgaggaacgtctgcgtgagcacgaaggtggcgccgaggttgacggccacgctgatcccctgccccgccgaccggatctccaccgggaatatctcgccggggatcacccacgtcagcgggccccacgaccacccgaacgccgccgagaagacgcacgtcagcgccaacaccgccacggagtagcgcctcgccatcgccgactcgccgtcccgcccgatctgcgaccccatgatccacgccaccgcgacctggcaggcgatcatcacgaggccgccggtcaggaacagcacccggcggccgtaccggtccaccgtggcgatggagacgagggtggagccgaggttgacggcgccgaggatgacggcccccatcagcgacgcgttgctgccgaacccggccgtctggaagagcaccggcgagaagaaggcgatgacgatgacgccggtgagctgctggagcagcggcacggcgacggccatcaccaggtgggggcggtgctgcctccagaggatcctgcggtacgcgccctcctcgttggcgcgcgccgcctcgaccgcgcgcgccacgccctccagctcggcgtccacgtccgccttggcgccgcgcacgcgccggagcgcggcgcgcgcctgctccacccgcccgcgcacgaggaggctgctgggggtgtccgagatgagcagcgtgccgacgaggatgacggacgccggcgccgccgccaggccgagggagagacgccacccccaccgcgggatgcgcgccgcgccgtagtttgtcaggttggccgtc

SEQ ID NO: 2273 - DNA, 2375 bp, Oryza sativa
ccactcgcccgttataagatacttcctccataaaagaaaaattaagattagatgcaacgttttatctagatttattatactcagatatgtctgtcggtgacatggggccgggggtatcgtgactagaggcttgggtagccgcggtcacccacgtggcccgaccccctcgggggggtcgggcccgagggtgacgtggccacccctccctctgtctccccgaggggtcaggccgctcccgtttcggccccgagggctggagcgccccggccccctgtggttttggcgccacgtatgtgggttagatgagcacagcgggctcacctaaccgcatttatagcaggttggacgagcgcgccacgccgcatttaatgcggcgcagcgcacgcttatccggtccgtgaccggtcacggtgtgtaccggtcacagaccggtcagatcgcgggttaggtggcaacaggcggcctgtcacacgcctcgccccgtcccgtcggaatgatgagagctgcgaagggacgacgagtctcttcgctcgtacattcagcggttctgtcaagtccgcaacaccataccgtgcatccccgcacacgcggtgatctacgcgttcaggaggggcgtgcggcacaaccgcatgctcgagaagatcgcctccaaggagccccagaccacagcgcagctttttgagctcgcggaccgtgtggctcgcaaggaggaggcctggtcctggaactcctccggttctggtgtggcagctccggccgcccccgggtccgccgctcggtcagggcggcgggacaggaggaggaagaaggggtcggcccattccgacgacgaggggcatgtcctcgccgtcgagggcgcttcgcgggccacccgaaaggggaggcctgcgagcgacagaaagaaggaggccggcgctcccagcagggagcgcccgaccggcaagtggtgctccgtgcacaacacctccctctacgacctcgcggactgccgcgcggtcaaaagtttggctgagcggacgaggaagtgggaggaggagaggaggcaggagcgccgtgagggcaaggccccggcggccccagccggcaaccggcgaggtgaggccaagcagaaggcccccgccgaggacgtcgacgatggcgacgataacctggggttccaggagcctcaggccacggttgccaccgtcgatgggggagcgtgcgctcacgcttctcgccggagcctcaaggccatgaagcgagagcttctggccgcggcccctacccatgaggcgacgcggcgggcgcgatggtcggaggtggccctcaccttcgaccagacggaccacccgccgtgcgttgcccggggaggacagatcgcgatggtggtttcccccaccatttgcaatgtgaagttggggcgtgtcctcatagacgggggtgcagccctcaacatcctttctcccgcagcctttgacgccatcaaggccccagggatggtgctccgccgtcccagccgatcatcggtgtgacgccggggcacacttggccgctaggtcatatcgacctcccggtcaactttggtggttccgccaatttccgcacggagcgggtgaactttgatgtggcggacctcagtctgccctacaacgcggtcctggggaaacccgcgttggtgaagttcatggcggcaggccactacgcctatctccagatgaagatgtcggggccccggtggccccatcaccgtccatggcgacctcaaagtcgcgcttgcttgtatggagcagcgcgcggaccaccttgccgcggcgtccaagcccgcgggtggcgacgagagactcagcacctccatcccggccgccccaaggcagcagatggtcacgtgcgacgaggtcccggtcaaggaggttaccctgggggacggcccgtccaagaccacacgaatcggtggtcttctgaacgacaaatagaaagacgcgctcgtctccttcctgcgggcaaacgccgacgttttcgcctgaagaccggcggacatgcccgtggtccccagggaggtgattgagcaccgtctcaccgtgcggccgggcgcaaggccggtccggcagaaagtgcggcggcaggccccggaacgtcaagccttcatccgcgaggaggtggcgcgacttctggaggccggattcatccgtgaggtcatccatccgaagtggctggcgaacccggtcgtcgttcccaaggcgaacggcaagcttcggatgtgcatcgactacaccgaccttaacaaggcatgtcctaaggacccttaccccctgccacgcatagatcagattgtcgactccaccgcggggtgcgaccttttgtgttttctagatgcatactctggttatcatcagatt

SEQ ID NO: 2274 - DNA, 788 bp, Oryza sativa
  unsure (1)..(788): unsure at all n locations
agggcatggcgccctagttgggttaaatggaggcttggagaggaggggctaccccttatttaagttcctcaaacgctccgggcccgtttactaagacggagaaggttgagcgggctttcactcagttgaaggcgtacctcagttctcccccagtcctggtcgcccgggagccagatgagccgttgctactctacctggcggcaaccccgcaggtggtcagcgcggcgttggtcgtggagcgcgacgaggacaaccctcactccgcgcatccccaccntgtgtcgactcgacccgggagagagcagggaggagaggcccccgagccgaacggcggcccgaggcccccgacggccggagctggccctccgcctgcttgtccgacggtgccaggtgcccccgacccccaggatggccccggggccattgcgggaaggccgcgcctgtcgccctctaaccccgaggtcgtcggcacagaagccgagtgcgccccgcgtggcctctcggacgaagagcgccctggagatgcggcccctggcgaagaggatcggccccgccgaaaggtgcagcggcccgtctacttgttagcgaggccctccgggacgccaagacccgataccctcaggcccagaagatgctttacgctattctgatgacttcgaggaagttgcgccattatttccaagcgcatcgggtcacggtggttacgttttaccccctcggccaaatcttgcataaccgagagggtactggacgggctgcaggaaagacgtcagtcactnntcaccacc

SEQ ID NO: 2275 - DNA, 751 bp, Oryza sativa
tcctgcagcccctttattgctattgcgattttaaaatcaaacatgattattcttttaccttttagaagtcctgaacctttaaaaattggacctcgtagtttttaaagtttattgtctcgttgggtttcattttttataacttttagaagtcctgtcaaacactgccactatactactctacgactcgtctgccgcttactctttgttgtcattgggattgtaaaatttgaacataactatcattggaattcattttttactttctagaagtcccaccaaccgtcgacggctctgccattgtactcttgtacaacccgcccgccgcctcttctttttattgccattgagattttaaaaattgaatattattatatcattatgcttttttactctctaagaagtcccgccgaccgccttgacctgttacttcacggcctacgcgttatccctcctattaatcgtcattaggattacatttggtgttttattaatagttttttagatgtcacatcaaccgccaccactctaattttgattttttttattttttttattctgaatttttataatctcgtattgggattttatatggtctcttcttttaatattgcttaattctaattccgaattttagttatttttaaattgtatttctactcgaactcttcttttcctttttttttttgctaattgtggattttattttgtatttttaattgtgaataatctcgtattgcgttcttatagggcc

SEQ ID NO: 2276 - DNA, 763 bp, Oryza sativa
aatactgtcaagtgcaacgcacgggtgagcaactagtgttatataacgaggctagcaagtcctgcacaaaatattgaatgatctttgattctgttgttcgatttatgttaggaatctgttatgtcactcagaagttggggcaaagtagtgtttgactgaagaagaatttctgaattaccaaaatctacaccaaacataacaagtagttgctaaaaaaagcacagtcatgccaaacgttcaagttacaatatttcatccaaaattacagacatgaaaggaaggtgaaattccatacctcagaaaccgaaggaagaaaccatccatatcgtctgccattgtacaagcatttacctccagctgctgggccagaaggtatgaatgctatatccagtcttccagttatccaaaagaatcaccttcttcactgcccaccacccaattatcatgaccgccagcatcgtaaaacgctggatctgcaggctctccaccctcaccagcaagtgtgtcaccatggcgatcatgagccccacgagagtgtacaagaacccaaccgcaaaaccctcggcgccgagctgcatccagacccctggtagaagaacacgagcttgtttggatcggaccggtcggtgatgaacatcggcgtgtgcctgatgatcccgtacatccccccggacacgctgaagaagtaaatgaacagcgccccagccatccacacccgtcggtcatggaacaaggtctccccgtccatgatcgggctgcagga

SEQ ID NO: 2277 - DNA, 630 bp, Oryza sativa
cgatgagggcagtctcccgctcctcctccacctccctggcgatctccgccaggtccttacgacgggcctcgagctgtgaggcgtgccgccggtgtgccttgtggcccgcctccaccatggcctccaccgagcgccgcccctctcaacgcacgcccacgccgcgttgagctccgcccgctccgcctgtagggcctccatctgggcacttaacccgtccagcaccgtgctgttcgcggcggccaaggcctgcaggaggggctccgcgctcagtggggcagcggaaggcagaggggagagccccctcggtgtgggtgccgcgcggctcggcccgccgatcgacgtgccggactcgggggcgtcccccgaagctggctcgtcccaagcgtcgcccgaggggtcgggcccgagcggcgtgcccgcggcctcgtcgtgggtggcctcggaagtcgtcatcgcctcgggcggagtcgggtcgggggtttggcaggccgcctggcgtgcgcgcgccgcctctgcctcctgacggactccccggcccagcggagtctgacctcctcccgggcggcctcctccggctggcgaacccggacggcctctgggcagcctcctcggcttcccggaggcggtccg

SEQ ID NO: 2278 - DNA, 749 bp, Oryza sativa
cctgcagccctctatgcacaatgtggtcgccttaattacaagtttaaaattgcaaaatccaaattagcctaggaatcagacaaggagtagaagtcgtatctcaagctgcagcttccacccaacactttgcctccctccttggcgcaacccctcgccagcagttgatcaatggcggattccaggcacatcttgcagtcgccgccggagaggtccttggtgcactgtgccatcccgtgcagcctctgcgcaccgccgaccgccacggcctccccggcggcgaacagcagcggcgacaggtaggccgtgctgtcagccgcttcatcagccgggacacctccctgtcgaggtcggccgacctgtccgcgccccgcaggacgcgggccggcgggacgacggcgcggtgctcggcgtcgacctcgccgaagaatggctcgccggagtagcggagcatgcacgcgtcgagccagactacggcatacttgttggacgggcacacgcgccgcgccagcgcacccgccgcccggatgcactcggcgcacgttgcccttgcgacgtctccgcggcagagcgccaggccgtgcacgcgctgatcctccccatcgccgccgaccccgaccgtggcgatgtgaacacgatggccggggccttggcctccaggagcgagacgaaggcgccccaggttaccgcgtacgatctgtcggcggctaatctgtccgtggcggagcacgacgcgacaggctccaccacgg

SEQ ID NO: 2279 - DNA, 11074 bp, Oryza sativa
ttggcccgtgcctggcccgtgagtgcggcacgtgggctggcatggtacggcccggtgcgtcggtcgggccgtgccggcccgacaagcctcggcccaggcacggccgggcctgggccgtgccgtgccaggcggcccacatggccatctatagcagtggcaagtgcggccggtgatggacatcgcagtcgctgtctcctccctctccggcgctctttcacccacgacgtccttgtctccctccacctcacgccgtcggcggcctcctgcgaggtagcgacacgagctcgcgaggagataaggcggcggcgagaccagcgaaggcggctcgcggtggcggctggcacgagctttgcgcggagcagataagacggcgacgaggtcagcgaaggcggttcacggcggtggaaggcacgagcttcacccggcgagcaaatccggcggcggcaaggtggggacgatgacatcgggcgagccggcggcctccagattccggcggcggtggaggtagcagcaagcgacagagagggcaagccgacggcctccagattccggctgcggcggcggtggttgcaaccacgtggagcgggtcctcccggagcgacgacgggggccggagtagggaagcccgaagcctgcgaggcaatgaggtggcaacgatgatgaacgacgagaggttgaagacgggggcatttttgtccaatatgggtaaaatatgtatactagcggcatgtttcaaactatataaaagttgtaaaggcattgttataaatacataaattgtaatggtatatttcaaatccacacaaattgtaatggcatatttcaaatccgttaaatttataatggcatgtatctaattaaccctacaaatttataccacgtattgattcttgtcccttttccagaatcagttgtagtggatagcaatttaacttgacaaaaattctttagagcgtttgaataattaccaccagaagaaaattgttgagaagtagtaataggcaataacaactgattttgaagttcatgtcctaacctgctcaaaccatatactccgtaccaaaacatattctcattgcatctactagtattccagtcatcacgtgatacaggcaaccaaacgattccattttgcaccggctcatctaagcccaaggaaacgctttggatggatgacacgtggactccctggggatccgacggtatacgatgtccttccgagcggctcggctcacacagctataaaataagaccgagaaagcgactcgcacacgcaatccatcacgcccgccaccgccatggctgtcttcctcctcaagtccaaggcaatacccacctccgtcatagccttcgccggcgatgtcccgctcctcgccggcggcgtagttcaggacaacggcatctcgccgcgtacgccgatgagtatattccgtacaagcccaggcgagaagatgctggagatggtggcctcgttcccgtcgccggagggattctgcagcatcgactgagcgaagccatctgcgtccaacgacttctcgtgccaggctggtctcattgcgggcggcctcgagaacggcatggtcgccatgtggaacccggacctgaagctccggtgagtcccgcgccgccccaagcctctgttctccttctcgccgcgccgccgcgggcacgccgcgtcgcatctcagtttcgttctcgccgcgcacggcgcctcctcgtttcgtcttcgttctcgccgcgcgcgccttcgtctcgtttctgctctcgccgcgccgccgcgggcacgccgcgtcgcatctcagcttcgttctcgccgctcacgcgcctcctcgtttcgtcttcgttctcgcgcggcgcgcgcgcatgcctttggcgcgttctcgccgcgcatgcgccaaggtttcgttctctcccgctctcgccgcgcgcacgctgttctgttctcgcggccgcggcgggcacgcgtccagctcgttctcgccgccgccgccgcgcgctcgcttttcggctcgttctcgctgcgaacacacctcctcgtttcgttctcgttctcgtcgcgcgcgcgcgcgcgcgcttgccttaatttgctcgttctcgccgcgcacgcgcctaagtttccttctcgttctcgccggcgcccgcttcggcttgtttatcgccgtgcgccgcgtcgttttgcttctgttctacctcccgtttgcactaattttggttcgattttcgcaggaaactaccttcttatctacctgacgaggagatcctcaagccccacccagatggcgttcaaacttggattcgcaaggacttcgaggtcatcgaggactacctcgaccaagttcaagttgatggaaactccagggctctacatctccaagtgtcccccacttatcaggaaatgtctggaaatttgatggtggaataccaagacgacattatgtgtcgcaccagcagctctggcgttgttgctttgtttgccaaacatactggaaaggtacgagttccactcctattcgaattggtttgtgttacattcttcctgtgcctttcatgtctgaagcgcagatcgatcgatttggggatttaatttccccagctagctcgtggtttcgggttgatcgaaatgagcgtagtgatgtttgtctgatcggctggctagtggttaattttgctgtggggggtttgggaggggatcgatcgatctggtgtgctttgggttctagtacagaaagtggagatatggaactggttctcggatggtgcattcatcgtttctcggcggcatgcacgtttcaggcgtaggcttttttactctgctactgctctgcgtttttcctgtttgattcaactttcaaccatgcttgaactgaactgaactgaactaagaggttggggatttggctgaacttgtcacacaagaaatcccttgcaaaagaggggcaagaagatgttggctgttatcgtcagtttcctgcattattttgtgtttgatccagtagttcaagacaagttggtttgtagtagtgtctgtccgagtgatgtcatgttttttttcctaccttttgctgctctagctcatttcagtaatgagatgggagagctcttgctctctttctcaaaaaaataaaaaaaaatgcttgaactgaacaaacagcaaattgtgtgatcacagatttcagatgtgcctgccttttttttcctttttgattgaaatttcaaccatgcctgaactgaacaaactgcaaatagtgtgatcaaagatttcagatgtgctctgctttttcctttttgattgaaaatttaaccatgcctgaaccgaacaaactgcaaactgtgtgatcaaatatttgagcagtgttgttttgttttgtacaggttagaggcctgtcgttcaaccccaatgcaccgaatctgctggcttcgggtgctgctgatgggcggattatgctgtatgaccttgcccatcctttggctgagacaatccctgttcaggtaaatgtcattgaccctccgatatacagttgtgtgttgtttctttttttctaattaagatgtagaatatacctcaattttcattagcacgcttttcaaactgctatatgatatttcctctatcccataaaaaaaaccaacatccagccacgtccagattcatagccacaagttagttagggagtacgtttcgtgcgaaaacgttctacataaaagttccttaatatcaaatacatctatttttaagttcgagtaaattgcatcaacgataaaaaaaaacttggtaggtgggtacaacatactacatgtaaacatccgagtataacaatttgacaagtgagtgtgttttagtacaaaaaattgatagtttagtactttggtgcaacaatttagctaagtatgtgttgttttggttaacgagtgctaagtgacctttttttttcacgatatcaatatgccatcagatatcaatacttggtttgcttgctctaacttcatcttcactagaaaaaaaacacacctatttacaatatatagcctatttaggaggagtagatggtaacatgtttattgtttgctcttttttttttgtcagttatgtgattctcctgatgaagaaatatcttgcctctgctggaactcctataaagttcatgtcatagcatctacaaccacttgtggaagaatatgtaagttcttcttacatgactaaattttctttttgtatttttttagaaatttaatcattattttattttttatattaaaatgcaggtttccatgataccagagcaaaaaccatcattggatggtaactacctttttttttaatatttcacctttctctaattgtgttgctcactaatgaatgtattgagatttttacagtaccactcttgattgcaaaactaagagcggatcaactgtgatcttttgtcctgatcctgattcagaaaagttgctggttgcacgggaagattcaccgtctgtaaaggtaattttctgtttttttccgttgcatatgaatatgcttggaaagacaggaacatcaacttgttaactaaacttgagcaagtataattaatttaactggataatttaatctgtttcagattttgaacatgggaaacacggatcataatcctgctggtgaaatccccttcagtaactcagaaggtagtccgtgttactcggttttatttatgctgtaccatcatgttacaatctttgctggtagtctcttaatttgactcgctagtgtatgtagtagtggattgtaacatcatgttactatatgtgctaggtatcgttgctatgtcttggtgcccacacaatcccaacttactgcttgcgtgtaccaagaacaacaagattttggtctggaacaagaaaactaacaaggttctcccgaatccattatctttaggagtacctacttagtgttgcaaacacaactgttggattgcacgattaatagtcagtccgtttacaggtaattagcgaggcaaccgctgcaagatgtctttatgctcaatggagtagaacaacgccaggccaattagcagtcatccaagaaggcaagctgaggctttgtaaggtgacccccttacttatatttgtcactaaacatggcacactttatatggaagaatgcatgttatatgttataaaaataatatatgtatatatttagataatataaaaatgatgtgtagatggtgatttgacattgcttgcatgttaacttctaaaaatacaacaaaattacaaatgatatgtcatatttgcatgagatgtaaaatattcgagataataattgctagtggatgatgatgtggcacacttacatgttgaactttacgagttagtgggtacaaatatatagaaaaaatatatagatttgtcatcacaatggtagtcattaacacttctccttttcttcgatgcagttggatggagctgatgtagctgagtgaaggctaataggagtgttactgctagttctagatggcgactagattggatatatagttggatggagctggtgtattttcttcgatgcagttggatgaagctgatgtagctgagtgaaggctgagaggactgttgctagttctagatggcgactagattggatagttggatggagctggtgcagctgactagctgagtgaaggtgtttctccagttttaaatgacgactagattggatagagaagttagtgtagctgagtgaaggccacgtgtagctttagataaccacacttgaatcaactatagatggccatctgggccgcctggcacggcacggcccaagcccggccgtgcctgggccgaggcttgtcgggccggcacggctcgaccgacgcaccgggccgtgccgtgccagcccacgggcggcatacacggcccaggcacggcccaataccactcgggccgtgccgggccggccagaaggtatgatgggctattgtgctgcctcacagaaaaagtctatatttggtccctcaactctgtggctgtgtttaaatggctggaaataagtctatttttggttcctcaactttgtgggctgtgtttaaatggctggatagtaagtctattttgtatacctattgtcttgggccatgccttatacgattatataagtctatttttcgtccctgtatttttttatttgatcgggccgtgccgggccggcccaccgtgccgagggtgcagcccaggcacggcccggctgtcgggccgggccggcacgggcacgaccctagtcgggccgggctgtgcttgggccgggccaaaattgcgggcttcgtgccgggccgtgggcctcgggccatatggccatctatagaatcaactattctttgatccgctaaaaatagaaggaataggttcactttgtaaccctcaaaagtgatcgaaatttaatccgtgaccctaaaccacaaaaccggatatctcgatcccaaactcttaaaaccggtgcaatttaactcccttgacggttttggaggacggtttcgctgacatggcgtctacgtggcatcatagtcatcaaataaattaaaaaaataaagtggggcccacctgttagtgattcccctcctatattctctctttcttcgttggcagcggcggcggccggtggcatcggggtgcagcggaacaagtcgcggcggccggggttgcggcctctctctccgacgacctagagcccgccaccgcccgcacccgcacccgcatccgatccatcctcgcgatgaggcgctgatgagtagctgttgaagaggagctcggccggtgccctgcaaccaatccaatccacgagtatcagcaacaacatgggagatccatcaccaagaggaacaaatacaagagcaagaagctatagacagcgtacgtgcgtgaatgggtcgacgggcatggcgatcgtgtctattgcttttcgcattgcccacccgcatcgcacttgcgcagcagcagttggagctgagcaagatgagcaggagtagagaggcgacagagaagcggaggcgagtgtccatggatgatcgcagcgactactccaacgttgcgctcgtggatccggcctctccggctcagcaacgacggggacacgcaaacgaggttgagcttgaggagaatcgtcggtcatcatccgactccctattcccgcctctgcgttggtccctccatcctcattgcgcgccgccgctacgaatcagtggagcagaggaggatgagagcgggggcgagatggcgtcggcaccggtctcgtcgaccccgtctccgccgcttccttcgccgcccagcgcaggtgcagctccagccctcgcctgccctcccacctgtcgcctcagctccggcctcgtcgcttgccatcgctcgctctcgccgcctgctcgctctcgtcgaccccgtctaccttgttgtcaactacgagtcagcacttcagaccgccaagtcgaccacagttaaataggctacctcaaatattgtactggtgtgattatggtgaataagagtaacgaccggctttggccaacagaaataggattattacttgacaattcaggggctcggacctgtataaaaatcctcgtccccatctcttttattacaatctcacatatatcctagtactaatgatccctattctatgcaaataccggaatcacgacatcaaacgtcgacaagcggtcaatcttattatttttgtttcaaattatataaatcaaattttaactcgcatgtttgaaaaagaaatatcatatattgatctatcttgataatgttttttataactttttgaatgacatgtataaaataaggggatgtcccatcgactcgagggacaaaattccacttcccaaactctaacatatatagtaaatacaggacagtttgaaatcccatcgaaattaaagaagcccctaattcgaagcggattattcgctcacaccatgtcaaactcgacatacaaatttgatcggcactaggtgacatatgaatcagtattttaacgtacaccatgtatatatgtagcaaccggggcaaacctaagccgaacgatcgcctagctcgcgccgcgatgaacgacgacgtggtgagcgagatcctcctgcggttgccggcgaagccgtcctccgctcccgcgccgtctgccggacctggcgccgcatcaccaccgcccactacttcatcaccgcctactcccgccgccgcccgcttcagctcctcggccacacggaccccagcgatcactttacctccgtctacaccttgacctccctcccagccacggctgttccacgcatcgacgacggcggcgacatcgccggctgccggcgtttgcttcaacgcggcagattctgcttgagcctggtgactacctgcgacggcctcctgatgttcagaagagtgcagaaggggggcatgctcatctgcaacccggcgacgcggcagctcgtcaatccggtgagccctgagccgtcgtcgcggccaaaggataacgagctgcggacactgggcttctacttccaccggccgtccggcgagtaccgcgtgctgtgccaccgcccactcctagataataccacctacatcctctccaccggcgccgccgagccacggcagctcggcggcggccctgactaccaccgctgcaccatgttcgtcggcgagaccatcggcgacaccgtgtactggtgccgcccccgttacctgcagaacggcaagccacagatatcgtcgttcgacacggtgtcggaggcgttccgcctgctgccgccgcctccggtgagcctcgccgaggacgaactggtcgacatgatcgacatgcacggcacgccggccgtgtggacgatgaccgagctgcacctcgacgtctgggccttggacgaggatgagaggtgggtgcggcggctgcgggtggagatgcctccgccgcccgcgccactcgcctactggagcaagggcagctggaagaacgccgtcgcgacgttcgagtccggcggcggcggcgtgcagatggtggtggtgacctgggcttggaagttgctgtacgacgacaccaacaaggacaggagggtggtgggtcgcaccgtcgcactattgttccgagacactgtggacatttcgggcacaccaattgttggtttcatgcctaccgggagagcctcgtcagggtggaatcttgcacgccggacctcccgccggacggcgagccctatctacagttctgttgagtacaaacacgtcgttactagctactgatactatgatcagtacttcctagtctaactattcctctgttttatatagagaggtattaagttatttttgactttttttcctagttattaaaactttttaaatttgactaagtttatagaaaaataccacaatatctcaaacataaaattaacaaacatattatcaaaatatattcaatattatatttatcatcaattcattatactacttaaaaaaattgtagtgatggtggtgggtcctaaacgatcgaaggtttgaagtccatccatggatccttccacacaattaatggtttagagtcctttggatagcgctccatcgcattattccgcgtgtgttcgttgttgttcctccgcccacttctcttgttctctccaaaacaacttctctcacttacttcctactcaacacccccagcgctccaagctgccgcaagtctatcgctcccttctcgttcctcgtccacgctgccacccccgccgccaagccccctaacgaaggttgtcgccgccatcgatccgattctgccccttccaacccacgtcatgcaagtagttgtactaacaaatgctagtatcaaactagggaacctacaccgccgagcgattttaaggtttttctcccgtcggcacagagccacggaagaggtcggtcgctgccacgaggtgctacatcggattcaagtcacgccgccactcactttgagtactaacaacaggtgtgacccccaatcgcccgtccttataaggatccatcgacgttcgagtcccaagttctgacggtagttatggtcgtgtcatctttgatttgtgagaaatccaccgcacctattgattcatcccaaaggaggaaaaaaaaattccaagctagtaagaatgagagctggatgattttgtaaaattaacactatgtgtgaaaggggacatagctgatgtggcattttcttctaggttggtcaatggtgtggcaaaaaattcttttgaaccacagttgcattcacctagtcaagatattggaatgttacgttcaatttttgagcttttacttttacatctaattgtacgcacctattaagttttttcccttatcacttttaagtttgcaatttaccttgccactagttatgcttaattataattataagagaaataataaatttaacaatttttctatatatttgtcaataaattttatcctaaaaatttaacagatgtaattacagtataatcgtagtgtaattacattgtaacttacatgtaattacactgtaactataatgtaacttgtatgtaatttttaaaaatctctccgtaacatgttatttcggtaaaatggaggtcgtgggaacaaatcatttcacatgtgtgtgctgtgatttttttcctcaccagaacaaatattgtaatagatctaacgattcaaaattatgtgaaacttacatacaagttacattgtagttacatgcaagttaccgtataattacactacgattgtactataattacatctgtcaaatttttaggagaaaaattgtcgataaatgtataggtggtccctaaatttaatgcatcgacaattttattgttactgttcacgtaatttcttttgcgccccttcgtttttttgtttttacaaacaagttcctggtgcttcgcctcgcgctattttcgggccgtttctcgggtgcggcccagcccacgacaccgaaccgcaatcccctccttcgtttcgccgcggcggctcggaccacaccactgctccccgccgccgccggctgctgttacgaccgacgaccccgctcgcgccg

SEQ ID NO: 2280 - DNA, 12141 bp, Oryza sativa
ctcctccgtcaaaaaaagttataaaccttaacacatccggtaccgtgaatctgaactatcctaattccgtccaatacacagtctcatctttacgattatgtttatacttattagctaaaatttattttttcaaccttaaatttatagctgattttgaaggtttttatcaaaatttatttttcagcatttatttttatatcactaaaaacacacacacacatatatatatattatttataaattattttttgtttataaatagtataccgtatggcttattccacaaataaccgagtaaacaattgggctgacagaacagcaagtacggtttctaccatgatggcagccaccatggtagaaggagtaaaacgcaaaaggtaatactagcagcaacagcacgtccattctgtcggaggggtacagccagcggaagaaccctatctgcgtcactgacaggtgggccccggtggcacgtatgccccacctgtcagtggcgcgaccgcagacgctgctcgccctgtagccggccgttagttacagctagtagccgtgacctgcctgggattctctgcggctgctactgtgcaactgctggtgggcggggcacgcatctcgaggcactcgagaagaagcatgtgaagatgcgatgggaaatgaatgatgaagttggattggatggtcaatgaggggcaagaaatgcaggatacaggtagcagatggcagctgcagcacgaggctggcagcagtagtactaggagttaacacgcaaaaggcaaggaagcaagcaatgcctctgcggctcagaacgtggcgctccagtagcgccactgtttcgtgcattggcatgcccctaattgtcaccattttgttttaatcctaattggcttcgcatttaggggaatgtttggttggtcatcattaagtttagttagtttgagatatggcggcacatatgtggcttagaaatagttggccacggtccataaatatggcatgcttagctccaaatttaagagtatgatactctctcagttccgaaaaaacaaatttagaattggatgtgacatattctagtacaacgattatggacagaagtatgtccagattcgtagtactatgatggttttttatgggacggagggagtatgtgggttctaaggctaaaaaagtgtggtatgacacaattatgatagtgaaacaaacacatacttaagaaattgtggcataactaaagtgtgacaaggcaaagtatgacaaccaaataattaattttgaacataccagttccttcaatccttaacatagtagcaacctaaaatccgatagaatattttatagtacctataatgaatttgaagtctggatgacatttttttagattcgttgtactataatgacatattcggtttcatgttgatataaatattggacgaaagaagtcctagttcttaccactgtcatattgtcacaatgagcaaaatttgctactccgagttgctgtcaaattttgaacagtagtactgtcttggcagaacttctcaccaggttgggattcgtttgtaagacatgtttaacatcagtaggagtagataccaccggtatgattaagtgtattaactacatgcatgacagtcaattaatcgcgccgtctcttatgattctaagttgctggctcaagttaagtctcgtcaacattcttttcagaaacgaaaacagactactgcctatactacttgttaattactccagctgcactgcgttcttgaccttctcaaatcagacgatcgaacaaattgccaatttgtcagcagttaattataaatagtcaagaattgcacaacaggctcatcagctaggccattcacttataatgcaatgcaagaaccgtacgtacaaaactaccactagtacagaaccagtgcctaattaatctgctgccagttaagaccaaaatctggagtggtttaaacggattgattaatcaaagtagatgatggatttttgcattagttggtcaatcaaagcccatcatttggggcttcttcatattcatatcattttaaaccatatcactgtttgctaaaactgatatatttagtttgttaccaaaatattggtcatgattggagaatttgacaacactatatttagccaatcttattaaaacttgttaatgttatcaattaatcaaaattttggtaatacaaaacgttgaaaatggctgtaaagtgaacaagctcttggtgtttgattagctagcaacctcgtcattaatctgtgttgacttgctccgtgttcgtgtccggtgcgtgaggtgagctggaccggaccaaatccggcggccggccggtgagccgccgtacgacggatggaacgcagctaattaagctagcttagctcaatcatcgcttgattaaacttcaagacagctaaggtttgtggctacctagccgtgttgacattaataatactctgctggtatttttgtaagcaatctaatctggtactccaattgagatcgatctgcgacgctaatgatcttctcgctgttcacaccgttttgggcctggtcgatttgaatataatttgtagaaaaaataataataataacagttgggctaatgattatctgtagttagggcatggattatggatgcatggaaggtgaacctaacgtctggttagctttcagacaacaccgtttcctcttaacctcacagtacagttttgttcgtgtaccactattattgcccattgaggcagacaggcagagcttttgccctcctttcaaaaaagaaaaacaattattgctcatttttcattgcacgaaaaacattcagcataaaagaaaaatcatgtcatccctatctcttgtttccttcctgggtgttgcacaagtgcacaacaaagttgtcagtacaatgcaacaggatagaggcagctgtttttataaatgaaatgaagtaaaataaaaatattctactccatccagtaaaaaatattttaaaaatcgactgaatttttttcccctaaatgtcaaatactccactatctactatagggaattttatgtggaaaaattctctccccccaccccacacacacacaaaaaaaaaagaaaaagaaaaaaaacacaaagagcttcagaacatcctctcagcccaacccatctccaagcccaactcaacacaccctacacgcaccccataatatgggccttacaatctcaattcggcccataccaaaatatccgcaccacgccacgccacgacaccgaaaccgacttccacaccacgcgggccccacatgtcacccccacgccaaataacgcacgcgtcccacgagccaaaccccaacccaaaccaaaaaacagaacacaaccacacgccacgaaacgaacaacaaaaaaaagaaagaaaaagaaaaaaaaaggagaaaaaaaaaacacaaccgcgtcgccctcctccgcctcccaacccccctcctcgccgcggcggccaagtcgccgcccgccgccgccatcagagtccacgcccaagtcgtcgcctccatccacctccacctcctcgcggtttccatcccgcgaagccttggcaacgaaggattcgtgctccgatttggagaattgggggggggggggggagggatttgatcttgtggtggtttgggtgatcggtggcgatgggggagggcgcggcggggtcgtggtacgtcacgagggatgaggtcgagaggggttcgccgtcgaggagggacggcgtcggcgccgccaaggaggccgagctccgggcgacctactgctccttcatccgcgacgtcggcctcaggctgcagctgtaagatcgatcttctttcttcctttccatctggttgtcgaattcgatccattctcgcacgcggcgtgcgcgttaaatctgttgagagtgatttatatgttgttggttggttgctgttgatgggggcgcgttggatttgggtttttttcctgatgaaagatgctaatttaattttattttttgcaggcctcaggtgacaatcgcgacggcaaccttgctctgccatcgcttttatctccgacagtctcacgccaagaacgagtggcaggtaaaaaaaaaatgcagttcttcagatacggatgcgcacatttgtttgcccactagttgtggcactatccaatgttgaaaatcttcctctgaggttatagtgacactgataattaaagctaatctgccattgccaacagcgagtgaccaaacgcttttgcatcagcaaaaatcagtggtgccatttcatccgttaaccaactgtttcgtgttttctgcaatcgatgttctgtgcctgtagcacactgagatgcaatggccgatccaggatcaaaatcccaaccctgcggagaatgtatcaaaagattatatatttcagtttcaatgcaaatatgagaaattatggggttagttgaccccgcaggtcataacgtggctctgccactgctcctatccacaaaaatataactatgtataaaacaatctatatttgccaccataaaaactcttgggctagaaagctctacgcactccattgagggtaaaggtgttaacacttactttttttaaccatgtcgtataactaacttcatttcttacttgtgtagatgttttcggaagttaaaacttcctatttttatccgttggatcctaacattacctgactatgtaccatcctctggggttagtcgagggtagtgtagtcacgtgggttgttaagaaaattacaccggcatggatatatggatacatacaagctggtttgatgtaaatgtgtataatcatttggagcactgttgattggatcattccttatgtggtgtactggtcgttggagtgataaaaacttcccatgaggggtcttttatgaaatataagcgttgaaaattttcacttcgacttgaagttcgcccatttaagtaatgaatctggaagtgaggtatagctttaagcaattttactcggagcaccaaaaattgcaattttgggcaagacacgtgattcttgggagcgactttatcaaacttgaaggcaatgctttctattagtactatttaccagtaagtaataacaacttgtctttattgctatttgccttttccaatataggtgcttatttatttctagccatgggaaatttaatcctagatttgggcccatggtactaactaacacaaatgcgcaagtttatttaacaatttttactattgaacatgtaaatcatagttactatctgttattccagaccgttgcaactgtctgcgtatttcttgcttcgaagattgaagacacaccttgcccattacaacgtgtcatcattgtggcatatgaaaccatgtaccggaaagactgtaacgctgctcacagaatctaccagaaggtgcttaaaactttccattttttctattagtatactcttgctatataaccggcttctttgtcataacttttcttactaaaagcaggaagttcttgagaagcagaaagagctcattttggtaggggagacgctgttgctttcaacaattaggtttgatttcaacatacagcatccttacgagccactaaagctcgctctcaagaagctgggcattttccagatggaagtgaaacaagttgcggtgaatctaataaatgatgcgtaagttctttgcgtcaccttgttatttgtttattcttgaaattgcaactctgttgtttctgagttggtactgctgtcctgtttatgcaggattcggactactttggttgtgcagtttaaacctcactacatagcagcagggtccctctaccttgctgctaagtttaataattttagacttccttctgatggaaaagtatggtggcatgagtttgatgttgctccaaagcagttacaaggtacaatccttataatatggattcatgaagttttagccttttttccagggttaaatcggaccattgccatttgttttcaattagtgccatcgattttccatcgtgctgatgatttattccacctgcagctgttatccaacaaatgacagagctatttatgggaagaaacccatgctccatgggtcctgccatcaggccaccgccaactccaagtctgatggagagacagcaggtgatcaggccaccaccaactccaactctgatggagagacagccgataatcaggccactgccaactccaactctgatggagaatcagcacataacacactctttgggcgctgttatgaggcatacgcactcttcaataagaagtctaagcaataactttgatagagaggcttctaggtctttgcctttgaacattccagctaatcgcaaatcaactgtttgcccagcaaggaatgaaggcaatcagtcactgcgaatgcatatgggtcatagcaatggcagtgatgcaaggtttgagaaacaatattcccggggagctctgaaagcagatcatgtttaccatgttgtcagcggacagaaggatcttcatgtgacaggaatcagggacttggttaggcagaagagaacattccatgaagttggagagcatccagctcctattgataaatctgacactaagtcctggatcaggaagcgacatggaagaaatgtgatagtttttgacactaagtcatcatcttggaagaaacagaagctgtgattttagagaagttagtcatatctatttgtaaagacccattgtctcgatctatagtttcccaccaaaacaaaggtttcttagaatgatgagatgaagtatcatcatgaaagatgatatggatcgagtaacttaatctgctggcgtacagcaattgctcataatttgccttgggaagacaacaaagtgattcagattcatatttcaatgataatgtatgccatttttccctgtatatatatatgaatagagatcaaaagcgctaactgtgagtagaatcagccatgtggcgcaaagttttgtaatctgatttcatgtgtgatagcatttgtttttcttctaatgtagcctaggaaacattttcctttcttgtagtgggcctaggaaacaatcttgtataatcatatatacctttgttagcgtttatataatgaaattttgttttcattggtttctgattgtcggctcaagtttgaaagctgacctgcgtatattctgcaattctgcagttttgacgttgttaagagtaaatcgcggcggcggcaggaggtggagtcgcgcgctcgtagaggagaggaggtgaggattgattcgatgggttgtttttgacgtgattatgggtgacagtgtaaaatatgcggccgtatgcgtgtctcatgcatcaacccttgatgtcatggatgggtttagggctgacttgagattcagcccctttgaacatgctcatagaaatgctataagtacttttattttactagcaaatatgcttagcgttgcactgggtgaatatcacaaatatagatggttaagattgcttgtgtacttataacacgtgcacaaaaatattaaatttgtacataccttgcaaatatctccaaattttatacatatgaactgttgtgtaaatcatacgaattccatattatcgtgttgatctgtagcattattgatgagcccatctatggtaataattttgaaggttgtagctcaacgaatttgcattggctatgtatcttagtgttgatatgtcactactataaaaacacatacacagatcggtactataggtgccgatctgtatatatacatatactataagtgttggttttctaaaaatagtatcagagctgaccctcgcggttgctcatacggattagtatgcgggcacttggcatagcatatagcacgtcattggacgtacggacgtgtgctaagagggtggggcatatggcgcatggcgcatgtgggctctgtgtaaggcatatggcatgacactgggtgggcatatgaatgggccagttgcggcggtagcggcggcggtggccttcttcgtcatgtccagaactctcttccacatcggcggcggcgtgcgctggggcggcggtcggagcagccgccggcggtagcggggagcagtggtgtggtccgcgctgccgcggcgaaacgaaggagggggtgattgcggttcggtgtcgtgggctgggccgcacccgagaaacggcccgaaaaatagcgcgaggcgaagcactagcactagggacttgtttgtaaaaacaaaaaagtcaaaaataacttatataattactctataaaacacagaggactaggaagtactactaatcatagtatcactagctagcaacgacgtgtttgtactcaacagaattgtagatagggctcgccgtccggcgggaggtccggcgtgcaagattccaccctgacgaggctctcccggtaggcacgaaaccaacaattggtgtgccagaaatgtccacagtgtctcggaacaatagtgcgacccaccaccctcctgtccttgctggtgtcgtcgtacagcaacttccaagcccaggtcaccaccaccatctgcacgccgccgtcgccggactcgaacgtggccacggcgttcttcctgctgcccttgctccagtaggcgagtggcgcgggcggcggaggcatccccacccgcagccgccgcacccacctctcctcctcctccaaggcccagacgtcgaggtgcagctcggtcatcgtccacacggccggcgtgccgcgcatgtcgatcatggcgaccagttcgtccttggcgaggctcaccggaggcggcggcagcaggcggaacgcctccgacaccgtgtcgaacgacgatatctgtggcttgccgttgtgcaggtaacgggggcggcaccagtatacggtgtcgccgatggtctcgccgacgaccatggtgcagcggtggtagtcagggccgccgccgagccgccgtggctcggcggcgccggtggagaggatgtaggtggcatctacatctaggagtgggcggtggcacagcacgcggtactcgccggacggccggtggaagtagaagcccagtgcccgcagctcgttatcatttggccgcgacgacggctcagggctcaccggcggcagattgacgagctgccgcgtcgccgggttgcagatgagcatgctccccttctgcactcttctgaacagcaagaagccgtcgcaggtagcctccaggcccaagcagaatctgtcgcggtggagcaaacgccggcagccggcgatgtcgccgccgtcgtcgatgcgtggaacggccgtggctgggagggaggtcaaggtgttgaagggggtaaagtaataactggggtccgtgttgccgaggagctgaagcgggcggcggcgggagtaggcggtggtgatgcggcgccaggtccggcagacggcgcgggagcggaggacggccttcgccggtaaccgcaggaggatctcgctcaccacgtcgtcgttcatcgcggcgcgagctaggcgatcgatggccttaggtttgccaacttggcgtgcccggttgctacacacacacacacacacacacatatacatacatatatatatatatatatatatatatatatatatatacacacacacgtcatgtacgttaaaatacagattcatatcacctagtgctttatttcttagagtttgtctcaaaaatatgcacaaagaatgtagatcgagttataataggattagatgacaccgtacctcacatgttgctgtgagatactcatgtatacattgtagctgctagatttcaatattggactagaaaagatgtccgtgcgttgcgatgggaaaaactaatgttacgatgattatagttattttatagtttcatagaaattatatatattggatactcctggacataaataataaattaaatctatgtctaattctatatcatgacaaagaaataattacatttcgttgactccatctagctagaaataatttattataaagaatgaaaaactatatcaaatttcagcaatttttaatgcctcaaaaagtgcttaaactaagtttgttaattgaaaaatagtttaaatcagatgaaagaaataaaacacaattaggcccacaattagaaggacgttgtgtccaccttttaagtgcactgggcccatgtgacaggccacggacaaagtcggcataagtgcgctgagagtcattgaattcgatcgaatggctaggatcaccgtgatttagataaaacattgtttgttgaaaccctaaccctagattcattcctcttctctcccactgtgagcggtggcgccctcccttagcacgggtggtggcggcggcgtccttcccttccgcgaacgacggtggcggcgccctccctccgcatgggcagtaatggcggctccctcccccaccgtgagcgaaggcgtccttctgcggcttcaacgggcggatccggtggcaactgcgatgtcgacggcttgtcgcgggtggatccaacgacggcggtgtcggcaccgatccggcggtcacaactcaaagtctgttatgctctaccttagtggctgttttgccaatcttgctgagcatgctttgcagtacaagtgaacatctccagaagatagcttctttatatctgttcatccaagaaaatgaatcacaaattcataatcataatatgaacaggggagattacattaagataatgcagtactaacatattagcattttacttgcaaatcgacttaggttttcagtggtactagaatcctagaggcatgcgacgatttggagtgactagcggtgataaaattattggccaggaatcaaccagaaagctcataaaccctactacctaataatttcataggacagtaaaacacatgagtagctcaccatcgcagagggagagaggcgcgggcggctcctcgccggggcggcggcgacgacggggaggacgagcgcgatatacaagttgaaaaaaaaaacaaattaaactagaaatagttatggtacattcgcggctatatttgttattttgttataacttgtataagttgaatttaaacttgcatgtttatggagtgatatattttatattagtttatgttgcaaattttgtgataactatttagatgacatgcacgaaacgagatgatatccctcgagatcacattcttcaagtcaggccgagctttaataaatgaactccagcccacaaaaatgaaacgagcccaggcaataaaataaaagaagcccaacccactgtacataattaaagaagcccaggctacgtaatcaattgcgacacgtatacgtatacgtacgtggatgtgtgcagcatattgcgaccgcaacctaaatgttgttggacaatagtacaagttttgtatgtgtaggtctcaattaataaaattgaaacaatctttgtgaataagtagtatgcaattctatcttttgagacattgaatctgtaatcattcaagctgtaccctaaaacttccttgaacctgtttctagaactcgtagttgaaaattgttttgcctcttacaaatttgggttaattagataacatgacattataaatatgccgatttcgaaatatgccattagtattcgtgtatttggatccatactattataattttgcacatattcgagatatgccattgagatgcatttacaataattttttgaccaaattgcccttctttccttattcttcctctttcttccctctcctctattccaggagaccggcgatggcagtggcaatagatggccataaggcccgaggcccgaaggcccggctaatggcatggctttttggcccggcccaagcacggcccggccgtacctgggcctcccctccgacacgctgggctggcccggtcgggttggcccggcacggtcgggtcggcctagcacgatgggccggcagaccaggcccggcacacaaagtatagggactaaaaatagacatataaatgtcattgtccaaagaatagggatcttaaatagacttatttagctatttatatatcacagcccaaagaagagggaggtaaaatatacttttttagctaatatgtcacagcccaataggagggaggaaaattagacttattctg

SEQ ID NO: 2281 - DNA, 4377 bp, Oryza sativa
atattgcagaacagcgtctaactcattgtaatcaaaatcctacagagaaatgtagttacaggcattatttatagccaaacaaaatccaaattgttttataggcacaagcaagaacactaacctcaacaattgtatctgtaccgtactccttcctccatttaagcatgtcagtccacatttgctttgctttctcaatgtcaaatctccttgcttttagaaatctacacaaatcaattagtcaagtcatcagcatgtttgcagttgggttaaaaaaatgatggtaagtaatagggtatatatacctcagcatcatatgatagtcatcatgccttgcaggcaacaactcatccaaaatcagtgcttgtctaaatgcttcaactgcttgcagctcctctagatcacgcacatcttcaatagacacggagaggacccgactgccgctcctcctcttcttctttttcaaggaatgcctaattttggttgatgcatctatagcttttttcttcagagaacccattcttgttctcttgtcatcttcagaattttcaacgtctgacttgtgatctctcttgtcatcattacttgaagacccttcaaaacctggatcattggaaattttagaatgcagataaagggtgatatttctaaacattctaaacaaaagaactgctcatgccccaccacatccaaaaaagaaagaaaaggaaaaaaatctcggtaatcgtgcaaatttacaacaattagctacttgtacataaataaataaataaactttgacaaccgctcaacttatttaagatataaaattaagtttgtctaaactcttcatgctagcaagaagacaaggtgatgtcaatttttcagcaatctaagcattggaatagctttgttcacaacaatgaatccaccaaactagcttagttacacaactagataattcaatactaacaaccttatgtatccaaatggttacagctggaaattttgtcaacttttgtcaacaaatgttatgtaacttttgtcaacaactatacccaaacaatacaagtttctacctaaaaaggatttattcaattcttttttataagatgatgaacatcaaaatcctacccaacatgatatatgtgttcttaattgtgacttttagtgtacgctgcgttgaaatttctggccatctagtcaaccagattcagaattcatgaatttaagattgtgcggagcttgaggttattgaactggtcaatgcagtgttctatgcggaaatcgacatgaaaccttctccttgtatcaaaaacattttctcccttcaatcaagttgaagcctatatagtaagttagtttcctgtcacagaaaaatccagcaccaaaccgaaagtcccccgtgaattttatgcttcacaagtcaaagcatccaacctagcctggccactcacattctgggagctacgcgtccatcaaaaccagagaacatggaaccttcaacaagaccagaacagcacaatattgaaccggtcaaactcgaaccacacatagactggacgcaaaccgtcctacgactcgatggatactaagccctaacttattccaaaccagaacacacggaagcgagagaactcgcagcgagcttgattcgcctaaatcctaaatctaatctagtctctgtgattaatccgggttctaacgcggcgccagtgcaggccaatcctcacggcgagacatcccaatgcagccaatccaatccaatctcataaccccccagcaatcaaatctcccaggaaaaaaaaatcgagcaaaaaaaaccccaaaaaacagaacggagagaaaaatcaaaatccccaactcacatggccgcgcgaggcgatcgagatgccccgacatggacgtcgtcggacgaacaagcacagcctcctcctcctcctcctcctcctctcccaaacctccggatcctgcaacgcaacccgcattccccgtcagaaaccctagccccctccaccccacaaaaaaacaaaaaactcaccaccgcggctacctcgagcaccgcggagatctcgccccccgatgatgtacccacctcggtcggtcgtcgtcgtcggcgccggcgaagcggcggcgcgggaatcgaatccgaggcgaggcggtcggggaggggaattttttggggagaggcgtcgcggaggaggaagaagagagagagggagagggaggcgggtgggtggtgggggaaaggagtggggaggtaaagtagtggaggtaactttaaagtaatggaaaagatgggaggaaggaggcgacgtcgacgaggtggaagaaggaaggaggagcagccgatgccgattcctccgggaattcggtgcgcgcttcgcttcggcttgtgtggtttcggattcgcttccgtttcagcccctcgggtttctgggaatttgcgttcgcgtcctccctgggttggctgatatttgtggcgatggaggcgttgggtacggtgggggtttagctaaccgtcttggagtaaaaacccgttctatatctgtttacccaaaactaaaaaaaaaagcaaggattttcggtaacctttgccgttttgggagtaaaacccattctttgttggtttgttgaaagcctgataagaccatgaaaaatatgtatgaaaagattaccagtttgggagtaaaaatcgctctacctgagaaccaaacaaaaccgaacaaaaatattcaaggacttctgatgaactccgtataaaaatcagctaaaacatgttacaaaccagctgccgacggttttgtgaaacaaagtggtttttcgtgataactatcaacgttaaccatgtatacattgatgtttatgtggcaagttatgaatatcatataattgagttcatgcaatatcaatagagtcatgggttgtttgggttggaataaatttgggatagtagtggttattatattagtattatagcattagataaatattcttgctatatgctgcttatgtttgtgataaatgcattgaatgacgacaagcaaatatattagagcttaggacaaagaacatggcgtgtgaaaaagagcgtgaatctttgaagtttttggcataaagtgatactcttctactttgatattgcactaggatttgtcgagcaataaccaacatgagattctcattcttaggcctagttcttttcagaatataaccgctagattatcatgggcataaaccttgtaattttttaaaataaaactatgtagggatatttttcttaaaatttttgaatagatctactttttttcaagtttttaatctttaatacaatcatgtcttaattaagtgccttctccatgaagctaagtgactaatcgtccgaaaagctaaaacggtccttagtgacggccgggttgctttagggtgaaaaaagaggctttattagatgtagttgtataagtttctttttgtaaaaggatgtttttagataaaaatttaagtacatgattttgttgaaagcaaattgcagaatgcgtattgctttattggatgcaacactaatattcttctaatctactttactctctcccataattttattactcgtattttgttcaagaatgagattgagacagtgaggaatcgtagatgatcattggaaacaagatggataatacttaactgcaaagtgagagagatgaaagaggatagatgagcgaaaacctttttaattatgccgtgtgattttatacatctttacatgccagataaagtaagaaggcagtgtctttttcttttctatataatataacgcaatgcccttttctttctccagaaaacaatgtcttttttagacaaatgacgacgtaacaccactctattgcatgccattgttgtttaaaaaacaacacaggtacgcgtttagtatgtgattagcttttctcacatactactagctctttctcagatgtatccacccagccttcgaagaaagatgcatctatataaccatgaacataataagaaaaagggaaaatagataatttataaaaggaataagaccatcgttgcgttcaagtaatttcacactctcataagggtctagatgtaaacaaaatccacccagacttcgcagcgaaaaaaaaatatccccccatattggactccggagttttgacccggccaaattttaggtgggaattggagcggatacagagaaaaaagaaaaaccaaaaaattcagcaacggtgcggagaggtaggtaggccccacctggctgttgccgcacgtggcgcgcccgcggggagcgccaaccatgggacccactctccaggccccggcccgcccgcgcctaggactagttacattttttcatgtacccctcatagttatcattat

SEQ ID NO: 2282 - DNA, 680 bp, Oryza sativa
tgtcattttgtttgttggaatggttgttggattgaattcttgatgtaccatgtgtgtattctgagctgtgacacatttatttacggttaagagggggtgctgtgtgtgaagaattgctcgggatctgaccaatttggaaatgaaattatgattaagatgcatctgcacttctgcagcatgttcttctgcctgattaacgttgcataagtgaagaagatacttgtgctacactttgcataggtgaagaagatacttattctcccattcagattcaggcaccgagcatgttgcacaagcagatagctaggcgagacgtatttaatgtatttgacatctttaattggttgtcacaacttggtgaagtggcaagaatcgcaacggagtcggatcatcaccaagttcaagctgaaccatcgttctgaactttatagttggcagctgcaaagtgttctttcaccaaagcaagagcttttcccctgtgagatatttgattcttcactgacttgggcatctcagcgtagctgtaatacacgtgtgtcagtatttgaatcaagaggggtgcacagaaggtagtacaagctatcatgaaactcacgtttgatcaaaaccatctggttggaatactgggtcccatccaaaatcagcaggtcctctagcaggcacaatctttccctgtacaa

SEQ ID NO: 2283 - DNA, 10215 bp, Oryza sativa
  unsure (1)..(10215): unsure at all n locations
taatggtgtaatcgtgatatacttgttcaatgtttaggacctgatgatgcagaagaattgaggggggcgcaagcgccaccggaggagtctgaagatgccgaagagtctgtcgtgaacaggatactggacacggagtggtttgcggcgccaccacctagcaacccactggcggcctggcggaaggaggtggcaagggagaagaagaaacggtacatattcaagaacacagagagccgccgcttcaccaggttgatgcagaagtgtgccgataagcttggagcagagcccgcgcttgaattctttgggaagctggggagggatactggggctaaggagtttaatgctttgatcaggatttgtttgggcaaggcaaaggaatgcatggatattgactcagcagtggagcatatttatagggcatatcgcctctttgagctgatgagagaaaggggttatcagattgtggaagattgttatggaccattccttctgtatctggtggatgtagggatgtcagaggagtttgatatgttcagtgtgttctttaaggatgcaaatccacggtccagctcgagaatagcttattacgagatgttgttatggattagagctcaagatgaagaaaagattcaagaactttgccgctctgttgaagacttcaatgaagaaggtgactatgatatggcaggtaactaaccaaaatcacaaccaatcttcctttgtcactcattcacaaatgggaaaagcgctgtttaatgttgcacaatttattcgacacacagaacattcttccaactgtaccttattcaagatactgctttacagaaagttatatgctggcctttgctgaaagcgacaggaggctggatttcatcagcttgcttgagtcacttgatccaacaagaattttacgctcaaagtacttattgaccatattccagtctttgggtaggttagaattgaagaactatgctgagaagcttcttcagcagatgaggtcgaaaggtaataactctgtcgttttgccaaaaaatttaaatatccatttgctggaaataagatggacatatgatgaatattggccacaaatatttctattctaatgttattcagttaccccatcagatttccctctgttacgtttcttacctgctaatgtttctgtttcagaatctggtgttggaaaattttcatcgataatatttgagtatgcttcaaatataccaaacatagcggtgaggaatcttttacgatgactactggtaatattcgtagccgctaattatagtatgaacttggagtggactttacgtgtagcgttcttcaatcctgtgcaaaaatggtcttatagcaagatgttaaaaaaaaaaggaatatgtaatacagtactttagagagcacacccaattttgctattatatttttattctgtgcgaaagaagtattctgcatttccataatgcacattgtgtggctaaaaaacatggtgctttgggctaaactagcatagaaaatttataaatttatttctgtgtgattcaaaagaatagacaatccatttttttttattcgtacatcgaaagataaatcatgtttcatcaaattgctaatatgaccacattttatttgatcccaagtggatggaaaggtttatttgctgatatactactccctccatccaaaagtctaagacctattccattctttggcttttccaaaagtctaagtcatatttgtagtcactatgtgctatattaaatttttgagcggagcccaagaagccattttagtacttattggttgcatgttcattgattttgtcacatgatgaatgaattaattactcattggtcttggtgcaaaaagaaataggtcttagacttttggatggagggggtatcttagttttcgtgacttgcttacaaaaactgtggtgttcaatctaagaatgacattatttaaaaaatataactatctgaaccagtgcagttagttatcatgttaacagcgcccttttagctaaacagaatgataagaacactggaaatggattttcttgaaggttgaagatgttatagtatcattcaatagatggcatgagcagtttgaggtagcaccctctatttctgcatctgagaagatcatctctgtttgttgcaaatcgtcaaaggtaagtcaaatccaccggtactttttttttaaaaaaaatggttaagtaattcaatacatgtttttagaaatttggtccccaaacaatatatgatcttttttatgtatgccatgtccatacataccttttgctttgtgttgtttggtttctgctggcctgggtacttaaccggctttacgtttaaagagtccatgtcatgcctaacagcctaacatacctatctggtctattatttcaagtagctatcagtccaccggtagttttttttatttaaaattcttctaccaccacctaggtgttgggaagaaatgcttatttaaatttggatgcagtggaaatgtgtggtcacttggaatggtttattaatggatattggctgatgtgtgctgaacttgtggccaccatttgggtagccaccactgaagtgtagcaaagagcttggagtttagtttgaagcctaacctagtaaccttgctatgaaaccttaggcgtggtacagtttgttaggcaaatatcttgctcatttctgtgattgaactttgccatatgcatgccatagactcagattgtcacttaactttttctacagccatggctgtgaattttgttgcccaaaattagttatagcaaagttttttacaaaccaaataggcctcaatattgtatgtgatacacatattttggtacaacaatcttagtttcaatgtgaagtgtttggatttatcaatctgggccactcaaatcaatattataaccgcgctgtgttccctaatgttttatgcagatcagcttagctcttgatgtagctgagtgcttatgtaaatccaaccccgatatgccagttgaattgtttcatccaataatacaggcctgtgaacaaggctctgaatttcacttggtaagcagttctatatgactatatttagttgtggcttgcagtgcagatgtgtgttcattttatattaattattagggggtattataggttataagaatttgcaacatttaagtgctttgtatggttttgtgcatgactgcatatgtttttagtaacaacataagcatcttgtagaacatgaccttttctagtatgaacacatcccaacctattaaagcactagtacaatcgttaacattgttgtaatgtaataactaactagtgatcttaataagctgttatttacatttgtttgagttgttaaagcataaaattgattgtgaggaagtctctgccacgcatcataagtcataagatatatgaactactgttgctggtctcacaggtagcatctattttaaaaattaactatacatgttctcatgtgatatgtcttattgggaacaatgctaagcatctgtattcactctaaccttttcaggttcatccaatatatgatttgatgcgtcgccacaagatgaaattgaaaaccgaaacattcagaaacatgataaatttatgtgtaaagatgaaagatgtaagtcattatgcaggtcacctgctatgtttaggcatcatatgaaatttactgatcctttttctccccagtttgaaggtgcttaccgtatactcacagatgcagaagagtctggggatatatccactgtaagcctgtataatgctatcatgcttggatatttcagagaggtaaactctcgggttatctgttgttcttttgatttgttttcctcagttaccatacaatccatatgtccattttaattattcaaaaaatgatggatctcctattaactattgtcagcatacttgctcaactttagctgactcgattttacatcatgcctggtcagtagaaatgcataaacacataagagatgacacatgcttgtttttttttgttgagattttccaaacctcttccctcaagtacaaatgcgcaacagtttcgaataagcaaccactgtaacnnnnnnnnnnnnnnnnnnnnnnnnatttcaaaattttttttgaggggaaacactgctggacttacccagtagttatgatttttttattattagcaaaagaccatatttacatactgtagtaagatttaaagactattattccagattgtttgtgccttagtgcctttctccctttaaattcgctatgtttctatatagaaaaaccacaatggagcacagatggtcatggcgcaaatgcagattgccggagtaaaaccagattctgaaacatactgttatttgatatttaactgtgagttcgaagagaaaatctctgaggtttgtcacatacctgattgtttattattaccatttttgtgtgtgtttcaaatagagaggcaactgtatatgttcttgaaagaacacctagtgaaattatatccccaagtaattaattctatttgcattgttaaattctgttggatatatcatcatgcagcatgtcgcatcttccattacatactaacatgcctactctgttcggaaatgctccctccttttctgtttaattgtctcattgttgactatggtacacatatcaatgcaatcaacttttatctcctaaaataaccaaagctcctaggtgagtggaatatgttttcgttatgtataatcgaaactttgaaagaacactctagatatttctgattacttgtatcaatgtcatattgttaaatttatgattggtcctcaaaggacaaaatagggaatgccactgtgacaaatgtatagtgccaagtattctcagacacaaaattatggtcaactgtgacaagtaaaggaaaatggaggaattatctgacattttaaaagacgcgtagtcaaacttctttatctttgaccatcattgtgtaaaaaaatatttagattggtcatgtggaatttcagaaatggtgcaattagagttgtcatataaatcttaatttttttttactaatacacttatttaaagtaatttttgaagttgcatattggagggtttgccaatgtctaaaacgccatatactattgaacaattggcatgattctttaccatagtttacactgacattagaatttcatgttttaaacccctttcaatttatagtttctgttgggataagcactggctgttgaattgtttacagtatcttgatcaattacggcaagatggaatacacatgtccaagcatatatatatgtcactagttagtgcatatgcaagacttgggaattttgacatggctaaacaggtaatgtgcttgccgatcataattctctttgaattttgctgcaccttcaggtgccagatctcacacatgtactcgtgttttctgaattagattacataagttaatggctattattattactacgaagatgctaatgttgtacttgttctattttgctactgaaaacctttgctgctttcttaggttctcgaaaacaaggaaataccacctaagtacctcaatgaaattaagagtgcgcttataggagctcttgcatcaaatgggaaggtattagatggacttatcatgtatgatgaaatcaagcaatctggatgccaccttgagccaaaatcagcaatagccctgattgtaagtaaaactgttacgtatgtttacttctaatgaagaaatgggttgtgcctacacgtttgagaaccacttgttctagtctccatccttaatagtatttttttttctgcaggagaatacccaaacaaaaggtgagctggatagactgtatcaacttctggaagagcttggtgactcaaacatgtggtttgacgggtgcagtagagtacttctgtactgtgttcagcacaatcaccctaagtatgctaatcgatatttaagcacttgtatttatacttctgtttactttttatttttcattcactctttattttcatcatcttttccagtgctgccattggtttgcttaagcagcttaaggagaaagatgaattgagtacatatatggttattgatcaggtattgattgttattcttggataggatagcacatgaacatttgatttcctttttttttttttttggggggggggggggcactgattttgactaaaatctataccttttggctggcaaattccttttgattaagggtacattggatatcctgtttgttctaatgttatccacgttttttttactacttggttatggtcttatctttaggaaatatgctatatgatctcgcttattattctgttaactagttcataaattcatttcagtttaattagggtgacatgatgagaaaccaaacttgattttgattacaaatatctaattgcttttattaattttttactgttcaaactccttcgaattgttcctcataaaggtgtatatgaattgttcctcaagacatttcgccatgaactataccttttccatgctttctttgttttggtacctcttgtttactttcatgaatggttttcaaggtcttcagtcaaatatgggatatggatcctgtaaatttggattttggaatgaagattctccatgctgtgaaagagcttgggcttaatgtttctcggacaagccttgactttcttcttagtgcttgtgtaaaggcaaaggattcaaatcgtgcccagctgatatggacagaatatgaatctgcaggccttccacataatgtactgacttccttgaggttagattcttcctattggcacataagctgattatccagtacattttacaatgttggcttgcttttgttgggcaattcgataccttgaccagtgtgcttgctttgcaaccttgtcaaattccttttattgtggcatttagtagatatactgcatttgtgcctgcaggatgtatcaggctcttttgttgtcccagaagaagaaggcgactaagaagttgctgcggaagataccaaaggaagatgttcatgtgcgttacataatagattcttgtcaaatggcatactgcagccagaatcttaagctaccttctgccagtaggtccagttcaataaagagagctgcttccaaggtataagaaactcattaaatttgccacttctgttataataaaatatactgaaaccaatttgttacctctaggaaaactcatcctgttagatgtcttcattaaggaataatgatcagatgagtccaacattaatagaaactgcatgatggaaattttcgtgaaatatcctgtatgtcacattttgttatactgttgggatagtttcaggcactcccgtcctatgaaagaacatgcaaacagtcatgattttattttggtaaaactttaaaaatttagtgtgagaatcatccatcatctcataaatttcaactgaaaacatgacttatatacaaggacaaagaggaaaaagataaatttcactgttatttttagatttcctcatcagaagaataatttttgtcaatgtgtagatcgagtttagtcttttgaagttctgtgggacgatggataacatcaatatctatattatgatttcccttttcttttctggaatttctcattactgttcaaatgctcttttataggctgggagcacctgtaagcctgctgcttcaggaaccgaggtgtttcgaaatgaagctgaagaggcacatactggcccttgataatagacagacttttcctgaacattgcctctagtttggtgcctggaattacctgcacccgcttcaaggagctacatgtgtttctgtttctggcttgaaacaagcaatcatacatgggagccgtcaccgaaagacggcgagaccactggccacatttgaggcctttggtgtgaccactggccaccactccctgcattgcaattgcattgcagcccccacttggcttaatggccaagacctagctagccagcctctctgctcatagtgcttcccatgtgaccacaaggctagggtttggtcacagtgaaacaatcactgccccacagcctcaccaaccaggaaaaagatctgccctgtttgattttgggagtggagtgaggggagagattgagattggtagggcagaatagttgtactcctcagcctgcaaccaagatatcacaggataatatcttaaccagataggtaacagccacacatttttgcacctgttacagctcaagtcattactaaaaccagcattgttgtagaagttatgatttgtgttctagtttttctttattggggtatgcctttgattacaggtacaatggttatggtgaagattgtcttttgatcttgtcatctaattcatggtatgcaattgcaaaacgggttgcatagctgaatatatgatggcttatgatcagttcctttcactaacagatattgggcactgccattttattaccttaaaacgtgctaatatgtttggatagctcagaaccaaagaggaagaaaacaaccctgtattttttttccttttctccatactttttctttcctataccatgtaaggttctgacaggaacctaacaatggaaatggttcatgaaaattgtacgctggccctagagaaagcaagcaagaaaggagcgcacaccccacacactaactagataagatgaatggtccatgcaaataagagacgaggctgtaatgatccaatttttgctttatggatagtacattatattgtctagttgaagatatgcaaagccatggaaagcctaagatatgcagaaaacgagcggctcatttgtgtccccaattaaaaaagaatatggaaccaacaggcttaacttacaagacggtttggcatatacccaagtcatgctcttggtctccatcacaggtgctttaattaattttattatttgtagtcaagctattattattattattatttggttgcgcacctttttcctttacagaaaaaaataaagaaacattggaactttgagaggttatcaaaatagttaagccgtcctatcagccctggcacgtactatatattccagtctcaagcgagcttttaacctcgtaaaggaagcccagcatttctgtggtgtttgctataaagaactttatgtttttatggacgtactggggcacgatatctagtcaatttgtgttttatatttttgacatgttagagttttgtacatacggccgggtgacacaatctcttcaagttggttagctggtgtaccattacttgcaaattaatttggtgtacttaattagactagtgtattgaatacagataagaacaccttttgtaccaatgtgacaacgttgtcctgccacagaaacagggtagctaaaaagttcatatgtaaacattttcttttagataatggaaatggattacatcttttggcttttgtcataagacacacaaccataagtttaatagtaataaaaagtaagataaaagtaaatcaaaatgagaaataaggtgaatatgtaaacataagtttccaaaagagggtttattcttatagtcatattaagaaaagtttaaacatatagaaaacccttttctcgaaatagagtataaacgcacaagctaatatatacgtgtgaacacttagccctataataaaatcatacaatacacatatcttacttctgtaagcatctctaagagagtgggcttgttttttacgtttatgataatggatatatatatatatatatatatatatatatatatatatatccctaccactgaaaagaataattagccaaaataagaaaaattcttgatgcaatatatgttcagctccaagccgcaaggctattagtgtaaggaatacatgttaggtgcaaaaccagaaaccaggatagaagcatatgcatgcacaaacattggatgcacagagcacacaggactaaggatcagcaggccactaactagcaagcatgcatgcatgcatatgcaacccaatatgccatgccacttagcttcactcccccaaaggtgcacaaccacacacacacacacacaacttcctttttacccctcaagccttgaatctttggtaggagaagggggaggagattctccttttgccatgtggttcataccctacaacaaccccaagcacatatgcataatgtagcttag

SEQ ID NO: 2284 - DNA, 730 bp, Oryza sativa
acccacattaggctccagaggagactggattccagccggcgcttcagctagaacctcatcggcaggaatatctgtcatgattgcaggttgtgcttccttgctttcttttgatgaatccagatcttgagcatcaactgtttgctcaatagcatcatcagttttacaaatttcttcctgcaccatggtgtcattcgttacatgaccttcaacatcttgttggccatgatccttggcctctgcattctcacatttgagaatggtggtatcttctgatgcactctctccatggctaagagaatcagtcatctcttcttcattgcttttattgctcgggtaagtacttgttccatcagatgaagtttctacctgctcttgactttcctgattaatttcatggggctgctcatttgaaatattctcttctttattcacatgaccattcaaagaagacgccgtgccatttaaactatgttctgaaggaattttggtttcagagggtgcttctactaaaacttcgtcctctggaatcttcaatattccttcagttgaacccatggtttgtgcctcgcccttgatctctttaatagaagaaagcttgctgtcaagttgtgcttgcaaatcagtcgcagcttccacttgaacttcctgggaaatgtataggttaatcgaacatataaaactgatacacttcatgtgacagtgggttgtcattatgacatgtacattgttt

SEQ ID NO: 2285 - DNA, 1147 bp, Oryza sativa
cattttaatgtctaaagtgaatcatggaaaccatcattagtgatcatttacttcagaagtcagtccttataaaatttagcagttagcactgcctaaaatatgcattactattttatgtattgtaaacattttagatggatgagaaaaagcattggttgatacttaatttgaacataccttcagttctgctgactcatgtatattatcttctatcttttcatgcactgaaattacatcgccgattccattacccaaattttcttcatttgattctacatgataatcttgtagtgattttccattatctgttggagatggatcctctgaagtagctgtctgttcatagcagatttcttcatcacaagtgccttcagtgcccttcatttcttccatagtctccaagtaatgcacttgctgaataccatgagtcaactcaacagctgatagattgctttctgaaaatttctccgctgaagaaactgcttggcctgcatgggaggtttcttcagcttcaatggcatcagtatccttgacttcttccactaattctagttcatgcccttgatcaatatcaacagatgggtcaatttcatatgcaactctatcttctgcagttggatcttcaggggtgacaatgttgctttggctggatgtttcttctgcctctacgagttgattgtccttgctatctgtggttaattcaagctgctgtacgggttggacataaaaaggttggtcggcttcttgttcactgctttcttgagctccattctcagaagtggtaaaattaatttgcttggatatttcttcagtttctgtatcttcattttcttttacttctaccgctgatttattctcctgcacatgctgatcatcaacgtttggctcaacctcagtcactgactcctcacaggtagaaactccattttgctggtaatcttcagtgcctttggtttcttctgtggagtccagttcttgctcttgctgaacatcagtttcctgctcacttttgactaagtcactttcttgcactgcctcttcaggattggaggaactactgagatcggtttcttgatctgtgaaactctgcgcttgctgagtgtcaaaagtcgcctcctttactgttgtgatctctgggctgcaggaa

SEQ ID NO: 2286 - DNA, 2018 bp, Oryza sativa
cctgcacccccatcctgtttggatgtttctacaacaaattctggaaagtcattgaatcctttcttttcctttgtatcttcaacttctctgggctctgtacttgtattttcatgtgtcatttctgcataagaaattgcggtatcatccattttagtgtctgcactgtattgttcatcagtatgcacttgggatgcctcttccttttgagttgtgaccagagattcatcatggtgaacaacattgtcttcattttgcattccttgtttttcttctgcatcttcaatcactttatctgattcttgaatggcatgcatgtcaacgttgactttgtttgtgtatccttcctccgctctgtacatgtattcatcattctgtggaacagctataggattctgtacaacagataggacagctcattactctgataattatgtgatagcattaaagtaaatgaatgataacagctactatgcttttgggatgccatattcagaaatgagttaatcttgagaggcatgcaattgttgatagaaactgggaaatgttcacttagagaagagctggcactcaaaaggcttgcaggtcttttgtgttaagaactaagaagggtccatggccaagctcatagataaatctgccacttaaatgcacatgcatatactgcgaaggaaataatattataaagtagcaaaactcaagttcatctctcttcactttttgttattttgtataactttatatcctttccattttccatttcttttcactcaagatcactgtttttcgttcattcttcgaaagaaaaaaaatggtggctaacattattttcaatgtttatgaaattatgtatattgggtaatattcactacaacaaatcttacattctctagcatctggtcatttgaaaggtctgaatcaacttgaagatctctctccagagatgatgccaaacaaggttcaacctgcaagttgagcaaaagataacaatgttgttcagtataggcaatgaaacactttcaccaaaccatgttgttcagcatagatttagtcatatgaaatctaatcgcagcataagtcattctgtatttacatatttcttaaaggtacttctacttcaaaagttagtccataacaatcctctatgctaagagaagtaatcagtaatgcttcaaagtttgtattgccaaaagaaatcaaaagaatgagatgatagtgctaaaaagaattcttagttgcttgctaatcaatgttactcacccatcatactcacagtgacataagttacctgtataatgaaaaacttttttaccattttatttacatttctaatttggaaaattaacaattttcagttagttgaactagaatatgtctaaatttgtcacattgcatcaatggaaattctgtactgacctcttcatttctaatttcaccagctatttcatcatgttcactacttgaagttttttctaccactgcatccttttctgtattctcatgcacatcttcattatagtttttggcagaaacctctaaggtgccaccactatttggtccattctcttcttcagtctcttcttttatttccgtaatgttttcaaccatcgcatctgtagttcttgggatggaatcctcgggttcatgttgagttacttcatcattgagcatttcagtaaccacggaatctgtttgttcagcctgcaaaatttcattggatggtaacttactttcaccgtgcttctggttacaagagattttgatgaaaatagaacatgaaattagttagtatcagagatattcacctgaaatgcatcaatggactccacttgtgtgtctatgatgaaatcaaccctcttgtcatcatgtttctgttcatctgtctggagttcttccttttgcttctcaatttcttcatcttccttctgcttctcaatttcttcatcttccttctgctgttgatccaagttaacgttcttcatgtcctcatcttgttgcccaatatccactgatctttcacg

SEQ ID NO: 2287 - DNA, 7606 bp, Oryza sativa
attcctgcaccccttacttgagttttatcggttgaatacttttacatataactttgtaatttttatgaattgaaaatttatttcatgtttaggttagaataattgttgtttgaccttttatctaaggaataaatgactttgtttgaatgattaattaataggggaaatgatgaaaacaattggatatatgttgttcaaccttttatctatataataagaaagacatgactacctttggatgagtaatagggggaatgatgaaaagttgaaaaccactggatatcatccaagggatgagacatatatgaaatctagacactccctataaacttttaatattcccacttaaacagggccatgcattgatagtattccacaaccccaataatttcttttcaaggaccactatacatcatgtacctcttcacacactgatcatgagctacaatgccaaacaaaaaccctatcatatatctagcttacattagatataatgatgcatcaaaccctaaactaaatcgtccctaccactcactattcctgatgatcgagctatagtggcatgcagtagccggatcttttgaacggtgcacactgtttgtatgcaccttaaccaccgcatatatacgcagctatgtacatgcatgtatgtatcaaaatagctagcttgcttagcctgacgatatgatgatttataagtctcaatctgtcaccataaagtgattctctgatcgagctctctaggatcacgagagccatgaattatgtatggccactactatactgtactatgtatactttgggccatatctgcaagaaggacagtttaactgacaattagtgtatgaatctatgatgatattctggatctttaatttatccactagctagataggtatatatctcaattctcaaatcctcttatgaagaaggtggagctgaaccaaacgtgaagtgatttagaaacaaatatgtagtggagcagggcctagagcggagctgaaaacacacctgccttttggccctgcttcacaacctcctccacttgatccacaaaaatattttagagttgaaatctagaaaaacactctctccatgcataagtgtagatccaaatacgtggtgaagacatatccgaattactccatccgttacaaaatacaagaacttttagcaatcaaaagttgtcttaaaagttaagacatagcaactaagcctacccccaacctttatataaaatgcacacaaccaataaaaggacgaaactaaacccccatcacgaaacatagaaattagtggctattaatccgtatactagatcatcacccatgttcttagtaaaaaaaatcccatgccacctggtccaaacatcgtgataccaccgcagtagtaccccaaaataccggtttgtggaggatagcccaggtgcgtaaccactgggtaactaaagtgataaactacaaaggagaatacaccaacttattataaaaaataactccgtttctgcttagccaaatggaccaacaaagagctagctgctgcacccatcaaaaacatatttcttatttccttaggaacacatgaaagccaacgcccaaacatatgagtaacatttcgaataagttataagttagaggccatatgaacataccataccaaacaagataaatgataatggaagaacaaatgttgaatggttttgtccttatgacaaaagcaatatttttttactatatttccattttctcttagctaggttatccttagttaaaataattactttccaacataagtaccaaaggaaaacctttacttttagcggtgctttaacctgccaaaaatattaactactgtcgatctattgccattggccaatttaacctatggtatgaaggaaaggacactttgtgaatttgtgaaagatcgacagctctcccgtgggaacaagagcaaagctggatctgaatacgcactacacaacacaagactaggcaacactcgcatgtgcaaggaagtcggcgcgaaagaagccatctcccccaatgcacccaatgccatgcctgcctgatctcttcatgcacgcacctccattacctctacatttttcttttctttttttttcccctctctcctccatatcttgtcgtactaccaaagtaaccagacaatctactactatagtatctgccatgaaagtagagataaataatgtaataccctgtctacatttttttaccttaattactgatcatctcacttggtatggatatatgggtcatgagataaaaacagtggcggaggcaggatttaaacatgagagaggaggtctaagagtcttagggatacataatacactactatttaagttaattacctaattagttaggtgattatgtgtgaaaaaatgttggaggagacatgccactggccgtcccctgtccctgccattggataaaagaaaaggttatattattcacttacagttttacggtcttcttaggtgtagtaagggacttgagtatgggtggacgctgtcacactgaggtggttatgctttttattgagatttattcaaaattaatttattatatttttttctctatcgtctgaggtgtgtgttttttttggttaacaggccaatgaactgaggtagagtgataccaactttattttaaagttgaataattttaaatttataagaaaaaaacagatcaatcgagcaattttgaacagagacaccgagctagcgaaacgagctcattttccacctagctcctataggaaggttgcataacttttagtgttaattcgtggtatacaaagtaaaagagcacgtaaagatatgtgctctgcaaagctaaggcacaagcaaccaaccttttttcagttccagagaaatcggccggcaatggcctgatgaattctaaggtatgggcagggtaaggctagctacactacactgcagcaaaataatgtacactttttcatcacaaaaataattttaaaaaaatgatgcacacttttggctccaacatggcagcatggagaccgaacgctgtgctgtgatgtgcatcactgaatctctgaatgtctctgaatctatctcattatgatgatgaagtgatgaaccgcacacaacacaagagctagcaaaatgcatatatattgcttagcaaaagcgatagcatcactgcatgggatgcctcaagccctcaaatcctttttttaatagattttaattctaaaagttgcagcctttcaggaggaaatgaattaattgaaacccaaaagaaaacaaggatcgtgttctttttgagagaaagaaacaagctaaggcgatcatgttcatatcaaattatcaatcaagtcgagatggatcgataaatatgtgtgtctgtccaacagcatgcatgctagcttagctgcttcaagtagcagctgctttcatgtccccatgacccacactgtgatctgtgatagcttttgtgcatctctctatctctctctctctctctctctcccttgattctatttttcttttttgagagctatctggatctctgatctatatccaataggaatcttctctgactagttaattcactgcacaataattatctgaatttcgtttttgacttcatttttcactccctgtttgatttgttcaggtctaaaatgcaaatcattattcagtgaattccagggctcttggactaatttttacttaagaaataggaaaaacagatgatcatatagaattttgagtagcataaaattttttcattgtactaaacttatgtctaaaaaaaaatctgaacctcaagatcaactattagaaagttatgtagagaatatactgtctcattcaaggagagggtcatgattgtgaaatatgttgtcctggagttgcatcttgcatgcatgttgatttgtagggccattgggtcaatacaatggagcacagagctccagccaataagaagtaagagcggcttgtgtttttctgaacttttcactgaagaaaaaaaaaaggacatttatttactctgaatttctgtgaggagcaaagaacataaaagctacatctactgcctgatccactcgatgatgttattatctggacgggaattatccatccattcttagttcagtccatgaatatgtatatatgtatatatataaatgtctgctcagttgattctagctctgaaagttactgcaagactgaacttgaaagctgcatatgcaaatggctagaaaaactgatatgaaaaaacataaatcaattttctattatgaagaaaaatcagaggtggaacgtgcaaataagtgtgtatgtgtattcaggtacggctatatcaacttggtgtaattgggttaattcaataaagcttttatcataaaaaaaatgtattcgtgttttgtaatatgtgagtacgtacatttgaatctgaatcgaaataaacatgacctgtcaaatattttcttagtcccaaaataacttaatctagaatagaatgtaacatattatagtacaatgaatcttgtccagattcgtgttgaattattttggggaagtagatatcatttcaggatgggagctaagctagctgcagtgttaagctggcatttgcaactatgcatgcaagccacctggaggcatcagagcagctcagcagcatgacagcatctccttggatcggccaggcccgcacgtgcgcccctgcacgcacgcacgagcatcaatggtgaaacactagaagctaacctctctttacttaattaattaattaattaataattaatttgtactggacctacagtggtactacttttttcatgctaagtaatttaccctgtatatatctttttttttttcagacaactttgaatcttcttcttttgtgtgtgtcttgttgttttctgaaatccgatgaagattcgatttgattccaaagcaagtagtgagtgagtgagagagtaggagtggaagtgaagcactactgttctactttgttgttggcaaggagctttgatatgtgatgaatggcgaacgctcatttcataagcagccaacacctcctagttccctattaaaaaaacacaacctagtttcaggatttaagttatcaactcataaatttagactttcaaataaatgtttcttgtttcaacctaaaacttactttgaaaaaccggtgagggaattattcactcctatatatatccattccaaattatccagatgtattgccgaaaatagctataatttttttaacgaagatagtagttactacctccgtcccaaaatataacaacttttggctatgaatctagacacacggttgtccagattcatagttaaaaatacttatatttggggatggatggtgtagttcaatagcatgcgcctattatttagcaaatcatattggtaaaaaaaatcagttcaacatattaccatataatgttggatggcgtacatattaattagcgactcacatcgtcaaaggaagctcatcaattagcaagagaccccttaagcttggatggtacgtactccatccacacatacaaataagcatagccacataggtaacctctattgaccgtaatttttcgtgcagtagtcgttattgaatgccacctcccgttcttgaaggcaagtgacgattagataatgacaccattctaaatatcacgtactatttcacactaatgctacggttctagacactcgtgagaactcgtttaaaggaaaaaataaaaactatgcaaatatatcagtaccattctgaatatttcataatccatggtgcatttatattttcgttcccttatcattgctataaactaaggtgtaagatatacaataagttgccgttaacacacaagcctcaataactctctaagactctctcatgtttttagtgaagtttgtgtatagattatccctgtacgaagaatggctcatttcctcctctttcatctctttcacattattaaaacaattggagtatatgaatatgatcatagtatccgtttgttatactagataggattatatttcatctatatctctagacttacttaagaaccaaatcttgtactcatatatatatatcggctctcaagactcaatacaatatgtcaatatttgcagtaatttcttccccatttactatttagcaaatgtctatatgacatctaaaatcaagtgtttaagattgcttactctataaacaccatatattccacgctaattttaattttctagacactcgtacgtaaagtgaccttaggtaaagagaaaaacctaaacaaatataccgttttgaatagtactctttccgtcctataaaaaaccaacctagtattaaatgcagaaaacctagacaacggtatttcgttggaacgggatactcttctatgagacagtacctgatatctgatacctattgtgataccagctgcatgatacttgatacctgtgatacctgttacccggtatctgtgatatctaggacctgatacctgtgatactcgtgcaagagaatagttaatatgtctatcccattgcaacgggatcccgttttgtagcagctctctgttgaatgtgatacgttctagtactacgaatctacatatcgtaggtttttttttatcgggatggagggagtattttacattcccattcccgggttggcgcgattcccatcctcccctgctctactgccctggaaagagagagagagatgggtgcgtcctctctataaatccacctcgtgttgctgctcccacaccccccctcctcgatcatctcctcctccctaccaacaaccaccaccatcctcttcttggcacttggcatcaagagacacatccagacgcctcgagttgtagctagcaccagtggctcagcttgcccagtgctgctgcatcgatcagtggcagtagctagctcagctctagccttttgccaccgaccgctccgatcgaatccggtgctaggctagccagcctcctcgctctttataaccccagccgccattggagagggagggagggagctagagctttgttcttgttcttgcatgctgttcttgttgatcgagtgagagagggggaaggaagaaaggagggaggcacatgcttataccgttcgtgctggagttcctgatcgatgtcgcctgtgatcagtgagatcctcctctcggggtttatgatcaactccacactccggcgccgcacccatctcgtccagtctttctccgtcgtcttcctctactggttctatgtcttctcataagctactcgccatccatttccctctcctcctctctctctagcttccttctacaataatcgatctcgtgttcgtcgtcgtcgttcttgtcgatctctgtgtgtgttcttcgtcgtcgtcgtgttcgttttggattttggtttcagtttagtatatgcacttcttgttcttcactgctgctgctgctgctaagcttgtagcaatctagtggtgcttgttgttcttcttctcccgaaatctttgcgatcgattgattgatggcatcgtcaagcgggagcggggggagcgcggtgtcggcgg

SEQ ID NO: 2288 - DNA, 7293 bp, Oryza sativa
atgtcccatgaagtttgacctcggtttgtgtattgttctgcttgctagtactactagcttcaaaatcttggagaaatttcactgtttgggattcagcgcctagtctgaattctcctcaaacatacttgagtatcttggagatcaatctggcctacttagcataatagcattctcattttgaagtcgaaccatctctctgaaaattctgaagatgtaactggctaactgcaagtctgcaatctagtcatatctgaacatgaagcagcagcaattaacaaactgctcatagaaaatgacctgcataacaattaacacaaactagttagtacaaacactagcacacaaagagctagctgatgatctgatcatgttattttaatccgggcccaaggaccagctttgctgaaaattcttggacagcacgcagtgcaggagtaattaaactgcatgcaatgcaatgtaatggcgatgcttttcccttgtcctgaagaaaaaggcaacgtagaaatgaaatcgcaagtgttgtagagtgctccccacatcgatcgatctgctctgattacgagagattgctagatgggctcaaacctcaaattgccacatctgtgtcctacttcactttgcctactactcctgcaacactgcaactagcactccactccactacactacactacactaggagtggtactgtagtacaacattccaagcaaatcgaaatgcagagattgtaggagaaaggattcttgccctgatcgatgcaagttcagaaaatgtagtgctccatgcagaattattttgtcagatcagtcaaaagatgtgcaaattcggctatgcatgagtagttcagaagaatgccaatctcacgagataagtaagcagcatactaatcactgatcagccaagataagtgaggagaatgactgaaacagcttttcccttttttttgggcccccacaaaaacgaccgcaatctgcatgaatagtgcaaattcaagacttgatgccttcctttgctgatcagacaaggagaacggccaagaaacgttgtttggactacgcccatggcagattggcagatggaaaatttatgcatctgcaaatcctgcaatttctgcatacactgtaaatgtaattcacgagcttctgatgaattgatgcctgcattccatttcatccagcttggcatatgcaggactgcgtggttcagagatcttgcattgcacagaacccgggaaggctgcatcatcgcgtctatagctaatactagaaatcaaggaacggagtgcagatagaagcaagcagaaacggacagagaaaacgcatgcacagccaaagcgtattcctcttggtctgctgctacgaccactgcttggtctgctgctagtgcaaagctcttctgcaccgtctcccacgcgaattccttcctctctcaccctccctttggtcctctccatgcatctccatgccctgcaaccatttgtctctacctcgtcgaatctctcggacccagcagccactcaccactcactgcagtgaaacgcactgctatctgcttctcttcctctcctgcatgcgtgcttgcagctacacttgagaaactggtgagtgagctcgaaattctgacaagtatatagtgagaagatagttggggagaatcttaaaaaataggtttgttcgttcctaacttctatttcattttatgtattctataactacatgttctcaagatctggggaagaatttactccctctgttccaaaataactcctagtatatataatgaatctgagtggagagttatctagattcattgtattaggataatcacacctaggttgaactttttttggacggagggagtatatcatttagggtctgtttagttcccaaacaaaatttttcacgttctcacatcgaatgtttggacacatacatggagtattagatgtagacaaaaaaaatcaaatgcacagttcgccaggaaattgcgagacgaatcttttaaacctaatcgcgccatgatttgaccatgtggtgctacagtaaacatttgctaatgatagattaattaggcttaataaatttgtctcgcagtttcttgacggaatatgtaatttgttttattattagactatgtttaatactttaaatgcgtgtccgtatatccgatgtgatatacaggggcaaaaaattttaccaattaaataaacccttagttcagctaaagattttgagaagttgtagctatcataaacaccccgaaaccgggttttcattattgcatatgctgcttgtttgcttccattgggagaagagaaggcttcccatttcgcaagtgaagtggagcactcatgctagagtacaatgtgctacagtgccagtcagcttcctcctttcttgggcttcgccatcgccatgcttgaatagcgaggctgatgcttcaagaaaaatttgcatcctgggagtttgcgtcgcaatctttcatgcgtgccggcaaatcgcgaggccaaatcatgcccctttttaccgcacaaatgtagagttgcttgtgatcttgtctttaccaagggatagatatgacttgtactaaggtaggttttggcccatgataatgccagttttgtgtgtgcaaaccacagtgtcaaaactcaaaaaggttgctacctgcttgatgtgatgagtgcttgggatcaagttacagtatagtgtgatcagctacaggatcgatctagaaagatgagatgtgggaatagtaatttatactgtttctttcactgtcatttcatatgtttaaactgcatccaaattgttctctccttgtcagctgattcgattcctcatcagtgaaatgaccacaatatcctcccccgacatctcgtatgctgataattcccagaattaacaccactaattgatccaggaactgcatggcatgccaggtaattattaaattaaacaagctgatcagctattcagcatctgcatgaaaaagtgtttcttgcaaagatatatgcagtacaaaagagagggcatagatacttttaaggatggaataagctaaagcaaacgacccaagtaagattattcgatcgatcaactagctaacgctcttacagtttctttcaactgatgtgtcactcttgctgcacatggtaaagtagctgatcagttgcacactctgtctcactaactttagggattcttccagatcacctctcttcattctactgatcatcagttcatcacctctgcatgcaaggaaggaccagcagaagcatatgtacacttttgatcttgctagcttaattgctacttaccttattaattactagttccttaatcatcatctcttttcctaccaaacctgtactgctccatccagctagttcaagtgcagcttcatccattattactactgttacttacctgatgatcccctgttgatgcatgtgctagctctgaagaactctgaaacacattaacaacacaataatatgacaagcatcatcttttcattgcccacacacatacacaatcacacatgcatgaatgcttgaatccatagaccatggggccccaaagaagaggtttgccttcttcttctaccagatcttgaggtcgaccattggcatcacaattattcaatggttcacgggggtgacaaccctggtgtcccggggacccatgtctggctgactgcaactacagtctttacactgtatttttcttggagacattctttggagtgcagaaatttcaaaaaggaaaaaaactttacagtaatttggcagctaaattctctatggtcataaatatgtgacgttttggacaagattcagtcacattaattaataagtttataaaatctaataaggttatgataatacttttcgaggcgaatctgcacacatcattttttaagctagcatttgaaaatttactgataatcagaattttaaaagtttgattgatggagtatttcagagaacactaaaatctggtttttcaaaaggccgttagtagtaaaaagctaatagggtaattaagccaccatacaaaacatccctttgaaaagggtaacagtacgagatctattatattcagactgatattcagacatggtccaagcagccatttggtgccacctaggcgtcgcccacatgtgttctcttgggatggcacaataggacatccatccacacatcaaatccattatttggcctggccagcatcatcaactcagctatctaccaagtgtacgcactatagcctatacaaacatacatactccaacataatggtgaggctgagccatccatcaataaaatcgagatgcagatcgatctatctatgtgtatatggatcaacatttgcatggatttgtagtagcaatcacagtatcacactcattcagtctgtctgtcagtcacactcactcacatgcgttgtactggtggtttgtgatttgtgaatagtaatgtaacagtgctagctaactattggtggctatatgtaagcatgcagagcagtgcattgcagcagccatgcatgcagcaggcagggtgtctagatcagagatgaggccatttttctctctgaatttgttggatgattggtgagattgatagctgatgcctgatggggctctctctgcattgcatcctagctgcctgatgggagcttgctagctatgcatcgcgcgcatgcagatttaacaaaacgagcaattttacgattcttaacgaggtaccacttttttactgtaaattcggtaccttatagtatctaggtacctcatagtaattttacactaaattcttgatacctcatgctacctccttaaagataatagaatttctcttaacaaaatcaattggttttcgtgaaaatcattttcgataatcgttggtggtctgtttatgaaaatcagtcgatttcagctggttttcgtgattgaaagtcatcggtttctatcggtttttgatcgatttaggtaaaccggtgaggagcggtttttaatttcaaaaaagaaaaaaaaaagaaaaacagtgcgtgtgcttaccgctggatctgatttttgattgatcagacggttcagatttgttacgtggactcgctagcagtgacgcggtccatgctacattgactgtcggttggttatcggtcggtcgatcgatgtgtttgtggatagtgtttacatgcttgctgtcattactcgctatgtttctatgttatttagtttttatcctaagtcaaactcctttagcatccactgagtttataaaaaaatacactaacattaacaaataaatgaaatatttgaagaatttcatgtaattgttatttattttgctgtgactttatttattgtcgattaaatattcttttaagtacgacttctatattttatgttttaaaaaaattaataaaacgaatggtcaaatgtttataaaaattaatgacactacatattagaaaatagagataatattaaggaaattattgtattttttccactccatgatcctacgactaaatgctttgaaagaggtaaaacagttatctagttatactagcttattacatgaatatactacgtggcttgttttagtactccttgcacttgggagggcagatcgtatctcttatattaaagggagaaattaaatatactcatacgtaacaaagtacacaggttaatctgatacggttaatttgtacaggaatctaaatatacggggtacggtgtaatatcgatgtactgctagtgataaatacaacacataattaaccaaatcaccctgcatatattttcgacattgttggacctagctaatatgatgtgcttatgatgctatcatggcatcattagagttagcacggaagcttccatagtatgtcacggttatcagttttgtcggctatctgatttctatatttaaattgtccatttgtccttgtatatcattagttcatcgtatcagtcataatcatacatacatacatatatatatacatatatatatatatacatatatatatatatacatatatatatatatatatataaatataaaaactattctatacccccctccctcccatggctcaaacccacctcccaccttagtcaaaggtaagtcaaagcaccctcacgtcagtcaaaactcggtcaaactgcctaccaactcccccaccacccacctcttctcagctctcgtcttgcggaacagtgcagtaacgcgacagccatcgtgcagtaacgctgtgtcttacgtgcagtaacaacattcaaatttagttgaaatatagtcatgacggatctacttttgataagcacttttttctaacatcatggtgcaaatggttttaaaaaatcatatatcacatgagagatattgtaatttgaagcttgggtttttttgaatcttaactctccacaagtagtaacactataacattactacttgttactattatctgttatgcgttactacaatcctatcgcgacgttactgtaagtgtgtagtaaagaccataagttttgtagtaacaatgcgtcttactgcaatttatgaatagtgttactgcataaacatatggtaacatttccactttgtgcggtaacaagtatatttagcaggtgagacttttaacccatatttttcttttaatttctggtttactacagtttcaccatgatgttactgccaaaggtgcagtaacgttctatatgttctacagtaacaaagtgttttactgcagttcttggatagtgttactgcataaacatgcggtgatgtgtaactgtcaggtggtaacgtgtaccttccgtacagtaatacttttacttttgtgcagtaacaagtatatggttagcatctgagacttttaacatatatatttttgtttcaattcctggtttattgtaattcaccacaatattactgtcaaaagtgcagtaacgtcatatacatgcaataacactatattggagggaggagaccgattttcttaagaagagggatgaataatggtttctttaggagaggagtacgtagatgcattttgaagtttaaaccttcacatgcagtaacactatagtatcattgtaaaaacagttttaaaaaataatacatatcttgtgatatattgcttttcaaaaattggcattttgaactttaatcctccacatgcagtaacagaatgtgtaccttgcagtaacaagggcatatacatgcagtaacatggttttaccaaatgtataaaattattcaaaatgctcctacat

SEQ ID NO: 2289 - DNA, 7992 bp, Oryza sativa
cgacggcgtgtaccactctcctgtaggttctgacgatgagcagaggccgtggtatggttcaccggcaatcctcaagcagtgggtacatcatctcctcagttgaacggttgatggctttgatgcagagaagctgacgatctgaaagtttgtagacagaaatgtattgcatgccgccaggtgagggttaggccaggggaaaactacacatttttcagtgaattagagggtagccaatgccattctatacacaacagtacaacacacatgcgatttttcttctcccaaagaatttgtaacagtataaatattgctcaatgtgcagaggtaattcatcacatacatgattgcaggttgtaatagctacacatacagtatgatctataacaaacttcattccaaagaggaataccaactcagatcattgagaatgaatattcacgtctcaacctagctggctctttgttccaaaacctgtacatgcaaataaccatccagttttccttttgaggatcaaatggccattgaattctgaagaaagcaataccacgaatgtgacaattaacatgcctgatcaatgaacacaagagcgcctcaaccaaaccagcatgcatacatacatatatgtagtatatgcctggtacaagatgccaatggcagattaaaaattgaaccacataaaacgcctgggatcacagtagtaggacgcaataaaatattgggagtgccttttttttttacatgcatcactgggaaccccggcctagatgttcaacgaagtcttttaagtcttaacacagccacatgacctaaaacctagtggaaccttggggcctaacatggatcacaaaagaagcatcccaacacaagtccgagcagtaagcactaatacttgctccatatgactggtttagttagctttaatgaaatgaggggacagcagcttggcaatctccatcatcccgaccttgtccttcccggcgaataagcttttaagcttatcgtcacagttaatctcccttttgtttgctgggttctgcaaaacatcaagcacataatctcatttcaggaacaaactgcttgcagtgaaatctacggcacatgaagagttcagtttagtacagcaaatgattgtgacacaagtgtaatcaaattaatttatataccatggtaaactagaaaggcagctaaagtagcatatctaaaacacggctaacactgctgcaggtgcagagcagacattcaagaacatgagttcaatcatgcctataacaatgtacagtaagttaataacagatgatcaaagaataactataatgcacgtcacactatatataaccacacaacagtgatcagcatacattctggacgccgtgctccacatcgctctaacagtcaagttacaacttcagtacaataaaactaatccaaatctgccaaataaaatgcaccgctgtcaaagtagattactgctcagcaaccttagcacatgtaaaatgctagaaaagaactttattgggtgcaattttgtttttattcccttattgacacccccccaaatagggcagcctttccaatgtccaaccacattaactagattatggcaacacatcaaatatttatttctgaaatagaacccagtagcttacatacagtgctgccgaaaatacatcaaagccttgcgaaaaaacagagaaactgactagaaactttactgaagtttcatataccacttaatagatccaatagatggcacgtgcaaatccttttacagtagcacaaatttcacaaatgaaattataaccaatcccaccaaaatggggcaaaacagtatctaaccaccacgaagctgtaaccaaatccgcggaaatgggattcccctctcctaaatcaatactacttgaaccaaaccccacgaaatcgatacttgaaccaaatccgccgagatgggattccccctcccaaaacaatactcgaaccaaaatgggggcaacagtatgcaatagatattccttcgctagcgcaagcgagacttgaaccccatggctcccaaaccctaatccaacaaaatacaaatcgcaacgcacagctagtagatcccacaacgagcgctgagaacaacgagagccgcggctgctgcaaaatgaacatgtgaacagtgacggggaagaggcagtagggctgtcgggggcgctcacctggaggccgttggccttgatgtggttccagatgagcttgacggcgccagcacgggacatctcgggggcgccgccggcgaacctgctgagggcgtcggagaccggcacgggctgcatgatccctcgcttctccttcgcctgcgccgcctccgtcttggtcaccttcgcccccgccgccgacgccgacgcggaagccgacgcgggcctcttgccccccgccgccgccatgaggaacctgcacccgcggaaaaccctagccgccgccgccatgggaggggaggagccgccgcttcaaattcgcgcttcgaggaggaggcgaggcgaggcgagggttttggggtttgggggttgtttgggttgcaactccactgagggagcattttgtatttggaaaattttgggggccaaccgattttttcatctaggtcctttgtgtttatttttcgttacaaatatgtccttcattgtcccgctgcgcagtggggccagtggcttttgttgtgcatccagatattccaggggtatatttataatttcgccaactactaatgcgaaaccaaccaagcagggtgagacatattacccataaaaaaaagagcatctgttttttttatggcctctttgtggcaacttaaaatgtggatcccatgctggaaatttaactatttgtcactcttgtgatatagcaattaacgatctgccactcactatctataacatgcggaccctcatgtgtctattaacgatctgccactcactatctataacacgtggaccctcatgtgtctatgacatgttggcctagtggcaaatcgttaagcaccactcgtaagagtggcaaatagttaaaagccccttacaaggacacagggattttataggattttttttgtaggaactagtttaattctcgcgaaaattctctaatccaaaggagggctctggtttgtcattccatgtgtaaactacgttttatctaagaaagaactaaaagtcttgtaacaaaatactgagagactagtaattatcaggaagagtgtgatgtcatatccatatggagaggaagaaaaaaaattgtgacatatattcaactgaatcagattctttgtcgtagcaaaatcacaatgtttgggacggcattatcattattttgattggtacagtttgacaacaataacacatttggactgagcatcacacgtactcaactttctctattgtcaccaactgaatgctcaaaattttgttagcttcttcatcttctgttcttcaatgtttaacagtctttcttttctttcatgagctactcgaagatgggtagatcaagaggcttattctttgacccatcttgagtgtctcttgaagatgatgagagagagagagcagagaaggcttttgtatcagattctttatccatgtccaggaagaaccgatgcctatcaagcaggagcagacagatccatgagcatcagagcctaaacaagatgcatgaaaacatgatatggtatgtaggaaaaggcactaaccatctagagtctgatgtcaattctgggtgaaaagcagtagcgaggatgttcccttgccttacagcaacaattacccgatctttcgagtacacttcttcctgccaaagtattgtattgaacatcagtgcacagaagataaacagaactttcaattagactagattcttcgcacaacacatcaatcggcagaactttcaattcgactagattcctcccacaacacattaatcatcaatatacatttgaactagacacggcagggaaatcagtaaaaacgtaaaacagtcaaactgacagggtatggtcagaaaaacacatctagtgcagcatccagaaaaggagaaatatcacagtacaaatcagaaaggaagtgagcatgtatatgcacttgcaatctaaggaaatgtccttaataaccaggagatgaatttagtttgagaatttgtccaaatacaatatgttcagtaattctcttctcatgtgtcattcaattgaaatgatcaagaattatcatgttcgagaatgatgatactagaagagccgatgggggagggcatatgaggacagtaggtgtaaatgtccacatcaattgacagagtttatcttggaattgttttccctaatagttatgatcagacaccataattactacagattcaaggagaacagatagtgaaagggccacacaaacatgatactagctaatgctgcctgaacaacaatgaacatggcatgaacagaaataactgttcatcacgcccatccataaatcctgtctagtttcaacaacaaaattccacttttactgaaagatagcatatgccatgatcatttgcagaagagtgttggaattttcaacaggggtaaaaggcaaacctcaacaccctctccagacgctattgtaatactgggtctatccgatggaacaggacaatccgccagtacttcaacatttgaacctacatccaagatagcaggtgctcgtataaatacgccacggcatgtatcgctccctccttccttctctgcaagcattggcactgaaagttccgtttcaaagctttgaagctgcaagagagtgtattcatctcaaaaataaaataaaattgaagagacaatagaaatgatagtgaaaactgctccggccatcaaacagagaacacgatcctcaaagttacctggctcccaaaaaagttccggtggacagtacaatctagtcctccaataagctcctgacctccggatttttggcctgcaaataactttcatcaattgattccaaagaaagaaagattaaaccaattgctgtggctcacatacctactgccttgttagctaggaagatgagtccagcacaagttccccagacaggccttcctgtaccaacaaattctcgaagtgcaggaaactgcatggtagatgaaataaatcgttgcaacattgtgcaacattaaaataaggtaataaaaaactatgagttataaaaaaggttaatatataattgtattcatgcagtacatgaagactcaatctccacgaagtagaaaataatcaagtacgacgggtgtgaatctggttcttatgaaaaggggaatgtactcgtcatctcatctacatgtgaaactaattgtacacttatatggatgtatactaaataatagtatgtgactagtcacagtttcacaatactcagggatggcggatacggacgaaggaatttaccttaccagcagcaggtagcaagcactggtctacttccaccagcaaagctgtcaagtctacagctcatcattccttatatataaaatgttggacaaagacattcgcagtttctagttatggccttgtaagcgaggctaaaaaacaacgggaatctatatctgcaacaagttgctctgatggagccatgggctactaatatcccataacctcatctgtttttctctagattagttattctgttctgaaagcttaaaagggatggatatgaaccataaattcgtataataggattaacaatagttctcgaacgtgcagccctttcagaattgtatactcactagtagtcagtaatcaacacaaacacataggaagaagagaagtctaatttgccttccatatattactttggttgatctaccaccaaccctcctccgtagtagacagtaacaaaagaaatgcacatatttggactagttttgaccaatgcaagggagcaaatcaatatttcatttacatggattattgtagtgtttcttcagtctgatcaaaactgggctagttgttcggaatgcaaaacaccgggtcacttttgagaactttcaacaattgcgacagtttattagtacacatatccctttcctctgttttgaggagaatctaaccaagaaggaaattatcactagtgcccaatttataatcctctcactgaacatcgatcgtggagattcatgcatcgcatcaattccaataataaacagatacaaatgatttgctaaaacgaaagaacagcaaccaaaagaagaatggggggagttaccaggttgtggtagttggcgagtttggccatggtggtgctctcgccgccggggatgatgagcgagtcgagcccctgcagctgctccggcttccgcacctccacccccctcaccccgatcctcctcagcgctgcacccccccgcatccgcatcaatcaacaaccaacaaaccaaaccaaaccaaaattcccaaaaaagaagaaaaaaaacagaagcagtgggcgcatacataccggccaagtgctcgttgaaggagccctgcagcgcgaggacgccgacgaccgccattgctgctgctgctgctgctgctcccctcctcttctctcgctcgcgttgggatgtgtggctttggctttgaattggggggtgggaagaagtggacgggagaagcacgttgccgtggcggcggccgccacacgcacgcgcctccacctccacctccacggagataggctaccgctgctgccacgagggaaaaaaaaaacagttactggcggtcggtgctgcgcgatcctgaccgtccgatcgtagcagcaggagcaatctcgagcgttggttgttactgccgtgtgtgaagagtggtgatacggaccaaccgaaggctttaccacttctttgggccgccaggtcgtacttgagaattatgggccatggaaatggaggcccacataccacattatcggatatactaaattattacagtatactccgtcaaaaaaacccatctaaaattaaaatgggacataatttattgtattcagattcgttgtactagattatgtttcgtcctacttttagataaggtctttttggaacggagggagtagataatctacctatcatttttctttgataatctactacgagaatgttgtaaaaaatgcacgaatatgcacgtcaagcataatgagatacttccttcgtttcacattgtaagtcattctaacattttccacattcatattgatgttaatgaatttagatagatatgtatgtctagattcattaacatcaatatattagaaatactagaataccttacattgtgaaacggagtgagtatataatactgtgacatttaatttacaaagcacactgtaacaaaaaggaaagcaccagtaggattaattaattataattaattaattactactactgtaattaatagcagggtcaaaagggcttcattgagcttaagccgatcgatcttagcattcacgcatgagagttcagttcagttcacagctcggtatgccggacctcgtcgtcgtcgtctttgtcgtcggggtggtagtcgtccggcgacatgccgccgcaggggctggtcctgaggcagtcggcggcggggctgacgcggccgtcgtcgaagcccatggcgcagttgcagacggtctgcacctcgccgccgccgtcctcgcggcgcaggtcgatgtcgctgagcacgatgccgacgcaaggcacggcgtcgctgcacgccagcctgatcgcctccgcgcgcctcgccgtcccggtgatgttccggaacaccacgccgctcacccgcacgttcgacgtccggttccggcacggccgcgtcgcgtcgcagtagaactggtcgatgacgatggggtggtcgacgccgtcgacgcgcacgccggcgaaccgcacgttccggacgtagccggcgccgccctgccacgtcttgatgcggacgccgttctgggcgcgcgcgacgcgggcgccgtcgagggacac

SEQ ID NO: 2290 - DNA, 2931 bp, Oryza sativa
cgccgacctccgcctggacgactcgctcctcctcctctccttttcgctcgccggggaaccagtcgccctcagggtccccgtcccgagggtgctcgtcgacccctccgcccctcccgagtgccgcgacgcgggggaccatgtcgaggtccgcctcgcgctcgtcctccccgtcgaccaccccgtcgtcgccgccgccttcctaccgccccccggcgaggagccgcccgcgcctctctccctccgcgatggtgagctactcgtgtgttttactgtcctgtgaagttattaggtagtagggtttatgagctttctcgttgattcctggccaataattcgatccccgctagtcactccaaatcgtcgtatgcctctgggattttagtactaatgaaaacctaagtcgatttgcaatttaaaatgctagtaaaatgttactgtattatcttaatgtaatctcccctgtttatattataattatgaatttgtgattcattttcttggatgaacagatataaagaatctgtcttctggagatgttcacttgtactgcaaagcatgctcagcaagattgacaaaacagccactaaggtagagcataacagactttgagttgtgacttatagttgttttgcactttaccatgtctaatggtctgtttatgcaccgcgcatatatttctttaccaatgaaaagatacatgcaaatttcaacttgcttacttcttaaatcatatgtttgatgctctggggttcacatttagtagcaatgaaaccaccgcatgacatcttctttatcaagttaaacaatttgtcattgttcatgtcctcctatgcaacctattctgttcacatgttttgtgcaaataacttcaaacatgtcttggactttcatatcatcgcccttggttttaagttgggggaatcttccttggggggatggcctgtctgcttgatcatagaggtttacgaaagtatgataaaatgttctgacctctacagaagcagtaattttagggtattcaacttgtgtcctgactgagggatagtattgaaaagtgggaataggaaagaatttgtcccttggttgtttattggttctcttctggttctcagttcgaagagatataattcagtcgttagatgctggttttctgaattcctatagtggcatttattctataatcagtttgctgttatctgattatctccaagaaacccactaaagcagtatgtccctcagtggtatggaattcttattgcaagcaagcatgttatgctaaggttttggtcacttgcaagctagagtttaagcttttgatcgtgtttcgcaattagatcatagactatacttaaagaactagggaaaacctatgtgccaaagttcatatggtggagttctttttttatattatctttggtgattagtaaaatatacatgcatatgttcaggaacatcgaggaaatgccatcgttaaactgggaagatgtggctgacaattggtttggtggatgttgcacctcatttggaggtgcaagcgaaaagctagtatcacagtatatcaatgcatatgggcgtctagagggaacaagtctactaaatgctacctccattagcatagaaaaggattatcttgagaaggatttagcatctgggttagttagttcagtgcccagtaacgattgtgatgctctgcaggaagatatatgtgatgttcacataggagaagatcataccacggggaacatggaatttaatagttcagaagagaaagcatatcatgaaaagcagattggttgtaatcatgtgcaatgttctgttgttcctgaagagggtccttgtgtcagtaatagtgaaaaagatggagacactctttggactgatcaatctggcatcattaaagtgaaccccgaggagtctaaaaatgactcttgtgttgatgacatagagaaacctaccaaagagaccgatttgttgtctgtagatccatgcaattgctgttgtgacggtggaaacagcagaaaatctgaagacaatccttcgaacgtgccctctgggaacctggaaatgcaggctaaattggacacccaaagagattacaaattaacaaaaagtatatctcttggttgtagcttcattgtgaaagcatctaaccttgtaaatgatgttgaatggcttgaacttctatgtgctcattgctcatcacctattgggtcatacccttcacaacattcacatgctccagcagatggccgtgtacgactatttaaatgctatgcatcgtcagaccttcatgttgggggacctcatgatgtgttcaggtcagtatcttcacttctcattgaatattttgtacgcctctcaaaggtaaaaagggaagggaaaccagttcagtatagctaggcagctaaagtctatggtccttgctagtaaactgatttcatcactgatcataaacatccattatctttatgcagggggcatacattagaaagactttttgttaatttgttgcttgaagttgcagaagatgaaatatcttttcgtacattagtcagagatctgaaaaccaaaaggcccatccttcaaatagtcctccttagttcaaaagcgtggctgttttctggctactgctatgaaaatgatatggatggttcacatggggcagcacatctgcagccctctgttaagatcttgtattctaattgcagtaatgctttggaagaagacttaaggtacgtgatctgcttacacagctaatctagacttgttatgcttttcttctgccttttatccatattaaaagtgttttgggtgtttgtctttcttgtgctaaatttgtaaagatatattgaagtttgcattcttacatacaaagtggaacaaaaaaaactctgaaaaataattgaagggatacacaacccctggccatat

SEQ ID NO: 2291 - DNA, 8900 bp, Oryza sativa
cgaggcgcacgtcgcgggagcgcgacaccgtcaggtgcatctgctgcgcgttctgcaggcgcaggttccgcacgctcacccccctgcacgagtcgatggtaaagcctgcacgtacatatgctccccggtcaaccgttaataaaaaatgcttgtgtactatttcctccgtttcacaatgtaagtcactctagcattttccatatttatattgatgttataaatatggaaaatgctagagtgacttacattatgaaacaaagggagtattttcaggggctgttcagattgatggcattttaaaccataccattttttttgtaaagttatcaaaaaatgtctacgtttagtttgttgccaaatttgataaatacataagaaaatcctgttaaaattttaacaatattgctatcttgccaaaatttgataaggtttattttaactataatctgaacagacccccagtttatattataagggtttgtttatatttatgccatttcaaaccataccattttttttatagagttgtcaaatatatgcatacatttagtttcttaccaaggtttagtaaatagataagaaatcctaccaaaaattttagctacaatctgaacaagccctaggttgttttgattttttttaaatggatttgttagaaaacttttgcaagttttttccctaaaactttcaaatttgtaaccatcggatcacctcgagatttgtgcatgaaggaaaaaaaattgctagaaaaaattcacacatgtcacgcataagatcctagtgcttgctaaccaaaccatagttaaatgtaagttttatataagttatatcgtagttaaagtgtagttataattaaactgcaattaaaaaacttgcgatagtttttttagtactccatttttaaattagtatattatgtttaattaagtttatattacaacatagacattaaatatattttgattttattcgtgttgaaaatattgtaatattttttatgaactttgtaaaaggttaactggaaaaaaaaatcaaaacaacttaaagtataaaacgaggtggagtaataacattgtgattaattaagtgattaatcctgcttaccgtaggtgctcctttgcatggctgcgagatgaaagggagagtaactgacggtcagtaacaatccagtgatcagtgagctaagctagagataattagtgaatgtttaattaccttggagcggtcaatcttgcaggagttggcccaccatttggagccggagccgtcgatgagaccgccgccctggatgcgggcgccggcgagaccggagaagaggagccacagccgggggctcgccggatcccactccgacggctcatctggcgccacgatagtgccctggatctgcacaaaatcgaatcatcgatcactgcactcctggtggtgtttgagatatttttttaagaagggatctgcatccaaccgatatatgcaacatttttaaaattagaaacttaacctatcgaacatgtaacttagctttcaaataacctaatatatacaacattttctaaattagaaacttagccctctagtacgtttgagatatattaagatgaaaataaagttagaaggcgcaaaatgagataatattctcttgattaatcgagttttaattatcacaaatttgaaagcctgatatatttaatattttaaagcagtttatatatttttttttacgaaatataccgtttaaaaatttgaaaaacgtgctaatgaaatccgatgtaaaatctacatcttaatccgatgaacttgcagtgtacatgatggattcacctggatgatcatcctgttcttgcagggcccgatgaacctggcagcgccgaccttgtagcggcggccgccggggaccaagaacaccgcgttgttcagcgagcatgccttcttccaagcattcaagaacgcctacaacaccaatatttgataattacatgcattgttcagaaaacttaacaagatagaatgtctggttaattcagaagaaatcgacggaatatgcaactggattcatcaatagatcatgtcgttagcaccgcacaagtgtacatggctactacttgcaatgtgttgagttaagtgaagcaatgtggctaagctagatcttgcgtttcttcttggctatctgaatctctcaacgagattttcacgccttcattaagaaagacgaggatacatttttgcaatctttaaggtttggaggatgatttggttaagctaagcaactgcatgctcaggtcagatgcaagggggaatctacaatctagtggcatcgctatcgaatcttcctttttctcagtctcgacaaagaaaaatatatcatgtggttcgcgtcatcatcagttgatcacatataaagtgtggcttcctggatttgtaaggtccaggtccctgcttttcttcccaacatccaagtggttgccctttttatcctcaaagtaattaaagatattaattgctccatctctgatagtacatttaatattttttttctgactgactctggtgctgtttgtttagaacagtgatcttttcgactaatactaatatggaacataatatatactctgacacttaggtcctatttagtttcatggactattgtttagctctcaccttttagtgttaaattaaccctcaaagatccaaacagataggctaattttgagctaatatgaattagccccgctcaaaacattagcccctccaaggggtgctaatggggctacttttgtgtggggactataaaaaaaacagctctctctctccttctctctcctctctttctactatctctctccaccttttagccttgaattaatccatggatccaaacatgtcatcctaagctaatgtttaacctaccaattcatgactaaacattagctcttaaaattagccctgtgctaatctttcaaacaaggccttaggccaataaaggaagcaatgtgaacttttttttgtttttttgtcatgcgtcaaatttgattaaccacgcgcactgaactttttagagtaaaaaacatcccaaaaacaaaggtgcaatctatctacaggggaaaaaacgtatgctttttgtgaagaaacctcgtgcaatgcgccaatgcaagcacacaccatctaatctgcatggatggatgaacaatggctagcacaatggagaaaagagaagatggtggctgttcgaattcgtgcacacacctccgtgtcgtcggagcagccgtcccccgccgcgccgaagctgtcgacgttcaccacgttcctccccgccggcggccggcacttggccgcccacgccatcacctgctccgcctcctcctcttcttcatcttcatcttcatcatcatcgtcgtcgtcgtcccaattcaggtaatcttccttagcatctgctccgcctcttccgttccaaagcttcaagaattgctcatgatcatggtcatggtcacctccggcgccgccgtcatcgccgccgccgccgctcgccgtcttcgccatggccatgatcaccatcaacgctactagcaccaagaacagcattgttcttggccttcttcttcttcctcctactgcctccattgtttcacttcacacaataataacagaaacagtgtagtatgctctccttggcttgggatacaatacgaggtgtagcaaataattttataggggaaacaagaagaagaagaaactgaagaagcaggagcaggagatggaggtgtggtgttctatgctctttttgtttttgtttttttttgggtggacttgaagtgcaagtgaataatggcgatgtgtgcgacagggcaaggtgtagtttatgctttactcatccatataccctttttcccttggcatttttttcaatcgatgcatcatttcttcttgtccttttggtagctatgtaatgtaagtacaaattaagatgatgatggtgattagataatgctttggcttgaatgaacaatttagacagaggctgactctacaaacgttcttgtttaagacgtgtaaaggcagcagctttggttgagagatttcatgtcaacttcccagttgcaaactcttcatgtttgttgcatgtggttatcatttgttatggttctacctacgtagtatcattattattttccaagaacgggaaaaagattagaggtccctttacgctagctttctgtaaatgttgatggcttaattacgtctgattctaaccaaggtataagctgcactgcacgaatgccatcagcagttcatgattaccaatcgatgattcaaccccatcttccaacttcaattggatcataggcagcattaatcctcactaggcatcgtttggaacacaggaaattttcttacgatttccacaagaatcaaagaaaaaaatcctcctttttccgcagttttcgcatcatcattctccatagcattgagatgtggcaagccacgttcgatgttcatgtgccattgctccaggtgccagcaatcatgaaccttacctgaacggcatgcatgatgcgtgcaacagtattcagtactatctgggtgctgattggggtgtaacttcagatgcactcatcctttccgtttgcacagaagcccctgctttgcctgcccactcctccttaacattgcattgcgtgtgctgttggctgttgcacatgctcctcacattatttctgtttcagcaactgcaatgcaaccccattagcatatcatctttgatcccttttgcttccggaaactaaaggggaaaaagaaaatactcattcctcagtgcaaccaggaaacatggttatcattgtaattgccactccaacgttggcaggatgataaccttttttctgatatggatgtgacatgtaacagcttctaaaactatatatatggttatcaagagactctggaggaccatagcttccatagtcccaatcaacaaatctacacaccatgtaagaatgacaactggaagggggggaggggcagagagatttagctttgtatatacggcttcagtgtaccactgtctaagctgatgattataaggctgttgctagctatgacatgttgatctcaacgctgcaactcttggggaagcggcagacagggcacacgtcagcatttttctcgcaatcagcacacaagcagaggtgtcgacacggcatcaccagcaccgctgcctccttcattctgcacaacctgcatgctcccagcccaccatcagccatgctgttgatgccgaggaggcctgactggaagaaaaccccaggcacagcattgacattctgactggaagctgtgttgtccacttcgctgtcgccagagccttccctggtgagattgctgctatgggctaccatctgcatgagcttgcttttcatgctgttagcgacagactggttgtgcagtgctaccgactgccatgactggacttccaatgcaacctgcctgatctgttcgttcagttccttgctcttcctgttcatggcctccacctcgagttctttctccttcagcttctttcctactcctcgttcaagggatgcaagaaattcaaccatctgcctctgctttacatctttcatgcacttaaccaattgttccacctgtgggaaaagagacacatgatgagtgtaaaaaacttcacaattcttgtagtttcacttggcacacagcagtaaggggagagcagataataatgtgttgcattggaaaaaaaaaacctataaaactttaatatgtgaattccaggctaagttactttacagttgatagcaactgatgactgatgcaattgccacttgagcctaacatatacagatcactccacataataaaaatattaaattcttgtgatcacactttatacagtattgttggatatttacagactatgaggaacttgacgacatgggaaaaaccaaggttgatgcattcggaatatatttggcaatgaggtggccttgagattgaatgtttccatggagagaatatagtcaaacagcaaaactaccaaatcacatttggataaatctgagccccagactattccaaaattactgaatggcatagagtttccactactgagtaaacatttttccataaacaagcactaacaaacatctcaaatttggtcaatgaataaagtaagcattgaatacctgaagtccgaaataacagttgaactctttgttttctttgtctaattcagccatcacttcatcaacaaaggatgccatgataggcaatgatgacatgttaccactgccagatgtgattgaagtgtgctcattgttctcataggacagtcttagcccagttgatacagcacttggattaccaatacgtgctaaccgatcaagattttcaacaggaaagtagttcagggacatctgaagattgagttgcttttcatgaccaacatcgttgtttgtatttctttcttgattcatagcagagaggtggttgtttgcaatgtagttataataaccagtacttcctaccgcaggaactgcatagatgattaaatacatataaattagtttattttgagcgtaacagctgaaagataaaaaataggtgacatggcaagaatacagcagtacaccacaggccaaactactacaataggaactacagatgcctccgtgtataacggaaaaaactagaccgcaaggacacaaagtgataaagcaaaaaagccagtcccacctatcaacgaaacgtgtaaagagaaaaaaaagatgcaacaagagaattattttcactgtcaaatgagacttaaccatcatccctgttggaccaaatgtggttcctctaggcaccgcacacaccatcataggatgctgcacaaaagtaatcaaatccaaacacaacctaatactacctccatcgctaaatatattacattggttagttcaaaaatgaactaataaccaacgtcatataaaaggaacagagggagtagtttggtatttacattatggtggatgatctctacttatcctttaggatgctttagaattcatgagacactagttggagggtgagagcatgaaagcacctctccacaatttaacctactgggtagtgaattgggacaagatgacacggtgagggttaattatcgctgcaaatcttaatgtgctaatatcctacagtgagaatctgcaagcaacatcttaagggcacatacaagtataacacagtttaacatgtcaacaagctagatcaataaatctcacattagagccatcatttttcttttatcctaatacaagacaaggaaatgaacgtgcagattccatctggcacattattgagtagagaaccaaaatatctacccagcaatgctggcttagtgctcaacaactcaagcagtgaattcaattgcactaaatctgaaccacatatgcttaaagacacacaagcgattgcctccgtgaagctaaccaactagatcatcctaccaaagcgcaccaagcaaatgcaagacagtaatcagcgctcgcatcaacagattcatctcacctgcggcgctcccgaagagctgcagctgcagcggcgaggccttggcatcaaacacgaactggctctccttgggaatggaggcgtaggggaaggaaccaccccagtggccactcccgaacatctccccgtccatcctgctcctctcctgccaacaacacgcagaacaaaacacagcacaaatcacgcgaatcccctccaaaataatccgtgccaggaagaacaaggacccgacggattacccccgagacgacggcgacgcgatctctcctcgatcagcgacgaacccgatccgatcctgcgaaaccgtaacctcgtcaatgcgatgggggaaaccagagacaggggtcaaaccacgcggcgcggctgcgggagaatcgcggaagggaagctgaccggagactccgccgactcgacgcgccgccgccgccgccgccgcagaaaccgccggcggtttagggttggggaatccgcgagaggagcggcggcgttgggaaatccgcgatttattggtattttttttccttttttttatttttatttcaccctttcgctttgctctctgcttggttggtttaaaaagaaagaaagaaaccgcaagtgaagaaaaggaagaaggtgtgccagagtgtgaggagacggatgggcgggccttgattgttggctcggcccatttagtttcggtccatctgtgtgtcactacggcctgttttaggttcaaggtgggcccatgcatcagccaccaaatcagcccaggaaaatatacgtgtggcccatgaactaaaccaaacaagtagtcatcatactacttctcctaggcagggttacaatctcgattagttagcgaattttgagccccatcaacacattttgaaccatttctacaatctcgattaatttcgaaaattccagccgctcggaattcgttgagattgtgaactctgcttttatgtaattactttatttagaattacacagtacaacgcaaacactcacaacgcatttgcactcacccttataaacacacgcacgcaaaccctacccctatgagcatattcgaagattgggcctcgctgtcgacgggtacgtcgcctaccaccgaaagcaacaccgttaaatcttggaaaatttgctcccataaggagtcaaacccaggacctcaggtgctactgaggctcttataacctctaggctgcagggcctttcgcctatgtaaccaattttgttcctctggaaaaaaaagcaaagcaatcttcttatgctaattaagggcctgtttggggagtgtaagattatgagaagcagatggttggtagccagcttctgagaatctggaaaag

SEQ ID NO: 2292 - DNA, 14772 bp, Oryza sativa
aggaattgttagttcgatgaccgataattattaacgtggtggtgacccctactcatgaaaattaaatgatggcatctcatcttacaatagcaatatataattctgatgataatatttctgtagccagtcgtgtagtaaaagatttgtgatagtgcagtaagatggtttgaagtgtatactaacaaccatccgagtatcactactagatgttttgtgccaaatactataaggatttagcacgtatgagaagataaaagtttactaagaaaactttattataactaagaaatagcctactggttagtgccatgtggtaatttgagttgaaggtcttgagttctattcccattgaatgcaaaattttcttttatttttttctctctcaaaaaagggagaggtggagggggataaggagaaaaaatgggagaggaggagcgattaggggaggagggcggcgcgctcgggcgctcggggagaaaaaaagggagaggaggagtggggagcgatcaggaggagggcggcacgctgctcgagcgagaaggtggggtgggaggtggggaatcgggaggaagtggggaggtcaatgggtgtgtttggttgtaagccacactttgctatagtttgccacgcctaaggttaggcaaatttgacaggtgtttggttgtagccacagttgtggcaagattcccctccaacaaattgggtcccacgtgtcaatggctcaaaaaagtgtggcaagattcccttaggcttagtaagttgtggctaacaatttgatcacctcaccttaggcaaggtgtggcaactttgttggcaagtaatggtaaagtgtggctgggaaccaaacagccccaatatcttcagatcgaggcaaaatgaacataggctgtgtctagttggatccaaagtttggattttggttgaaattgaagatgatgtgactgaaaagttatgtgtgtataacaggttgatgtgatggaaaaatattaaagtttggatccaaactttgatctaaacacagccataggagtactacagagtggaactgggagcatcctggccgtacacgtgggggccttgattggccattgattcgaagaaagaaagcacatagtccaatgcaaattgcaacaccatgcagcaagaagaagcagccaagcagcacactgcatctgcatggtctccttctcgtcctccgatgcgagttgttaggacagcgacttcgagagcgacgctgtctcttgttgagttgctgtctctctccctctctcttctcttcttgcagctgcagatagaagaagaagaagaagaagaagaaacagtggccattggtgaaacgaatgtagaatgcgagtgaaatttcgaatggttttcaagaacttaagtttggctaacatttattgaaatttggttggggatcgggatccggcacttttaataggaaaagtgaaccctgcatacaccttatcttgaggtcatggatgagagaggtgagattgagaagctaccaatgctcacctcccaattccatggcatgcaggcaaaggaattctgaaaactgaaagccatgccatgtcgtagtaaatgcatatttatgtttttttggagctgatcgatcttgtgatctttattagccacccacacatattgaataaactgaaacatcttcttgcagcaacaaatacagctctgtttatctttgggtccagtactgtactctctggatgccctgctagattcgattatggatctgactgaccttccaacagcgacagtaggagtagttattacatccggtatgctgacagtacattttactatctcacaacacatcagttaggatgtgtttagttcacgcgaaaattaaaaaatttgttaaaattgaaacgatgtgacggaaaagttgtaagtttgcgcgtgtaggaaagttttgatgtgatgaaaaagttaaaagtttgaagaaaaagtttggaactaaactcggccttagtttaactaccttaatttggtacctatggtttgctgtaatcgatacttcatgtactaatcaagtataattaaggcagtgtaccatgtgttcatgaagtggcaagctgtaaaaataagtatgctgactgagcagagctgctgctgctgctttgccttttgcctttctcttttttctctccctttgttttcccagattttgctttgccctttatctgtggagagtgatggctgacctgatgtgtgctcctttagctagctagggtccttcagtccttgcataaaattagttaggattttggaagagagaaaaaaagtatgattgattatcacttaatccctgggatttatcttttttctggttgaattgtttgtttccagcaggttgaggttcccctgtcttggctgttcagtgttgaaattctggttccactgtttttggcctgtcctgcttgtccattcttaccaaaattgttttcttttaacatgttaccaaaatgatcaattttagatgacattttggtttgagcaattttggcataacaaagtagtacaagtttggtatacgaaacatttcctttttctcagtaagcatttgctagtttattatctctctttcagttgtactactacataatcatcatcaaagctactatagcacattgggattcatcagaaagatatcatcagctggggagaatctccactagtcgtaattaataaacaagatattgccctacaaggattaccttgtggagctcatcataatcatcatgcatgagacagtactacgtggccctaattgagaaccccccatctgtttggcaatctcatcacacaatcaattgcataataataaacaaatcaacgaacaaacagtaatccccagaaaaagaagtcgcacatgagaatcatcatgcctccaaaatttcttctcctccatacatccagatacttcttctcttcccaactattagcatgtttatttgcagcatcaattcaaacatttctagctttgacagttaatagcaacaaaaccgtaaatattaatgacttgataacaattttaatagatttaccatgaaacaaactatcataatatgcaactctttctacttagaataatttatcgttataaatattattgaccaaaataacatatcaaagacaacttctaaggtaagcgaatattagggaatgacctaatatcaaatgattagaaggggtgatgcttcgaacccaggtcgtctagcccaccaccttgtgaagctagcgggaagaccctgtacgtttttcacaacttctaaggtctaaaatactttatacttgtattggtggactgagagatagtatctctcatggtaaggatatagctgagcatcaatgttcagaaaagtgcaagaggacaagccattcattgtgcaatcacgctcgtcgtcttgcccaactgctctatgctctctatccccaggtcccctgtcaaattctaaaacagtcatccgatctcgccaaaacgccatcattatacctacctaatgctaattctagcttgcatcacgtaagagctttgccaattatataagataaactagtagaagaaagtttgtcaaatgctagctaggatcatgtgcatgggcctcctctgatctgcatggtcggtctcctttagcaattagcactagcttggctaaggttttagcaggttgatgttgtggagaggagaataataagtggtgcccttgtgatcttatctggtttttcagcatattccaaatcctggccggcaagcttgctggttctgataaatgtccgagaaactactttatttgcccccttagggtgtgtttaatataggccgagcttagatctaaacttttttttctaacttacaacttttcaatcacatcaaaacttttctacacacaaactttcaacttttccgttacatcgttccaattttaatcaaatttttaattttagcgtgaactaaacacacccataatgatggataaatctgcactttctgatcttctaaacagtatgattttcattaaaaaaaacttttatgtaaattacctagaaaatggagttttctaggtaattatttatgataaaatggagtaaatgaaattaaactcgaaaaaatatatatatattcccaaatttattagtaaatgatttttttatgatgaccaaaatggggttaaggaaatattgtgaagtaaatattgcatctgtaaccaaaacattccttgtggtacaagatgcatttttttgggttgagtagcccagttttccaggtaagtactacagtactagtagaatataaaaagaagaacagagccaatactttttctgtcatcttcttcagtttcttcagacagctgttgagattgctggagtcaccactcaccagtcaccacaatttgggtgtgaacagatttgaaaagccaaactgtttcttcatgagcttggaactgaaggacaaaaaaaaactaataaagcaaactgttccaggagtgcttaaaactgaagaaaattttttttcacccaattcttttgtcggtcggtggtggtggctactggttatagcacattaagcaccgtcgcctcagatttttcgacgaactttaaactggatttgacgcgacaaaaagcagccttggattggttccatgcaagtgctcttgcagcacctagcaatagcaagccaaagcaagccatcagagatgagcccatgaccatgaccctggtcaatccaaaaggaaagacactgagcattgcagtagtaccaattgtacacacctcatgtccatctccatccatggccatgggcccctccacaagccaagccttcaccttttaccccccccccccccctcccttcacaaactacacggccacgcctctctttctcatggcaacaacggcgtccaagacggactccgagtctccgatccctcaccgtaacgacaggtgccgttgaggcgcactgatatgcgagaccattggtaccattgaggcacatatgtggactacttctttatttaccacgaacacgtttcccacgttgttaaatactacctcggttttaggttacaagactttttaacattgtccatattcatatagatattaataaatctagtcatatatgtgtatatatttattaacatttatatgaatgtgggtaatgctataaagtcttataatacgaaacggagggagtagtatgtttcgtgtaaaaactttttattaaaaagtttctttcataaaaataaaataactctaacttttaagtttatatatgtcagtgacatttctttccatgaagtttgaaaatctcagccttacctcacaaacaaacgtagcacaaagaccgacacaaaacctctgtcataacaatcagtgccgttgatacatgtttacctcgcttcacaagccacacctctatctcactgtaacaactaagcaatttacagcgacgtccagaacggactcggaacctccgttgtaacggcaggcaccattgagacactgacatgtgagatcatattattgtgatattttattttagtagaatatattattgacagaaataggagatttgtcccatcttatttttttaagcttttttctgttcacttttggatattttggttgtgtgcctacggataaaggacggagatgtaatccatttcctttatatgaaaaaaaaccgtgtcatcgaatcgattcaccgacatgtgggcccatttgggcaattgggcacctaccgttacggcagaggatactcgtccgacccacagagtgagggattaaggaagaagaagaggttgattgagatgttggtaaagaaaaacagtaaacaattgggtatgtgtgtccccatttggggagatgaaggtgaatgagctttggatgagatacatggacacatatatatagatatgtatatatatacagatttccctccaaagtagggtgaagcaaagcatctcattccctcaccccccctaccccagttcttctccttcttcttcttcttgttacctttaatcctctccccttctcttctctgttgcgtgcaagcatctctcctcgtcttcctcctcagattgcttgcttgcttgcttgcatcctcctcacattcaccacgaggtttctgctgctggtttgtctgatgtgtgagatagaaagagagtgtgagattgaggacgaattgaagcctagcttgtgacgcaaagttggcatcttttggtttggagaggcccactgtttcttccacttctcgccttgctcgcattccttccttgcctccatccccatctccatgccatccgtgtgaagcctcgcgccgtttggttggttgcaagaacgccacccgcgttggttgttgccttcgcttctttggttgctgccgtctacaagaagcctctctctggcctgtgctgcattggcctcgatcggtggtcgaacacatgttccacggctcgccggcggcggtggcggcgtcggcggcggtggcggagatgaggttcacgacgggggggtcgtcgacgcggtcgtgggagccgacggtgacggcggacacgtcggacctgcactactggatgcagtggcgcgccgcggtgtgcgcgctgtccgtgctcgcgtgcatggccgtcgcggcgtgcctcgtgtggcgccacgagggccccggcgccgaacgccgccccggcggcgcgtccggcggcggcggcgggagcaaggagcggcggcggccgggggtgctgtacgacgacgaggcgtggcggccatgcctccgggacatccacccggcgtggctgctcggctacaggctcatctccttcttcgtcctcctcagcttgctcatcgtcattgtcatctccgatggtggcaccatcttctactactacactcagtaagccactccatttcattttctcagctactactttttttttacctcttcattaattatctgttcctttcccccaaaaaaaacatgtcattttaacttggaactttggaagatggtgttcttgatgcaaagtttaacttcctccttatctgttttcccccatataacttggatggtgttcaggatgcaaagtttggtgataagattttttttaaaagaaaaaaaaaagcaaggaaatgagattgattaaaattttcattgtgtgctcaagtgcttcaactaggaggaatgtactgtggtcaagaagtttggcatttgttcccctttggtgtaatttagatttttcagggaataaagggtgcttttccatgaagcaattggttttctgaacatgcatataaagaattaatgaaaactgtcaggcagaattcctggcattttctgttaaaaatactatgcacaattgatggctaaaaacggtttgcctgttagcttagacagcaagcgacgcgcctcaccattttggttctattgttcatggtcatgggtagtaccaagatttgtactagcacatctctgaaactgtttttatatgtgacacattacctcaatttaataattacaaaggacctcacatgttatttggagcgcatttaaaaatgcagtcttttgtgcagtatggaatacagtgtcataactgttcatactcagtttattaactaccagtctaccagctagaagtactgaaattcggcattactacctgtatggtcagtagtttttattaatgtttttgattaatggaatggacaacactaggaatacccactccaacttagctacctggtcttacatgacttcctgttccattaaacatttctcacatcaagttaatcaaatactgccttttgataatatattataatatatgacctttttgttgcaaaattctggtgtttatcatatttctcaataaacaaactagtgtatctggttgcaagaatcaaattatcgttacatggatccgctagttgttggtgtttgtcaccctgctcccagaagtagcatttgtcaccagccttcctcctctaataagtggttgttgaactgtcgataatgcaggtggaccttcattctggtgacgatttacttcggggtaggtcccttaatccctcctttttcacaacaaaatagtttgtctctgcactgaattcatgaatctaatgattcatgtcgatttatctttacatcgaacacatctgaagaaaagtttgttttgtggaattgttcagctcggcacggcgttgtccatctatggatgcagcaagcttgctgatgagaatgttgtcactgaaagaacagacatggagctcggctcgtacgtcgcccatggagctggtactaaacccaatttgaatggggaagatgacacaggagagattgctggattctggggttacctgctccagatcatctaccaggtaaagagggattccatgcagccaaagaacttagaataaccatccacttgagcgcctttttttttcttatttgttattgaagagagttatcttatctgcactgacatttgcgtccatggagagggggtctgatctcattaggcttttcatacgcaattattgcactaacaactaaagtacgtttgtggtgtgctctgatgaattggattccgtttctaaagatcagatgtgcccacatactagcatctttgtccggtcacatttcaagggctctcacgtagccgccctacatgagccatcttgacatcttgttggtcctatctaaatattcagataatctctgcaaatctcacatttccttgtacctcaagggctgaatcagctttaaaccgctttgcgaaatgtagggctgactctttttagtagtggcatcaagaataaagacaacatgtttcctttgtgttgatttgcaaggcctaactgtacccaaacggtgactgaataccttcctaggctgaaataggacagaatggaactattgttctgctttgtgataagaattactagatagttctatggatggtagtttactagcgccatgtttagttccaaagttattcttcaaactttcaactttttcatcgcatcaaaactttcctacacacacaaacttccaacttttccgtcacatcatttcaatttcaaccaaacttccaattttggtgtgaactaaacacaacctagatctgtgttgggttactgtgtacactttgccaacaaaattttgtaatatatctcaccttttttagagaaaagaatgggtatattcattaattcataatcgttgtgaatatccttttaaggatttatgctcttattatcaaactttacagaaaactgagtaatttatgtaagttttacagtttactagcaatttttactgaaccagtatctgaccttttatctgccatgacagacaaatgcaggcgcagtgatgcttacagattgtgtgttttggttcatcatcttcccattccttacagtcaaagattacaatctaaattttgtaagtattacatgcttcaggccttccctacctgccatctcatactttgaccaatacagtgctaaaaattcagttactatgtttcgacagttgttgataggaatgcactcggtaaatgccgttttcttgcttggtgaagctgccctgaatagcttggtaagttgataactacttatctcgatcagtcaagtaattttatgaatgaatgaatggttaatttgacaattacccactgaattcaacatatctgcagagcttcccttggttccgggtcgcatatttctttctctggactgctctctatgtcatttttcaatggattctccatgcatcaactccactttggtaactttttttttctaactcccattctctcctaactactaaaaccatgactaagagtagtacttgcatctttctgttactgatcactacatttcatatctatttgtcaggtggccatacccatttctcgatgtttcagctaatttatctcctttgtggtaattccattacctccctacaatgatacttcctcccatatgtcttctcttgcaaagattacaaactgaaatcatcatgaatatcacaactcaaatcatcagattttcaatgaatcttttcatctacacaggtacttcgccgtcgcgatcatgcaattaccatgctacgcggtattcagactggtgatcaaactgaaacaccacctgctcacaaggtggtttccgggttcagtcgtaagaggctcatctacaccataagccaggccgtcatgcatcatcttcctccgccattgccaacagtttatacagaaagggcaatggtgaagatcacaagaaaagaataatggcagcctggtggtgatggactgatggtggcatcgatcaccgactccatttccattcctcctttgcgagattctcttattgcagcaggtgcaactctccgagcgaaaaaagaaaacaggagaggcacatgcgttttacaccaccgtatagtagttctgatagatgtaaattgaagcttacaggttcagatatgagattcagagagtttttctttttctttttggatgtaatggaaactgaaatgaacagagagaaaaaaaagagtgtggtggggttatgtatagcttgactcattgactgattggtcaaatggaggagatatttgttaacattttttttattttgtagagctgattaattaatggtcatttgtatatgtgattaatgctaatgagtaatgaatggatgcaagtgtgtgaatgaggttgttaaaatcgagcaaaatggtacacttatgcaggaagaaatatgcatgaggtgaagggaggaagttgagtacctgacagtgagaaaaaagttggtttgaatttgccatctctattgattacaccacaagatcgttaggtgttgttcgtgaaaaagcatcaacacaaagcatggatggcactagtgttttaaatagcggactaaaaacatttagctgttagtcttctcaaactactataacgggctaaataaagttatagcggctaaattatacatgagagtaattagctagacttttttaaaatagctatagccaaagatttaaaaccttagatggcacctcgactagataggtaaggtcgccggagagaggagctccggccgccgtcggcaataattctgatcgaagcaaacttgaaagaaatcttgtgtaatttcagagagagttcggcccgttccgatacctcaccttcccaaaccgatttatgggccgcaattctttactgggccgaggctggtgaggcccacgccaagggtatttcacgataatctaattctaaaattaagttttaaaattctagctttgattatggctgataagccaaaatccaaacgtctgatgctcaatattatcgatgctgtagctcgataatccgtggcaataatccactcggtaatataaatcaaacggggataaactttatcggattggcatgcatattgacatttttcagtgcgaagattccttgaacagagcttaaatatgtatataacccatgcgaagattcctcgaagcagttcagacttcagatatatctgaacttgcgtagtgtttactcctccagatatgtcaatctaggtagaaatagatcaatggaatggaattttgggaaatttgtggcatcgaagcaatgcttcatatggaactgaacaaatcagtagctcagtgtttccaggctaatatctgggggaaaacttatccaataattcatgcttccaacggcacatcaattccaagcattcaagtctccaactctttatatatatctcaggtttccatcacattcaagaattacaactacaaagagttcacatcagttagttagtttgttcttgtttctgacgaagaaaaaggccatcagttgtaagttgattccaaatgtttctgcagaagattcaatccatcattaaactaacaaatgtttctgttctttgcaggaagaagacgacgaagaagaatcgcatcaatggaggtgaagaaggtggccatggttgctgtctgctgcatgttcatactgctgtttccaggccagcagcagcaggtggctgccatgtccaggatctgcagatgctaccacgaatgcttgcccaactgcggcctgcgcaattctcgctccttctgcaaggtgttctgcggcagctgctgcgtcttcaatccagttcacaattgcactagcaccgatgcggcggccgcggcgccagcgatcgccggagacgactgcagaatgatctgcctgaactccttctgcggcgaggcagctacaggctactgtaagatgcccattttctgcaattaattttgcatgtcatcttttctttcttcattttggacttccctttgctacgcttcccaagtttctaaacggtgcgtctcgtgaaaaaaggatctatataaaattattttagactttagagtagttctcgaaagcaatatttttaacattggagtagttaattcattcgtttgcccttggatttcagctatcgcatctttagcttcctgaatccattacaagcctgcatatttgattgattagttaggagtatttgaaacaatacgctgaattttccatctgtttgattgtttgtcctttgtgtttgcattgcagtactaatgttggtttgtttcgcagcggggcgaaacgatgctgatgctgcagcttgtctcgatggctgcagcaaaggatgaactggttcggaggaagtttgacatgttgtgacgatgatcagtatctgctgcgattcttgaattgactgttagagaatggtcgacaacaactaaatataattaactatgataataagaacaataataatgtatgatggaatctcgatcgtgtgccaccttctctggattcgatacggaattacgtttgctgtaacctgcttgctactgatcattatataacgttagttgtttggttacagtgttcaaatattctcgtattctctgcgagcaatgcaatcttgtttacgaactgaaggatggtgtttagatcatactggatttatgaattttatggtttttgagagttaccgaaacgtaccaatggtttagtgcaaaattttacatgaaaaaattctcaagataagttgaagatatactagattatgtactatttcgcaattttgaatacctaaactctgagcgtactaatttgctaatccgtgccttaacgattaaagataatccaagaaataccattaacaagtgtccaaatcccataaataccatcgataagtgtgagttccaagaaatgttatcgtacaaatgactttatcccaaaaataccattgttgttagggtttcatccattttgcgccgttaagttctataggataaacagtgtatttaacggcgtaaaatggatggaaccctaacggtgatggtatttttgggacaaagtcgttaataataatagagttagctctggcagataaaaccgttgatacgatgagagcaactcaccagtcaccatcctcttgcctttggtgtcgtacaggaagctcgggcagccgttcatggcgacgagcagcacaccggcgtcgtccaggacggccttaccatagccgtggggcttcacctcgccggagtagtaatgtcccggcggcagctccacccggaggaggcgcacccagttctcacctccggcggcggcggcgatccagacgtccatgtacggctcggtcgacttcatcgccgtcaccgcgagcgcgccgtgcatgtcgaacatggggccctcgtcggcgtggctcaccggcggcggcggcgccacccgccggaacgtctccgacaccgtgtcgaacgccgacatctggccgcggtcgtcggtctggcggcgaccccagtacacggtgtcgccgaccgtcacgccgaccttgacgcagaagtgggagcacacccggcgttggtggtccgggacggggccgagccgccgtggctcgctggcgccggagccggtggagaggatgtagttgtcgccgttgcggtagcacaggacgcggtgctcgccggaggggcggtggaagtagaaggcggacgggcggaggcgtttccaccggcggcagatcgaccagctgccgcgtcgccgggttgcagatgagcacgccgccgtcgccgccgccgcccgtgttccgctcgaacagcaagaggccgtcgcaggagccgcggaggctgacgcgcatgtcgcgccgcagcaatatccggcgacccgcgtcgtcgccgtcgcagaaggctgggatcacggaggtgatcaccgtgaacacgtagctgtagggcgacgacgacgagtcaacggcgagccccgtgtaaccgagcagctgcagcggccggcggcgggagtgggcggcgacgaagtaggcggtggtggtgatgcggcgccaactccggcagacggcgcggcaccggagcacggccttcgccggcagccgcaggaggatctccgcccccacgtcgtcgcccatcgcggcgcactaatcttgacgctggtcaggtcaggtctctaccacgtctctagttaataagaactagtgggctgggcttcttttattacgtggactggccttcttttgttcactgggctggacttgttgcatcttgtggtatgggcttcttttgttatgtgtcctgggcttcttttattatgtggattgggcttcttttgttttatgggctggacttgtttcatcttgtggtatgggcttcttttattatgtgggctgggcttcttttgttaaagcgcggccttcgcgacaaacggg

SEQ ID NO: 2293 - DNA, 1442 bp, Oryza sativa
ttcttgctcaaccagagagtttatcctatcgagaacctagaatcaaagttaatagaatagaattgttagcaaaagaaaaataaggtgacaaaaggtaaaattcataagggtttgtaaacgtacagtagggttacaaaaatttgcgttgtccaaaacaatccattcaccacattcaatagccctgatcaagtctccagcaacccattcaaatttaactggttggtgtacagcttcactctgctgcaagtaatagatagacctcagtgttttactcaaatcatctttattgaaggatacaggcaagtcaaacatttccatatcacacttcatatcctcaactatgtccctgaccaagctcaatgatggcaacgatgaattcttgctcatttcaacaagggttgaaatgcaaattgaagagaacttctttgcaattacaaattcaaaccattttacaaacaatgtcttcctgtctgcaaccaaactcttccactgtatatattgactcaggctgaagtattcatcaatataacgctcaacttgagatatgaccactttatagtgcctaaaaaagttatactgctcaaagcatcccaacaattctgacacatcagttgccgaagatagattaacttcgttcaatgtattgccagataactgagcaagcaagcggattaatgaggttttcccagatgaatgttgtccaacaagaatgcacaaccaaccttgattgatacagtgcatggcagcttcaaggctatggagggtaccagggagaatgttgagttggctattctgaactttgcaagagtggacgcgatttcttctaatagatgcacttccaaccaccaaacactgtggattaacataaagcatttttatttcatgaatgctatactttgtctgaaagacttcttcaaaaagcttgacaacttcttcgcgatcagctacagttcgcattcgttgaaggtagactgtatttagaaagcagtcaaccattgaggtttctggatatcctcttgctgtctcacaagcaccaactatcatctcacaagacctaataatatcacgtagattaaattcccaaggagatccttcttggccgcacttcttatgtatcatggtatccatgtagagtctattgttaaaggaaatcaacttttttagaatgtcatccttgattgatggatattgtgatttacagatgaatgagtagtcgctttctgataactcatcaacataaacctttgtgaagcggttcaagaaggacttcggaaggcctttccgcccaccaccttgcgacgaaggattctgacatgcaaagacacgaaaggacggtggacatttgtacgtctgaccaagctcaggaataaagacctcagcacggtggtccaaaatggcattcaaaccctctaagacagattggggagcgagattgagctcat

SEQ ID NO: 2294 - DNA, 15984 bp, Oryza sativa
aattcctgcagcccacttgtgcatttcaatcctaccacgtacgactgacaagccattttataacttattgaaaataatttataggtaaaacttttatataagtctttagcgatttaaaatctaatgctaaaagataaacaatgattaagaaacctcaaaatgaactattaaaaagtttcaaaattttaattttgacagcggttgataaaagctataaggcaattcctttaagcccggggaaacctctttttcgtcttccccttccactcccactctcacttcattcaacactggtccctatcccgaaacctaaagtctaaacttagtgttacgcatgggtggagctacatatacttaggctctgttcgcaagagctggttcccaactcgctactctcatttttcgcgcgcacatttttcaaactgctaaatagtgcgtttttaaaaaaaaagtttctatacgaaagttgcttaaaaatcatattgatccatttttttaaaaaaatagcaaatacttaattaatcacgtgctaatggactgctatgttttccgtgcgtactgtttgggtcaggaaccggctggagcgaatacaggctttggggggtgcccaagaatatataccccatccgttcaaatttagcttaaaatttttttagctataatttatctattttcaccatatatatatcccatgcatccaaatttagatacccatatcaagctaaattcgatccaaaccctccggagaagacaccattaacattgccagagcacaaatctcggcgtggattataaggctagcaaatttgactaaaacaattgaaaaattataggcgcctgaaatctaacaatttcattttcttaaaaatcccattccccctacccggtggaccatggcaacattagaatgccaacgacaacaaattcaaaaataaaacaaaaaaatggttcattttgctgcggccaacgttaactttctcaacgttcacggaaacgtcatccaaattagcaaacgaaacacaccaccctgtgaaatttcttttcctcgtttcaagcaaaagtagtgcaaaatcctcccctgcccccacgtgaacggtgcagttgtcccggccgctctgctctactgctttttcacctcaccgacttaaaatccttctctgaatttctcaccaacgccaaaaacgccaaaaatcgcagaaatccccagaaaaagaagagaaagaaagaaagaaaagagagctcttctgcgggcccaccggagaggaagcgatcgccgccgccgccggcgatggtggtggtcgacgggctccacgacggcggcggcggtgacctccaggccttgctggatgacgcggtacgagatggccatggcccgtggggttttggtgattttcgggttttggttagaaagtgtttggttctttcttgcagggggtggatgatgtcgcggcaaggggcggcggcgaggtagaggaggaggtggagcggccgtcgaacgaggacgcgttcccggcggtggagaagatggcgacggcagcggcggcgaaggggttgcagtgccggcactgcgggacgacggagacgccgcagtggcgccatggcccggagggccaccgcacgctgtgcaacgcgtgcagcatgcgctaccggagcggcaagctggtgccggagtaccggccgctgaggagcccgacgttctcgccggagcttcactccaacaggcaccaccgcgtcctccagctgcgccgccgaccggggccccagtcagccgccccgtcccccgcggcggtggcgaggtacggcggcgaggcgaaggaggaggaagaggagctggcatgggtgtcgaacaaggacgcgttcgcgacggtggagaccaccatggcgccgtcgccgcgggtggtggagacaccaccggaacacgaccaccggccggcgaacaccccgaccacctctccagagccgcactccgacagaccccgccgcgtcgtccagctacctcgccgcctgcaggagccatccgcatcagccaacctcgcccatgcagtggcggcgacggcgagggcggggcgagagtgcgcgcactgcgggacgacgaagacgccggcgtggcgccttggcccggacagccgccgcaagctgtgcaacgcgtgcggcaacaagtaccggagcggccagctgaacagcacgaccttctcccagaattcccaagaacagaagaagaagagcaagagctcggcgtgttccagggagaggaagcgatcggcggtggcggcgacggtggtggtgggtggtggtctccgtgacgacgcggcggcgatcgcggacgaacacctcgacggcggcgacctccaggccttgttggatgacgtggtatcgtgtggccgtggggttttggtgatttggcgaggggttttggggggttttgccttagaataattggctctttcttgcaggcgttggatgacgtcgcggcgaggggtggcggcgacgccggcgaggcgaaggaggaagaagaggagctggagtggctgtcgaacaaggacgcgttcccgacggtggagacgatgtcgccggcgccgccggagaaccgaacgaaggcgcccgtgccgccggcggggtggcagtgccggcactgcgggtcgacggagacgccgctgtggcgcgagcgcgacggcccggcggaggcggagcacgtgaggaaggaggagacaccaccgaacatcaccccggcaaccaaacaccgccgcatcgtcgacctcctccgctgctccactgctcttaacacggcggcgaaggcggtggagcggcggtgcacgcactgcgggacgacgaagacgccggcgtggctgagtggtccggacagccgcggcaagctgtgcaacgcgtgcgggaagcagtacaggaaaggtcggctggtgccggagtaccggcctctcaactgtccgaccttctcgccggagctgcactccaacgcacacgcacaccgccgtcgccgagagtcgccggtcgccatcgccatcgccggcgagaagtgagagaaaatgtttaaccccccgggattttgtttagggtagggatggcaatttccccgttgggggcgggacccgtcgggtacccgcccctacgggaacagggacggggtgaaatttcaacctgcggggctgcggggacggggccccggaactatgcgggggcgggggcggggccacaagctcacccgcgggtgacccacggggccccggaatataggatctaaaatatggcatacagcccataatcaaatttaggcccatatagcccaatatatatatacagatcagtaaagagaagccaaccctaaaatcaatcccgtgagtttgtcaccgccgccaccaatctctattctcgttccagtagttttgacttttgacgctatcccacaaatcacgcaacacatcacacgctgcacgctacttcggcgcttcctcacctccacaaatcacgcctcgcgagttggtcccgcaccatcaagcagcggcggtcggcgctcttccacgctgcccgtatcgttgctctcacggacgccgtctccccatcctgccatccgccggcgcctcatgtcgttctcctacctctccagccgccggctcctatgctgttctcctccttctccgaccgttcctctccctccggctgctgcaggttctccacatcattattcccttcctccacccggctgctgcaagtttcccagaccattctttccttcctccggctgctagcagtcgccgctcgcatctgggtgcggggccccggaggggccggggccggggattgattttgccccgttcctcactccggggccggggccgggtgaacccgcaaggatgcgggggcggggccgttcctatccaaccctcacccgccccgccccattgccaaccctagtttagggaggcgatttagttggcccgcccaattttgttagcacactgaatgtttatgttttttgctcttgctaggggagtaggggtttttgcctttttggactaagtagacttctctatggtttttgaaaggatttcccattgactatttgccactcttatgagtggtgctaaattatttgtcactggacccacatgtcatatatatgtgagggcacacatgacatagacaacgagtggcaaaaaaattaattgccatatcttaaaagtggcaagaagttaaatatcccatgcgcatttgtgattaaggagtctagaattattgcttttgaaatgtaaggagatactccctccaaatttgtgcagacatacacgcacatgccacactcacattctcgcaaatacgctctctaacacatactctaagaaacaggaaaacctgtggcatatccgtgatctcgctaaagttctattgaaactttgaagcctacctacatatgcgtaatattaatgggcatcaagatttgaaccctttgtgagaagttatgcacccacaactataccaccacgtcactagttcttactcctttcattttaaactaaccaacatcatatataaatgaaaatgggaaatggaaggggagtgttaaggaagacaacaaattggggggtttctttttattgttatcatttctttcattttctggatcaaacaaggctaacataaaagacctttgcattttgaagatccgcggagttttcaatttcattcacaagcctgacaaaatggagcttatagctcagtttacatgcagatgctttcgtaggtaaagaggccaaacttggttcttagccccccaaaaccaaaacccaacacatggcaaactagcaattgcatcatcgcactcaatcagttcatcgctgccagtctactaacttgggcaacgcctatgtgaaggcccaagtagtgaagcttacaccaagaataactagctggagctcacatagtgctccaaaatgaggcctggtaactcaagtgttcatcatcgaggtgtacccttcacacggatcatcttcaacaggttactgcaagctggactcccagaggccagagcagcaagatgcaaaacataggtctctggttgctaattagttagctacatatattagttactcccatcatataggtctccacctgctaattagttaactacatatactagttactcccattatctagaagggttatagccggagaaggctagccatcgccacgctcctcagagaccacaccacctgcagtatgggttttattcatggttatgaaagcatgtatgagaattggaaagaaaaagaacaagtaaatgtatcttactggaaagagtaatagctatgtttgcttggcgatctgcctcggcattccattccttcatgcagaaacagaaagtggagaaaatcagcaataccaaaaagtatcagtgccttagagatatagctgttgttttagcttgcccaaccaagcatacgctagagacaacttctgtacagaaacatcagatatgcagtgaaggtctaggaagaatgagatgccgctgatgcaaaacgagacaaaataatgttgtctcactgttcatgcttatatcaaatcatcaacgtaaaaatgcaatgcaggaaggaagtttaaataatacccgtcgaatgtggttgatctcaaatgagacgaagttttctttgagctttctcacttccttgcacagttccatcatgttctggttcttcgtttgccatgtacctttcacctatttgagaaatatatgagaaagctgttagcggagaaaatgatactcttgtctaaaatatgtagtttgaatatgtgataacggtatgagaaaaactttctatgaaaaatacttatatgaattctttcttaatttactatattgtaatgggcattgggctgaggtccgaggcccatgactatgccaaagagaggaatggcagatcattttcagtttctatatgtgctttgttcatgatttgatttgaaacatgatcttaaatgtttgcttctaggaacatttagttcttatttcataattgaaagcacatcaagcagcatgacaatcccaacatgccggacaggcagacaaccataaaaaggaggtgacttgattagtgatgaagaagcaaagaacaaaatatacctgataacagactagttgagagtcgccatatactatgattttcttgaaaccatgcctaatagcatatctcaatcctaagatcaggccccggtattcagcaacattattggtaacaataccaagaccctcgcgaagtcgagatatcttcaaggataagtaagcacatgaaataaaagtgaaaaccaaccattaaactttgaagtgcattaagtacttaagtataccactctcccatcttcagtcataagcacagccccagcacccgcttttcctggatttcctttcgatgcaccatcgaagtgaagtaagcataccatctgaaaaaacagataaggtgcaaaacatttatacgagtaaaatagcatgtattaatgaccaagtagatgacttctatgcaaggtgaggtgaggaggtaaccctatggcaacataaatttctagctccacagtttgcctgtagatgtgacagttggattaataagtggaaaacttacatgcaggatctgagcacaattgaaacaactttaagggttaatggcctcaagtacatagattattaaatttattatttcatcatccatttacaaaagattctgcagtaaagcatcctaaagagatgcaagaaataggcacagttgaatagtaattaaggagttaacagtcttaaaagaatgtcttactgatacgacagccttatcaaaacgattctgcaaagcacacctttttcttttggagaatacacaggagataaatttttttgtgattacatggaagatgcacatgcacaaacaccaccacacaagcacagcacacttgtgcgtgtaccccttaacgcagttcaacaggcagaggcccatggtaaatctgtgagcctgagtgtgtaagtggggacatcaagatttgaaccttagtgggcaaagccatgcactcacaacgcatcttttctataaagaagcaacaggtactacaagcttgaaacttcctatcctaatcatgtaatacttattcatgttggaaaataaaaaacctgttatttccttacagataagatgtcagaagttaattaatgaaaaatgaattagtggcagaacatgtttgtgatagtaggcctacctggtcaaaacaatagaaaaacgaagctagtgattaagagcattcaatacaaaagcatattgagcattcatatgtttttctgtttaatatcgaacttaattaacacaacaccttgaatagcacattttttaagaatgcattatagctttagaaatctgataagtcaaaagtattgtagtagatgcagaaaattaatcagcaaaacaagaccaaactttacatattgtttcgagagaggttgtgcatcaacagttccactctgatcaagattattcggtgagaaatggctggaagaactaggtcttgattcctgcaatataaggccatcatattattccaagtaataacaagtgtcttgaggatcaacataaaataacttgaagaatcagtgtatcctttattaagggttgtcaggaacatatgactacatgcaaatgcatttcagcagaacatacatatgcattgtgataccatattaataagcatgaacatgatgccctgctcaaattaaaaagaaaaacagaattaaatctctttatgcatgtgtatgcatgatggaagccacatggtaactcatgattatgtgctcacgcgaatggacattatacactttaaatgtgtatgtactggtgccaccgtcctgcatttacatgtggttaggaagcacttaatcacatgctctgaaaatgaagtgtgtacctaatttgcattatcatcacctgtgccaaatgttgctaccagggaaagtataaactagaaataatgttcattttcctcatattcactcgttatgtctagtggcatgctaggcacatacatacgcacactcgcagtctcaccatggtacttagcttaccagcctgttaaatgcttgtccccgaacagagtagccttggttaatacgctggctatagtgctcagctgaggcttgaccagatcccacggcatcctgtaataaagcaggatgaggttttatcactgatatcttgaatgcttgcaatagcaaaacttacgtagttcagatccacggattgtgccccaggctgatatcttgtattgttaaggacacctgtatgatttagagctgattgatttgaactagaaacagttatctcctacaaaggaagacaaagcatgagtgaataaaaaaacaaagctagttttttttttaaaaaaaattatcccattacacaatattggagcttatattaactttgtcagattcgacatgtcatccagagatggaaaaggcacatataagtgtgttggcacattacctgaaaagtacaggggataagggtaccaaatagatcttccctaagttcagctgcattgattacatatgtagcattacttaacccacgcgaagagaggtattcctccttttctctgctccaagagttacccttgtaggcacttgcagcaggaccagataccttttgaaaacaaatcagcaatctcaagagttactgtccatatacaaagaaagaagcatgaaatttacagtatttataatcccagaatgtattacagacggtgggagaagtagttttcagaggagttgtgcaattcttacttgatatttgaaaatagaagtaaaattcaccaaaatgttgatagttttttagtagaaaacgtgaagagggctaacgttgacttgtttcatctcccttcagttaagctaacgacatggcaagatagaaaaacaatccattcaaatgaatatagaaaacaaaccacaaatgaatattcaaatgaatatagaaaacaaaccacaaagttaaccctttgatacatgaagatacgcaaattgtgttaggaggttgagggagcaaggataagtgcaaagttgcataaacaacttatcctttaccttatcaacaggtaggatcattgtgttctttttttaaaaaaaaaaatttcacaacagcaaaaccaaaaacttacactataaatgagaaaaatggatgaaaacaggaaaacttaatgtacaatcacaataacattagtacaaatacacataccgatgagcaaatttgagcctggcaatcatttaaagatttgtaaacagctaccatctcccccttcctgacaagataatagttgctgccctcttccatcgtaccaaatgcaattctgtcaaaaagatgaagcacaaatgaagaagatcatttcagtgcaaatgtgtcatcaagagaactaattctagtagctacataagtgataagtattgcaatggtcagttacgatgccggcatagttagagaccagcacgaacagcagcagcaggcactcttgctacttacccgcacagctgcacctgcaggaacgctagtggtcaccccgcacgaccgttgtcggcgtgatctccagaagagagtgctccccagaggccagtgatataagagatgccttatgtgaaaaaaccagtgcacaatagtcttttcgtatatgtatttaagttttagaaaaaaaataaactaaaatggggaaaatacctagatatgagcctattgtagctacttttacgaaaacaggtgcgaatcctcaattcatacaaaaataggggcaaaccctgaaggtcccctaaaaatagaagccctaaaaagagaagcgaatactcaattttcccctggaaaataagcctaaactccatcagatcatcataataatgcacaaatgctaccccgaaacgttacatatcaacaaaaacggctttctctaactttcacatattttaacccacttgagaccaaatgctgctgtcagtctaatagtatatcacattacattcgatctccaatggccaatgcaggtgcagctgtacaacagtacaagcattcgaatagatctcctaactttcataggattctacgcggaagggatgctgggtttaacaaccaatcggaatcggcgaacccttgatcctagggaggattaggatacctgaaccctgccggagagggcgacggcggccagcccccgagcgtgagctgccggagcgagggagggcgacggtggagcaccggagggggcggcctggaggagagggcgacggagaggagagcagagggaggcggcgaccggctcggagcccgcgagcgccggccgccggagcgtcgcgccgatgagcggcggcgcagtgagcgagtgggccggcggagtcggaggaggaaatgcgagggtttggctcctcgtgggccggtcaaaaaaaggcccaatctgcacggggtcacgggaatattcggtcctgagtcagcacgccacgtcagcattattgaaaaatatatatatatataaatctaagcttctgttaaccctttgcctataagattaattagttctcaaatttagaatttttattctttttgaatttaattttaaaaataaatgtcaaaaacttatttccatcatgaatgttttgtcacgccaatacttgcatgagaaacaacactaccatattatgagaggttggtcttgcaatattgtttggctcaaagattaagatttagaaataagttttttgattggtttatttttaaatcaaaaaagttgttttaaaaaaactcaaagtgactcaaatatggtctaggtcaagtctttgtatttaaatcgtgaattgaaaaggactttctctaaatctttttatataaatcatggagctaatccgtaaacaacttccatgcatgttgcactttcaaccgtataaataataagaacaagtttaatgatagagctcattacaagctataagcttattgtaaagctatagtttatataagtctaaaacttaaacctaaatgggctgattttaccactagaaatctaaccaattgagttatgctcactcagtgcataagaatagattggagatgcagaatgacaaagttgaatgattttgtcatatgttgtggtcatacgttgttgattggtgaggtcctcaaaacacaaaaaggaatgaaccaaactctctaagctatatatgttgtcggtgatatgggcccggaggtatcgtgtacacagggaggaggccgcccccaaacccccgtggcacttccccaagggggtcgggcccaggatggagcggcggctatcctctcctagttgggggtcgggccgccgggggtcgggccgcccagaccctcttcacgcacctaccaacgtgcgggggttaagtgggcgcgcccaatacccaactaactacatttatggtggatgttgtggccgtgctgcaccgcatttaatgcggcatgcgggaatggctgacaggccgagtgagcttgattgaccagcgtggcagggtgagtgcgcctgccacgctgactgcctgtgtactggcccgttgtcaagcggcgtatggccggtgccgtctagtcacatcaccataataagaaatccctcgccccatgtgcaagccggagataatttcctactctaatttaaatcagggtatccaatccctagtgggaacgggtacctaaagtcttaagatggtagatggggaatgacgcacacgtaccccgtgtcacccgccgtgatttgatagggccatgctggagcgctgaaggcatgatttcctttgtcagaggaataagacgtgtaataaatgtataaaggatgtcttccttcttctctaggtagaccgtttgggcccatgtagtaaccccttgaggtataaaaaggaggtgcaggcctggtgagtgagcgatcgaacacattctgattgaaccaactagtacactgtgtctctcacagaaatcaagcacacgcaggagtagggtgttacgcttcttagtggcccaaacctgtataaacctcttttgtctcatcgttcttgaggggcccgaccccctccacatcactcctggcaccgaacctcgattctaacccgctgcccccggtcgaactgaaagggggggcccttagtcccctgctccaggagttcaccctctgacatatgtgaatatcctaaccctagaatagggagatgaatccttttttttaaaagataatggatagaaattcgatctatatatccaaaagtggatatacacagtcaaatgttacacaagtgcatatgccataaatctcaaagttgagataaatgaaaaataaacaactgaaaagaaaagaaaagaaaagaagataaagagaagactaagcctcaatcttttccttcatgcttcaaaatagggaaaagcgacagctagcccgcccttctactgccacaccttctcaatgacactacatacaccacaaaagctcattcatttcatcataagcaaaggaatgggacggaactagtccactcagcccgccgaccagtctcacgtccctcggacaacctatgaccccacatcacaaacaagtccatgcggccattccattatcatcagagagcaccaccttaccaccattgatgccaaataacatgacatccatcacccccgcaacgtgaatgagcttgccactaccctaccattgttgccgtagagcctcacatctgccgagccgttgaagcttatctcatgaaaaaaccgatgccaccacgctatcgtggctgcaaactacaacctctgttgaactatcgtagcttatctctccagagagccattgccgccactccatcctcgcataccgtgaactccaatgggctgccaacatagccaatcgccgagtccaacgtgcctagctcctatccaacttcttcaccgctagccgccgcccaaccggcaagcctctagctgcctgcaccgttcgcatccaccaccagtgctccgcctgccagatccatatgagccacctgcgccgctaacatctccacaaacgaaatgaaggagaaggcctcgccgccgccgtcctagcggcgaggaaggtggcggtggctgctagggttttttttttaggaggggaagagttgggagggcagccaaggaatcacagtcgggagaggaatccatgttatctcactgcatttcttgttcatgaatataactatttctaacatttaaaatttatccacaaatataagcatttatagagtacaactccctcgggccccggcccaaccaccctcttgttatccaaattttgctgaaatttgtgtcgaccttaacattaatttctgtttaaactcttatgaatgcttatatttgtgaatggaaggagtactaaattacacctaatgggactaggtggactacctttcagagatgacagaattgcttctggaatggaacaaccaactcaccaaacaacgagatgaacatggaaacacgccgctacacttctctctctcacaggaaggcgagaagcatggaatgcttcccctctacgcagtgccccgttaaaaggggcaaagccatcgcaacgctcctgaacatatcagaaccaccactggagctcaccaggacattgctggaagcagatgcagactcagcattccagccggacagaagagggtccttcccaatccacatcgcggcctcggctgcaggtaaggatgcaagcgggctttttttttcccgcttatcccacttctagtttatttttacttctaaattttgtactactgtacgagaaataaactagcaaatgggtttttgtgcgggtaacgggactacccacttgtatcccctagctgcaggtcggctctcggcggtcatcgccttgctcaccatattccccggttccgccggattgcgcgactccgatgggaggaccttcgttcatgtcgcggccaggaagaagaggtacagtgttgttgcacacgcttgccagacgccggcattgtcagggatcttgaacaagcaagacaacgaagggaacactgctctgcacctagctgtagaagctggggattggtggattttcgcctgcctgttcgtcaacaagcaggtggacttgaacttaccaaacagtagtggacataccccgctggaactctctattaacactatcccgacaggactctactgtctcctggtaacacgtcgaattccaaaaattgaatgctttgttctcacatgtttggtaaaatttgagaaaaaataagagaaactaagatttgtacctcctctctgcagaactcgcggattttgatacaggaaacactgatagccgccaatgctacccgcggcatttctcggatggatgctgctggtacggaagaacacggaccccaatctgaagccgagaatgaggaaaaagggtcagaaatagtactacctctatattatattttaatgtatgacgccattgactttttgttcaacgtttgattattcatcttatttaaaaaaaattatgtaattattatttatttaagtgtgacttaattcatcatcaaatgttctttaagcatgacataaatattttcatatttgcataaaaaatttgaataaaacgaatagttaaacgttgataaaaaagttaacggcgtcatatattaaaatacagagggagtcaaattcgacgcaatttctcagcgttggcttggtcttgatcacgacgatggcgtttggcgccactttcgcgttgccagggggttacatagccgatgaccacgccaacggaggaacgccaactctagctcgagcgaagcaattccaagggttcgtgatggcaaacacgctggccttcttctgctcgtcgttggccgtcctgagccttgtgttcgccgggacaccaacggtagagttgccgatgcgctacacgcactacaatatctccatctggctgtctctgaacgcggtaggatccttgccaatagcctttgcaatagctgtttatatcatgatcactccggttgctgccaagacctctcctgcagtcatcgtggtgattctctcggtagggatcctccattccccctcgataaccgagaaatttactaagcttttgttggtgctatgtgttagaccaggagtattgccagtgttaagatctagcatatttaaggtaatgttactcatgttttggccactcatagttatcattggttggcaagagttttcatcgatgatttgaacaagaggactcaagagtgatactgtgatatatggacatatttcttgtgcattctgtaagttttttcgtctcgtttgaaatggacatgctttttatgaacaatgcataagatcaaggagaggagggatgatttatgattcttttttccctgtttccataagagaatatatcatagctcacaacttcgttttctctgagacactctgctgtgcaactataactagagcagtgcctagcaaatagcaagtgtggatataatacagaagaaatcactgacggttcaggacagtaaaattcatgttctaagttgcacctttcaaaaccttcaagtcctaagtgtacaaaatcactaccaagatgcacgttaaactagagtatgatttagtcttgtttatcaataggggccacagaattatagacacacctggaattagaataataaggcaagtcttccgcaaaatcaagcatctcgattctcgataaagagcaatggactgcacttgagacttgacaaaaacagagcatcaatcaggctatcaaacttgctctaaccctcttcctgatttccatcaaacataagttactccaagttagagataacaagaagaaatgcttgcatatctatggaatgcaggctacacaaaagaaagctttaagcttcaagaggatatggacgatcaagagttgcagcatgtgaaccagtggctgaagaat

SEQ ID NO: 2295 - DNA, 5552 bp, Oryza sativa
cggtggctcgggcacgaggcgcgagtgcgacaacgcgacggcgacgacgatggcacgcggggctcaaggcggcgacggcgcgacggcgacggcgatggcgcgcggcgcggggcgcgagctggcgcgcggcagcggcgcgggcgacgacgatggcgacacgagcggcagcgggcagggggaggaggagggctaggatggctaggaaccaaatcgaacacctagggggctaataaacagtgctagccggctatttttgtttttagaaggtattttgcaattaggaaaaatatactattgccactaattttgtcacaacataaaatacaccaagtctaagttattccatcgaaatttatatttaaatttaatattgaacatattcttattattattatatatttttcaaagttttcctatttttcttcttttagggttttggttgatttataaattgagaaaagttgcaaattaaatttgtatttactcctaagcatttgggtgaccgtattaagtgttcaaatgtgaatttgcccaaaatttaatattgtccaatatttaaggtttattaaagattctataattttctaatgagaccgttattaacacattagcacattggctcaatttatttatatgttagtttattttatatggaggggtttaatatattaaatttcaatccctaaatgcaattaggaacttggtgcaatatcgatctacatatcgaattaaatactcccataattctattatatatagagagagctcagtttatttgaatgatcatcatttcatgtgtactcatattatggcacccacctatattattcaaatattttaatatttgataaaataggttaataataacttttcttttatttgattttaatatcttgtgcataattatttgtaggattaaatatattcttgtaaatcatatctattgcttaaatgtagttcttttctttactttcttggtgatcatttatggtttggcaagtaataggaatcataacaaccagcatgatgcaaaagttttaaaaagttcaaaattttagtgatttttattgttgggaattttcaggatgttacagtagctcaactggttaggtttttacggtggaaccaacttaggcatgttcaaattctagacttgatatgggtgtccgcatttatgtggtgagcggctgtgatgggatcgttttcttcctcaaaattttatacctcacaaacgaagttaaatttgatttagatttttacaaggtttccttccatcatctgatctacacttggattttttgcgtgactttagtttgtcatggttttcacgagttttcagcaaatttggggtttctaccatgtattttacctatttagtaacactcaaagagatagaggcccaacattaaatctgcgagtctagctaattttgttttttgaaagtccatcaacatatgtgttactggtgggcaccaatatgcaatccggctttttaatcatgaaattgtatggtactatcactatatagagcctcatcggttccaaagttttgttataagtcgtaacgacttattagtgataaaaaagtattttgtgtttaaaatttttatatatgtgttcttagcagtataaaagctaatgttgaaaaaaatacgtcaaacttcaaatttagtttgaaatttaaattttggctttacttattttttttgtctaggggtctataaatgtaaaagcttcttgaaattcatacaataaaataatatttctattacaaaaggatttagaaaaggttgcatgttcctgggctcaacacgtgtagagaacggttcaacattttatgaacccgatgcttaaacccaagtagaggttttcagaaaagtggacactcttccgttaaaaaaagaaaaaaggaaaagtgggccgggccaaattgggccgttccgatgttccaaggtcgggcttcttccagtcctgcgccaacatttcaacagggctacaaccaatgcaataagttcaccctccatcccttaactttacaccgagtttgttagatatccctaaattatacaaaaccgtgcaatttagatcccgtagcagtatagatgcctggtttcgctgacgtggcatcctagtcaataaaaaaataaaaaaaaagcatgtggggcccacatgtaagtgagagaaaagtgggaccgcatctcttctttcttctcttctcttctcaacttgcttctcttctcaggacgtcaccagcggcagatgcgggagaggcggccgaggcagagcttccacagtggtgacggcagtagtggatcggatgttgttgacgtcgaaggccagcgccggggacgcggcatggacggatgagttcgccgagttcaaggtggggcacgcaatgctggtttttgagcgactccgtggcgttcatcgagggcgggtcgtcggccctagggtccgacaacggcgtctgcgacggcgatgacaagctcgccgcgacgcagacgcgctgcttcactgcatccagctccacgcccacgaacctgttggtggcgttgccgttgagggaggcgttggtgaggccaaggaacccatagtggctaccaatcactctcttcaccgcggcgccgggtgagaaggaggtggaggtggaggcagaggcggaggtggaggcggctcccgcctcgggagtggcagcgactgagggggcaggcaccaccggcgcgtggatccagcagcccgccgccggccatccccatctaggaagagaagaaaaggaagaagagaagagggcggctaacatgtgggacccacataattttttatttttattttgctaactaggatgccacgtcagtgaaaccagagatccatactgcaataggacctaaattgcacggttttgtgtaatttaggagtgaaaatttcttgtattgaggattagatgtcatacaaactcgatataaagttgagggacaacgggtgaacttattccacatccaattaacagcgggcacaagctagccctcgatccattaaaaacgttattactaaattttacttatttatttactagcactatgccctagcttggtcattgcacaacacacaaaaaaaagtctaggtcactaatcaattaggtcaacttaatcacttttatttactaaataaagaaagcatcacgatgctcataggacctcgcattccagccagttttccattcttctagcaagctctctgattctttatttcttatgaacaccgtagaaatattactcctaccttgcttaagctacactgctaatctcctagtacatcacccacactgtcaagctagctacacacacctacgtgcgcacgtccgctccgatggcggcgagtgtcgtgtccgacaagtccagcggcggagcgagcttgctccggccgtcgcgggtcttgttcctcgccgtgctctcgacggcgttctggtcggtgatattctacgcgcaccactccgccgtgcaaggtaacgcgaccatggcgtccgtcttgctccggccgtcgtcgttctcccgcccgctgctgacgtcgttccggctcatcggcggcgggcttgaccggtgcgccggccggcgggtgtacatgtacgagctcccgccgcggttcaacgccgagctcgtccgcgactgcaggctgtactcgaggtccatggacgtgtgcaagctcgtcgtgaacgacgggttcggcccggcgctccccggcggaggcgcgctgccggagcgggacgtgtacgacaccgaccagtacatgctggcgctgatctaccacgcgcggatgcggcggtacgagtgcctcaccggcgacgcggccgccgccgacgcggtgttcgtcccgttctacgccgggttcgacgcggcgatgaacctgatgaagagcgacctcgcggcgcgcgacgcgctgccgcggcagctcgccgagtggctggtgcggcggccggagtggcgcgccatgggcgggcgcgaccacttcatggtcgccgcgcgccccgtctgggacttctaccgcggcggcgacgacgggtggggcaacgcgctgctcacctacccggcgatccgcaacacgacggtgctcaccgtcgaggccaacccgtggaggggcatcgactttggcgtgccgttcccgtcccacttccacccgacctccgacgccgacgtgctccggtggcaggaccggatgcggcggcgcggccgccggtggctctgggcgttcgccggcgcgccgcggcccgggagcaccaagacggtgcgcgcccagatcatcgagcagtgcaccgcgtcgccgtcctgcacccacttcgggagctcgccggggcactacaactcgccggggcggatcatggagctcctcgagtccgccgcgttctgcgtccagccgcgcggcgactcctacacccgcaagtcgacgttcgactccatgctcgccggctgcatcccggtgttcctccacccggcgtcggcgtacacccagtacacgtggcacctgccgagggactaccggagctactcggtgttcgtcccccacaccgacgtcgtcgccggcggccggaacgcgagcatcgaggcggcgctgaggaggatcccggcggcgacggtggcgaggatgcgggaggaggtgatccggctgatcccgaggatcacgtacagggaccccgcggcgacgctggtgacgttccgggacgcgttcgacgtcgccgtcgacgccgtgctcgaccgcgtggcgaggcggcggcgcgccgccgccgaggggagggagtacgtggacgtgttcgacgggcacgacagctggaagcacaacctgctcgacgacggacagacgcagatcggcccgcacgagtttgatccatacctgtagctggagtagctttaatttgtagcttttgctcctactaggtgtattatttcgaattgaaaatgtacttgatttttgttaagatttcatcgcataggtgaaatctaccagaaaaattaaatgtcatccgaaagtctaatcttcagagaaaatcacacacgataaaatagcttacgtacctttttttcagctgctagttagcggaatcatgtttcgaagtactccctccgtttcgaaatgtttgacgccgttaactttttagcacatgtttgaccgttcgtcttatttaaaaaatttaagtaattattaatctttttcctatcatttgattcattgttaaatatattttgatgtaggcgtataattttacatatttcacaaaagtttttgaataagacgaacggttaaatatatactaaaaagtcaacggtgccaaacatttcgaaacggagggagtatcaatcaatgtagtgaacatatcacacggtgaaatctacctaaaaaaaaaaagcttcctaggtgtatacgcctaaccttcagatatcgatcaagtgacgaattctaaagagtagagacagccgccacaaatttggtcgcctatccatgtacacgcagtgtgctttgctagcactgcaatgttagtgcatactctactaaattacatcata

SEQ ID NO: 2296 - DNA, 30967 bp, Oryza sativa
tagaagaaaggacaggcaagtccttctcaattcagtagcctcagttttagaaacattcattcccaatgtgagcccgtctagtaaaacaaggaacagaccatgtattaaagcttgttgtggaccaagatttcgctctgtcacattgataaatgaaatccaggacaacaggtctcgtattgtgagcattcttccagtgtgcaactggttgaaccacatccagaaattaacaatacaatctccaaagcaagaaacctcagcatttgtgaacctctctatagctatgctcttaagttcatcaacattagtgacagcaggaacccacacttctgtgaaacgatttcttaaagctggagaaagctctttctttccatagtcaccacctggattcatcgtcgcaaggataaagaagtttggatgtgctactactttctctagcacagaaccacccttctcagccagtgactacaacagtaaaagtaggagtaaacattaaaatgaaactgaagttcaaaaaaaagttgatattttaacacagccttatgaatcaaagaatttcacgagtggatagacaagtgcatgataagatagacaaaggtacagtcctcacaaacaataacaatcaatgtagaggactagaagtaatcttccattgcttaatggtgggaccaagcaacaactaagcaaaactataaatggcttgtatgactcacgacaaaataggtataagatgcagtatctgacaagcatcttgtttagcaaggacaaaaaagaacttcaatgaagtatggtgtgtaagaaatatgtatcctgaatatttaaactgtgatggttggttcctcttaattaggaggtaaagatgcatttggtgatgtggtaggcttctgaaggtttacataatctttcatgttttaattaagtattaacaaataggaaacatcttacattgacctgcaacagaaatattttaccagaagttctaaggacttcctatacgtgggttccaaagcataccacaaactggcacataaatctataacatggattaaaaccgaacaattcagcaatgcacagattacctgcaggtagattgtactatgtccctaatagttatgttaaataggattgtttctattttatatagtagttctgtaaagtacacaactttattacttatgcccctaatgtgcaatttgatcaattaaatccttcaatctgcaagcctagttccttttctttaacataattatctcgaatgtagtgtgcactgctactttactaaaggataaagcatagagttcaagcagaaaatagcaacccgaaaaagacagcataccaattttctttcaggttctagaacactgttcagtcgttcaagtacgctatcgtcagctaaagaaatttcatcaattaggaaaagatcaccattcttcattgcttgcacaagcgatccatcctgccaaaggaaaattgcctgccacctcttgtgaagttgcatcaaatccaacttaatttgctccatggcggcaaaatcatgaggtggcacttgtgggaacagttccttctcctttatgtatctatcaagtatttcatcgatgtgattcaccacactaacagctccagatatatcagcaggaaatgactgcacatcatggaaaactagttatacatcaaatgtactatatataatctctactgtttaaaaaaatatgatctgggtgatctgttctatgcggaatcattctagatcttatatagacgaatttacatagacgtgtgtgttgtaggattttttttgtaattgcatttgcacgtgtacatgtagttttcagtcaatagtatgattatatgcatgctttttttcatattagagtatagttatattatattttgagacttatctcaatacacagggatgaaatatcatatgccagcaccaaaggaacataccatatctcctgcaacatgaatgaatattttcagctgcttcatttttgtaatcagatgtttgaactccatcgctatttttgacctatcacgtataggacagaatccctgccaataacagtcaaaacatgatgccagtgaaaataatgctaaagcgtgaaacaatgggatataacaaaacagaatcccagcaatgatttcgagataacaacccaccccaatgaaatctgaagtctcggtatattgatggcaatttaaaatgtgtagcttcactccaaggacagcacttaggacctggcaaacagttgttttcccacctccagtttcaccaacaaggaggacaggttcacgtgacctgtaacaacgctcaatgaggaagtatagcctccacatactttccgtccaagtgatgctgcaagcatgtacaaatacatattgcatcagatgaagagaagttaaaaggtgtagtatgttatatgttaaagtataaaaagaactcactttccaaaggtttcttgtactctcagtcttatagattcacgtgacaagttattgtcacagctgacttcctgcagtcacaacgaacctctcaatgatacgacagactaaaaggtcttgttgaagttaaatgtataaggattcaaaagcattgtgaaatatttcatgcaagaagtaatatatttgaaagagactttctgtagtttccaggcgaatgcacatgcaagagtaatcaaagagaaaaacttaggctccctatagtttgtgtttcaactcgttgttatgttttcacagtaaatttctacagtagcttaattaataggcacaacacactgtaatgcatcaaccacaaactcaatgttcaaacggtgctcccatgaggtctggctgctttgacgtcctgcaccacaagctcaccctttgggtatcgttcccaacagttagccaattcgctggaaagaggcaagcagtgaatggaagcatcaagctcccctaggcagccttggctgccaccaaaagatgaacaagctcacccttggtcagatgggaatgtcaactaagtgaaatagcaaacatacaacaaggtgttccagtagcatcacagtaaccgctttcaatgtatgatgaactaaatcaattccaccaggagtaaattcaatatcttgctgtgggctaatggtccagtggcttattttttaaaaaaaaaaaagagcaaaagtttttatcacagaggggtgcagttagcaacatcttctatatatttacaattttgaacccactaagtgcataaaggtattttttgaaattgtttagttagaatgccctagctatatagtgccagcatcacacatcataatatcacatcagcacagcaaagtgtaatttatgaataagcataagcattttttaaacactaatcgtcatcttccttaattagattaggcaaggaggttaacgaaacattagcaatatatcataaagaatgaaatggtaccatgttgtagagattggagatactgagtttaacatgaagatgtcgttccaatacttcttgaacaacagctttctcagtgtcatcccttaatctctctgcgagaagtaaatagccatctttagctaggtcttcatatgacttcccctcaaaaagtctgtaccgatttgcccagcgaaataaatcccgtggtgtaatgaaaccatgtttgccagcaaagactctgctgttttgtcgatgtgtttgtaaatctttcataacttgaaccattcgtgtggcataactgcaggcaattgaacatctctgctccaaaattgtgattagctcatcttctgggatttcatcaacatgcacttcaataaaacggttgcggaacgcccgagacaatattttacgtcccccatagagcacaggtggattttgagtagcaaagagcataaaattagggtgagcaggaatggtctcctgaagctctggcacaaagagctccctgttgtcatccaacagccgatttaaagcttccaagacatcagacggtgcaagatttagttcatccaacacaatccagtgtccctcacgtacagccttcaccaaagcaccctcctgaaattgaagcttcccatggctgtcagtaacatatgtaccaagatattcttgaagatcagtatgctcgtgattgttgatacggacaaattcatgaccagtttgtgctgcaagaaacctgacaaggctagttttgccacttgatgtgggaccttgcaggagaacagggtattttttaatgtaaacagcacaggcaaggttgacaatgtgctcagtgacactgttagttaacacatagctacgcaaaaagtcgtcagattcagaaccatttagtagcttaggcttttcaacgaagtagtcagcaaatgaaattctaggtggcactcttccatctaacaaaagagatactatcaagttgttgatgatttttgcacttggggcatccagcattgtaagaaagaacatacagaagccatcataaagagctttcttgaagccaaattttctctctgcgtttttaatataacctaatgagcgagaaagagacctcaaactaaattggggcttctgattagctccatcctgcagcttctcctcagactcctttttcgctgctttatagaatcgaacaatgctatctgcaactcctttagcagcatgcaggccatccagatatttactgacaaaaagacggagatcatcatcatcaataagatcatctacaaagaattcagtaaatcggctcctaaaggtgtatggcagctctcttttcccagcatcagttgctggattcatgcatgcaaacatccggaaacaaggatggcgctcaatatagtccacatcacccctttcagccaggcacaatgttccactctctccatccagtacagcgccaattctctgaagagtctccggaggtgccaggttaacctcatcaagcaaaatccaatggccatttcttaaagcagatacaaaagcaccctccacaaattgaaatgacatgccaatttctgaaccaatttgactacaagcggcatttagcctggatgaaaaggagtcccagtcagaaataacttgggcaggcaagggcctttttctcttcgaaccactgttagacctagaactcccatcaattagcttctgagctttctcaacacatttttccaaagcacgtaataacttcttccattttttctccattacatacacatcacaatggcgaagaatagcttcattgtcctgaaaaggttaaaagtttggtaaataagaagaagatcaagtcttcaggcttctacagcttatttggtgcagttaaatcacccctgtgccagctgaagtctacaaaagtagactataatacctgctacatttaatttctagggcttatctaatactccctccgattcatattataagactttctagcattgtccacattcatatagatgttaatgaatctagccacatatatatgtctagattcattaacatctatatgaatatgggtaatgctagaaagtcttataatatgaaacggaggaagtacgtaatagagtattgaacttctaatctactggagttacccaataaactagctttcaagctaacagtaaataaggtcaagcagacacacctttccagaaaaacttcgacaaaaaagatctttgaactctatataaagaggaaagcatattgatcgagcatctgcaggcttaaatccaccgagaagatcagaaatatcgctttgctggctcaagttctgaaaacaccaataaaaaatattagcacattataaatgtcaaagattgtgagagaatgtgtaacctgcaatatcaccactgaacatttttgacattctacattggtcacaccaaaagtgggaactcctaccatgttgcaacaaaaaacaaaaggaaaaaaaaggttccttgacatttattctagcaggcatcatgttgcaaatgacctacccatccttagacctgctctctgtcaatgcaccatgtacctgattctacaaggtagtgattgcaagggctcaactactagataatggagtaaaggaatttaggagattatggcatttatgtaatattattttgtttgcagtggcatagaggaaacaaccaagtgaggatagaaaaactcaattaataaatggtttcgcggtggtaaatatcttgagtaggttatgtaactacttgtccgtaccaccacagtaagcggctgtttaagccaggaagcaagattctgcacaagagtagtcttcccagtgccagtttcaccaacgagaagaacaggctcattgaactttattgagcaggctaccctctcaagaacttctaatgcacgccgaatatcagcaaaaggccctttctgaataagcgcctgcatatttgaagcacagtatcagtaaagtagccccaaaagaagttctgcaaatatgcaccagataaagatcggctaattactggtttgtcgctgcactgcagagtaactctaccaacttgcaagtcagtatgccgagcctgtgtattatgaatcattagttctacaaggagacaaataaacaaggtgttgtatataacaataataaacacatacctggataatgggcttgtcagaaggacttatggtttctgctccatgggggacacaaaatagtttagcaatttctcttgctacatatagccttttatccagagatgacaaagaggaagcaaaaatatcaacagcctgaattgaaaaagaaaaagagaaggagaaaaaggtgcctgagagcctggaaaaccaatggctgaatacaacttcaaggaagttacttatcaatgttcatgaacaataaaccatcatttcatctaggaaaatagaacgacaatattaataatcatgtctggaaaatagtttgttttaatacaggcccttacatttgtgacaataatgacagtacacaacttagtcactgttctgaaaaggtggaccctgggcagactaggtgccacaccctgccagcgacctagctctagaatattaaaatagtcctctaatgttatgtaaaattattgtgaactttaaaccctttttggctcccaggaattaacaaccatacatgggctcagaaatcaaaccagaggatcactcttttagtactccctccgtttcaggttataagactttctagcattgcccacattcatatagatgttaatgatctagaaacacatatatgtctagattcattaacatatatatgaatgtggacaatgctagaaagtcttataatatgaaacggaggaagtatgttaggaaaggtccttaaatctaaatttgaaaatgaagagcaataacaaaatagttcacttccataatgctatgttcctaaaatcagaataatactaatattgctattcgtcaaagcagtcttttgatggcatcaaggcacaacttttgagttttgaccataagtttttttttttacaacatagtgatatatctctggagagatgataccatttaggtttttatgactagaccaacccggatacagagtttaaaatgattgactgcagactttccatgatgacaagttgttgtgatcaagggaatatcaaactatatcaaaaggaagagagagcaaaaacctcaaaataaattaatttgcaacaactagatgacaatcctaggcccttgaagttgagatcaactccacgtattctcttgcaccatttgagcaggtccctggtaaataaaagttgtgaaggccgttcttatgaatggacaaataaagaatatatttcaaggtatatgcaccttaaggaaaatctttgcacgagacattcagatgaacctccagctaagttgagcccaccaaactggtaagataccagcaaattggccttttcaaaggtatctacaatacatataactggttattatacaatcacaacatagcaaataaagtaatagaagaagattgcatctaccaatgagtttagcggagatagactccaagcttggatagcacccatgaattatatcgatcatgtcttttcggttaggttcacccaccataacttttctccacagagcactaaaggttagtcttcctggttgaagaaaggacaaaaattgattgcaaattagcacagggcattaatttggtccttattgtgagctcgtggaaatgtagaaatgttattatggactgaaacataatatgcattagttattctgaagcaaaaggtgtaaatcaatagttctatgcaattttcaagtgcataactgcaagtcataactttatggaactattggacaaaccttccagggcatgtgaaacatcattctttgaggtggtgactgtagcaaataaacgaaaattctcagcaacttcaactgcctgcattagacattcaaactagtaaagacctccaggtagttggcatttatgaaaattattgcaaattatttctgaggtttgaagatataaagagaacctagagaaatagttcacctttcaaattataattatcttaaacaaaataaataaataaataaataaataggatattttcacctctgcatgaccaaccgaaaaagaacttgaaccttccaataaaggtaataagattgactgcacatcactgggtgctttgtcaatgtcttcaaacacaatccagaaacctttgataacagcctgctcatcacagtatggtcagagaaatatatgaaaataaaatccaatagtaggattatactgtgaatagcagtccctacagcacagacctgagtaagagaaccaggagaccacttgaattcaccaggtttttctgtgcaaacgtaacttcctattaaggtcctgccatccatttgttcatccatgtggatgaagagcactgcaaataaaaacatgcacagaagattagcagcattattggggatagcgtgattagtaaagaaggcctagaggtatccaagattttgaacaaagtagaaaacataaaaacatcgtcattgaatcatcaatgccaaactgagctattcaataataaaacaagaatgactctgacattatcatagaaaacttgtaagttgttaaaaccagattgcgaatgcaactttctcagatcatatgcacaaacaggcccaatgaatcttgcaactaattttacatttactcaactccctcatttatgctctgaagaaatgataagatcagagttcaaccaaccttttattctgttgtgggaatattccaaatgtgtcacattataattggattacatactcttttttattcatctaacggcaatttttttaacttgcataaaatacttctagcagagtccataaacatatacctcaatttatattggttataaaatagaaagcatatacctcgatttccaccaatctgtgcaagcttgttaattagtgctgtttttccagcaccaacaggaccatagagaagtatgggccacttctggttaactgccattaaagctacctcgtaactctttctcaaagtagcagtgagcacaaatggactaacagagggaacaattgaaaattagtgtaagcaagatgagtgcagcgagaaaaacagaaaaatagggaaataaaggaatttgttcacaccatatattacttccactgccatgctgccgtcccacagaaaactcatgccaatctggcaaagaatcagccaaacaagtgagtccatctgcatcagttttacaatcaacttcttcggcttgaagatacaaagaggctttctccaaggaagtatctgtgcaaaactccttccatctaaaagcataaccagctattataaacttatgttgatcaacatccaggggaaacaatacaagaaaagaagcattagaaggaacctcaagaaacatgtaaatgcttcgtctgctcctagaccaaaactttcaacagcctcatcacttgctttcagaaccaccatgagtatttgtatagcgcaccatcttaaatccaacacaacactataaagtgaatcgtcaactaaactgtagtcagcagtactatatacaaggtctaaaaagcaagaccagtcccattgttcacaaaatactcttggctccaattctagaaaccgatatgatacttgggtggcatcaagcaacaaatgaagtccctgaaaacaaatgaaattaactgtcaacagtcaaattattaagatcaactgatgacccagtaaaagttggaaagttggaaattatgggatcctatgaaaaacagcagatcaacacataagcaagaggatatgtgtcaatggaaagtttacacaaaataaaaccgtagacaatccagaagccccatcgacataaaactcccaaaccaatgaagaatatgcagatatatgtactttatcatgtcgcaaatactcttcctaagaaaaatagcatgtaccaataataatttctaagttttaagtacttcaccaacgccaagtgcaagattagcaggagtgcttgccagtattaaggtgagcaagttgcgatagtggaatgaattatgatgtgcaagcattggtcagataaacaggataaaaaaaacaaggtttcaagaaaagaaaagaaaagtaaccgttgaagatgccgcgggggtgtgaagagaaagaactctcataacattgtgccaatgaattttctcaaaaagaaaagatttgaaacgtatgggtatatcagcaatgattaacctatttgtaaagatcaagaacatactaagttatggtatcaaggggaaaaagttcaataggtggattacactatttaaagaaaaataatacgcctcatcttttttgtgtgtacatcagtgagtgggttggaatacaccccagggactattgcatttcaaacaagctgtagactagacataagttttgcaacaacttaggggataaggcaaagacatttgcttaacacatgaaaacgtacaaccttgattgggatttgtgacggaacacctccagaaagaaacctttggaatggtggtggagcaaacttaaagtagtttagtaaatgcctgccacaaataacaacagacagttgttagatcactgttatatatatggcatatttccacttgcatgctgtagttgcatagagaatcgtaagtgaaatggtcaagagatgaaagaaatagtaataattaggtacagtttgatatagaatttatctaaactccaaaccaaatgtgcactctaattcattatttgtgagcacgtgtaaaaaaaatgctactcgacaaaacagacaaaccagtacgtacaggtttttgtttcaattctttgtcactgatcctggtagtggctttttaaattactctttcagtacatgacatactgaagcataaaatgagtaagctctaaacatagatcagctgctagcttaagatactgagggattttttaagtccaaacacatgttagcttcttactgatccataaaaattgcctgttgcctgtttgaggattccagctcaccagaattgcgaacacaggagagcaaacttaaccctccacaggaggcaaggctttccttcagtgcagtcacttgacaaattagacttttaacacaaacagacctgttgttcattatgtccccagtatgcatcgtctttatactatagattgagtacattagctttaccttttgacaaatgggctttcgagtggttatacatcaccttagaaaatggaataggcacatagctctccactcagctcgttatttacaagtgcacaacttttagtggttcgtgatgcctgtttgttatgggaacatatcctatgcattcaagcttcccgtgcacaccaactagccaatgtcacaaaaaattctacaaaaaattggacatttactcctaatagtattacacatatctgcaaagctcatattcaaattcattatgttttagccgtaacaaaaaagtgaaaaaaactgacagttttaagggtccatgtaggtgtaatactactggaagtatgtgtacaattttttctataattttctgtgacatttgctagttggtgtccacggagtgtgcacgggaagcttgtgtgcataggatatattcccatttgttacacgtgaaattgtgatcgggggaaatatggtgtttgactgtgttgaaccagaccatacatcccatacgtggcagtgttcatcaaagataacaaagagaaagagacgtgcaatgctgccccaacaatcaaacaagcttaatcgacatagccccaaacttagatgaactcaaattcaactggattttgtcagttgtcacaaatattggaactacataaaatccatttaaattgactacagagcatgaaggctcatcgatcatcatagcctatcaaggcttggtgcctagaagaaggggcatttgttccgcaccagattgatgaatgacgagtccaattctgtactaaatgcagctgcaaacactgcccggaacttaaattccacctaaccatggcacgaacagcatacagtagggggggaagcggccgtcatttttaccggagcaggtagggggcgaggtcgagggcccgggcgagcgcgaggcacgcgatctcgtgcagccgcaggcccctgcccctggacaggtagaactccacgacccggaggtccccttcccccgcctcctccccctcgcgggccgcggggtcgtccgagcgcagggcggctgcccccgcggcgcggagcagcccgacggcgcggtcgaggagggccggggcgagcgggaggaagcagccgacgacggggacggtgtaccgcgggtggagcagcggctcggcgagcgccgcggcgacgtcatcgcgggagggccctccaccgccggcggtggaggcgagcgcgaggacgcgggggtccgcgcgaagggccgggcaccgcgcgaggaggcgcgcggcggccgcggcggcggagaagctgccgtcgagcgacatggatggcggagccgcggggagaggggaacggttgggttttgttgatgggagtgtatatatggtgggaaggcggcgggtttagggttttagggggcggcggcgcggccggtcggggtgttgggtcgggctcactgcgtgggttcgtcgtttcatcagcaaccgacatggttgatcaaaatcaatccgtgcatttctaagattggacggttttagatcgtgtcgtgaaggaaaaagttctagtatattgcttttggaaattagatggacgatgtagattttataatttgaattgtccttgataaaatagttaacagataatcgtaattgaaatttacaaatccaatctaaatcggcaatacaaaatagaaagttttaagtatatctgaacttattatcatgctagttgttagaacatcagtaaggggacagagataggaatagggcaactagggcggtagccctactcctggtcctaaatattcattgaaatttttttttagaacttcaaaaactagaagataaaggcaaaattatataaattcaactgattgagctttaggtttggaaaattttggctccaccactggataagatgtatcgagtaaaatataccgttcgctttaagggcatagtgtagagaaaaatgagacttaaagacaacgacaactacatcattttcctattcttttgctcatatcatcccatgttattccccgttagctcttagcccctactctcttctctcccatgcgtcagatccatcgtgagtcggtgaaccaatatcgatacattgagtcattgaaggagtgctgacacggtgacacagaatccatccaagttagaacaatgggagaaaataacataaaacactgaagtgaggtaagacgcggtctacaaggagaagcagcaatgtgaaggtattttttgagaggagagactcttaatatttgtgttaggttatctatttgaatttttggattggtgtgaatggaatttgagctttttatgagtcatattaggctacctttcctccttctcctatccatatcctaatcactattagtcacataaattaaggcgttacctcgcttattgtttaattacccctataaggcaacaaagggggtgtttttaatcatgttactttgccatcaatagtgagcgtcctcatgccaccttaatataacttgtgtagcttcatctacatctcaccgccctttcaataaagataatctagtcactcgatgaaagcacgagaggaacatattaatatgcaaaagatgatacatacctcgtcaatcttgagcttactatagcctaaaaaaacccttatggtacttttctatatctatgggtcatgtgtgtcttcaccacgttaaacaagaagccaagaaagcttattcataacatatagcgaccaaattccaaggccaataaattctctataatcctttcctcccaaacaatttacacaaatccacatccctcatgtaattcggggtactctcgtcgacaattacaaatcagtacattttctcaccgatccactaaggacaaacctctatgataagtttcaaactaaagtaattccttcctaatgtacctgtcggtgacatgggaccgggagtatcatgactagaggcttgaggcagacacaatcgcccacgtggcctggcaccctcggggggcgtcgggcccgagggtgatgtgttcgccctcctctttgtctccccgagggggtcggaccgctcccgcctcggccccgagggccgaggcgccccgaccccttgtgggttttgcgccgcgtgtatgggttaggtgagcgcagcggggctcacctaaccgcatttattgcggtttgggtgagcacgtcacgccacacgtaatgcagtacagcgcgctcgtttatccggtctgtgactggtcacagaccggtcagattgcgggttaggtggcgacgggcggtctgacgcacgcctcgccccatcccgtcaggatgagagcctccaagcactcgtccctagccggagccggcgtgttagctcctgggggtggcacgttggtcctggtcagatatatgccaggctttatcccaacctttataagcaagacgtttaatgaagaagggcgaacatgcagattgctaaactgacacgtggtggacaaaggtgaccggtctgtgactggtctgacactggttatgtcgccagaagacaaccgtgttcccacgttgcacctgcttccggcggagtggaggtaggtatgggccgtcccatcagaagggtcactcgggcagcagccgttgcaaatctccgcccatttatgaagagatgacagggtgatccccgaggtcagacgaacgaggacgcgtggccacactcaaaaacaggcagtgtttcagcttccaagagaaggcaagccaagttttactatagataggatgggctcccacccaaaaagagagagagggagaagtggtgcatgtggtatccccttgagatataaaaggaggaccttgcccacttaagagagggggctgaaaggggggatgatctggagagggtttttagaataagagctatctggctctccagctctttgtagcttcttcatacacagatccaccagaacacaggagtagggtattacgcttctcagcggcccgaacctgtatacatcgcccgtgtcttgtgctttttccattctcgcgaaccttccacacacagactaggagcttagaatctcacccagggcccccggccgaaccggcaaaggggggcctgcgcggtctcccggtgaggagccccacgctccgtcatctggtgcaccaggtagggggttctgcgtgtgttcttctaagctctcgcactctttcgtgtgcgccaagcttttcctgttcagcccaatggctgaacaagcaaaggcgcacaacctctctccgagtgttagcggtgacgacggggagccaaacccacgccgtcgagctcgtactccaccgccccctccacgccaaagtcctaggcgggaggaggcgctcgagagggtagaaggatctgcgacttcgacatccacgggtgatggagaaggacggcgagacggggagcgtcgcctcctcgtctacggcgatggcagcacgccccagggcgcactccaggctgcgggcgcgctcctgcgtcatccgcccgtcgtccccgatccagagtctccagctcagcgttggctggacgacgtggccaacttggtcatgacggcgcagcagcgcctaggtgccggtgggcggtcctccgccaccaaggcctctggcgctgctaccaccggctccgtgtcgtcaagacggagggcgcggcgagcggcggccgctgttcgctattcggccgccactccttcgtcagcgacaccgacccgggaagatttgcgcggggggccggatgctcgtattagtatcgagcgccggcgtaaccgccgacgtgctgcccacgcaacggagggcgcctcctcgtccggagtgtcacctcaacacggacgcggggatcagccctccgtgcccctggttggtggtgtcggctgtaaagcctttgtggcgagccttcggaacgtccgttggcccccaaggttccggcccaccatcgccgaaaaatatgacgggagcgtcaaccccgccgagtttctccaggtctacacgaccgggatcgaggccgccgggggtgacgacagggtcatggtgaatttctttcccatggccctgaagggacaggcacggggttggctaatgaacttgccacccgcgtccgttcactcttggaaggatctgtgccaacagttcaccatgaactttcaagtcacatatccgcgccctggtgaagaagcggacttacatgcagtccagcgaagggatgatgagtcacttcgctcatacattcagcggttctgtcaagtccgcaacaccataccatgcatccctgcacacgcggtgatctacgcgttcagggggggtgtgcggcacaaccgcatgctcgaaaagatcgcctccaaagagccccagactaccgtggagctttttcagctcgcggaccgagtggctcgcaaggaggaggcctggacttggaacccctccggttccggtgtggcagcttcggccgcccccgggtccgccgctcggtcagggcggcgggacaggaggaggaagaagaggtcggcccattccgacgacgagggtcatgtcctcgccgtcgaaggcgtttcgctggccacccgaaaggggaggcctgcgagcgacaaaaagaaggaagccgacgctccttgacctcggctacttggaagagcgaaggtggcgcgcggcccttcgagccgcgcgctaccagcagagcctgcggcgctaccatcagcgccacgtccgggcccgatcactctgcgtcgacgacctcgtcctacgccgtgtccaaacgcgtgctggactgagcaaactctcaccaatgtgggagggtccgtatcgagtgatcggcgtcccccggccgggctccgttcggctggccacgggtgacggcacagagctgcctaacccatggaacatcgaacaccttcgtcgcttctacccctagtgggggtcgggtgtcaggtcttgggctcgggccaaccccgcacccccccgggggtgcagggttggccgggggcttatcttttttctcttccgtatttcaataaaagcattttcgatttcctaaaggctgtgtctgtgcttttgtttccttttgaagaatcttgacttgaaataggtcactcgtgctcaatcctaccctcgggggctcgggtcggctaaaatcgccaaaaggggcccagaaccgagccgtgccccgggacgtggtgaactccgggggggaatcggcaaaaacccacaatcgggtcacccataaccctcggtcaccacgctcccggcctgaccagtctcgacatgtggatctccccaggcactagcctttacccgcgccgtttgaggctgggacctgggcacgagcccttgttcaagccaagacacagaaggaccgtggcacagaccatcctcgtctcatacacagaacaaatgaagttgacacaaaaatttcctctttatttgattgcagattaaatcagcctataacaagaagggggcccgaaggcctcgaaagaagaaggaaaagctattaagattggcggaggcctgggggctcactccgacgcgcctgggtagccggcctcgccgtcgctgttgtccgcaacgtcgtcaccgcactcctcgtcggagttgaaggcaaacgcgagccgagggaccgctcattattgtcggtcggttttcccttgctgatgcgcgcgatttgcgaccgccgggattctgcccgaagagagagagagcagggaggagaggcccccgagccgaacggcggcccaaggcccccgacggccggagctggccctccgcctgcttgtccgacggtgccaggcgcccccgacccccaggatggccccgaggccactgcgggaaggccgcgcctgtcgccctctgaccccgaggtcgtcggcacagaagccgagtgcgccccgcgtggcctctcggatggagagcgccctggagatgtggcccctgacgaagaagatcggccccgccgaaaggtgcagcggcccgtctacttcgttagcgaggccctccgggacgctgagacccgataccttcaggcccagaagatgctttacgctatcctgataacttcgaggaagttgcgccattatttccaggcgcatcgggtcacggtggttacgtcttatcctctcggccaaatcttgtataaccgagagggtactggacgggtggtgaaatgggcaatcgaactctctgaattcgatttgcgctttgaaccaagccacgcgatcaagagccaggccctcgccgactttgtggtggagtggaccccagctcccgagctcgtctccgcccccgaggccagctcgagcccatcgcagctgcctcacaccgccctctgggtgatgtagttcgacggcacctgtaggaaccggccccacctgtcaccaggccttagaagtggcgttacgcccgaccgcttccctcggggagggcgatcgccctggcataacgccgggggctactgtcggtgacatgggaccgggagtatcatgactagaggcttgaggcagacacaatcgcccacgtggcctggcaccctcggggggcgtcgggcccgagggtgatgtgttcgccctcctctttgtctccccgagggggtcggaccgctcccgcctcggccccgagggccgaggcgccccgaccccttgtgggttttgcgccgcgtgtatgggttaggtgagcgcagcggggctcacctaaccgcatttattgcggtttgggtgagcacgtcacgccacacgtaatgcagtacagcgcgctcgtttatccggtctgtgactggtcacagaccggtcagattgcgggttaggtggcgacgggcggtctgacgcacgcctcgccccatcccgtcaggatgagagcctccaagcactcgtccctagccggagccggcgtgttagctcctgggggtggcacgttggtcctggtcagatatatgccaggctttatcccaacctttataagcaagacgtttaatgaagaagggcgaacatgcagattgctaaactgacacgtggtggacaaagtgaccggtctgtgactggtctgacactggttatgtcgccagaagacaaccgtgttcccacgttgcacctgcttccggcggagtggaggtaggtatgggccgtcccatcagaagggtcactcgggcagcagccgttgcaaatctccgcccatttatgaagagatgacagggtgatccccgaggtcagacgaacgaggacgcgtggccacactcaaaaacaggcagtgtttcagcttccaagagaaggcaagccaagttttactatagataggatgggctcccacccaaaaagagagagagggagaagtggtgcatgtggtatccccttgagatataaaaggaggaccttgcccacttaagagagggggctgaaaggggggatgatctggagagggtttttagaataagagctatctggctctccagctctttgtagcttcttcatacacagatccaccagaacacaggagtagggtattacgcttctcagcggcccgaacctgtatacatcgcccgtgtcttgtgctttttccattctcgcgaaccttccacacacagactaggagcttagaatctcacccagggcccccggccgaaccggcaaaggggggcctgcgcggtctcccggtgaggagccccacgctccgtcagtacccaatgtctctcaatacatacgcacatcttatttccaccccacgcatcaaccgctagctcgtgctaatccttaatgttagggaggtcttattctaaaagggataattcgtgaatatctgcacaccatgagcacgcgcaaaacacccgtacttacatctagtaccggacgatttttatttatgggcaattttgtacatcaaatgaaagtttatatactaccaaatttcgatttggatctgaatgtttttttaaaatgtttccatatcaaaagtttctatatacaaatttatatgcctgcgatagcacctcatgggggctaggcgcacctaggggttgtttggttcactcccaaacattgccaaacctccatgctaaacatagccaaatttgtggcttataaattgatggccacaccttaggcaacttttggctaaaagatgagtgtatgacatgtgggcctttgaattgaaaaactttggcatgccacaactttggaagtgaaacaaacaagtatcctagaaaatgtggcaaagtttggcaaagtgagggagtgaaccaaacagccccctagaccagacttaacatatttgagcgccttgacacgtgaacattcgcacatttgaccttcccaatctcgatctgtatacccatggctcagtatgaggtagaacaatgcaacttagtagcatttaattaacccaaggtctgaaatagaccagctaaaattttttcttccttccgtgggggatccaaattagaccttatgtaagcttttgttagcaactgcaattaggcccatgggctgtacccatcctcttacccggataagtaaaacagtgaggggctctctcacccggagaaattctcgaataaacccctcaccacggcggcgccgcttccgcaactctcctcctctcgccgccgccgccgccgccgcccgccgcccgccggagcccgaagccgggcatgacgacgcgcatcgcgcccggcgtgggcgccaacctgctcgggcagcactcggcggagcggaaccaggacgccaccacctacgtcggcaacctcgacccccaggttagggttcctcccccttcttgctcctcccatctgtcgccgtagctgtagatgtgttcctgaagcctccacagggaggggcttgtagcgcccatggctctgtgggcgttcggttggtgggggtttgtgtcgtcctgtcgccacgagcaaagcctgaagtggaaattgtgccgatgttgttgtgagttccgttggtacttgatggattaacgatttgttgagcccgttgagttaattggtcgttgttccgtggcgaaggtgcgtgtccatcgttgatttgttcagctcattgagttaatttgtcacttttcgacgacgaaggtgtgtgcccatgtagctagatttgcgttcgaataagcttaaatgaagtgttggcagttaatttccatgtcggctgtgagtttggaaagcattgtacatgaaagaatcgtggttggatgaactgtgcagattctcctaggtggtctgtttataaactatcgtgcatgatatagcagcatagttggtggaactgttcggaatctcctagttggtctgcttatatgtcctaaaatctgaaagaaatacttgtagtcctagttggtctgcttatatgtcctagaatctgacagaaatacttgtaaattgcttgccaagttagtgtatgatatttaaggagacggcatgtttccatgttgaattatgttagttttggactttattattgtaggaaacatctgatagctaccattctttgccctccctgcaggaaattatgaacactttatctatgtgattatagattaacgcaaccactaaatcaattgtcttctatcaattaacaaagtattatacttgctaaatgattttatcttttgtgtacaaaaaacatattggtcttacctttcgtgtgtaagataatatatgatccctttggaaatcttatttccatgcgctcacgctgataattctaccggtattttacaggtttcggaggagttactatgggaattatttgtgcaagcaggccctgttggtaagtatcagtttgttccttgatagtttgactgattttgctcggaagtatctttcagcattatgtttctgttttatgtgctgtttgtgacttatcgcctccctgtgccagtgtgccacacatcatggatttactattatggagactgattaatggagttcctttttgtcaatttgtagttaatgtctatgtccccaaagacagagtaacaaatctacaccagggctatggatttgtagaattcagaagtgaagaagatgcagattatgtaagtctatcttgggtgaaggcaaatagtacttttctactgtacactttcaatatccattcaatatagcttttctgtttcttatctatttatttttttaggctattaagattttgaatatgatcaagctatatggaaaaccaataagagtaaacaaggtaagtacctcttttataatctcctctgcctcttttcagtacttctctcttgtatttctagccaagggtgctcgtgggtcccttgaactgctgaatttgctgaattttatgacagatggttgatagtttaatattactatattagtgtatgagtttagatgattcttcctcaaaacatcaactgaacagatactctgatttgttagtgcgtgcgatgattttttcagaaactaatattattctgaaatgaacatctgggttcattcaacttaatactgtcacattgtggtttagtagactttatttgcagggatctgtagtttacgttcaattctattgatttttttttcagtatactgcttctaaaactttctttattatatctaaacattttcgaaatataggatttaaatatcacatggtaacatgattatcttttcttattccaggcttcacaagacaagaagagccttgatgtaggggcaaatctttttattggcaatctcgatccggtaaaaacttgtggtctagcttttctttatcagctcgtttgcatgcgaagagtggctaatggctttgtgttctgtgttcaggatgttgacgaaaagctcctgtacgataccttcagtgcgtttggagtgattgtgactaatcccaaggtatcattcaagaaaaccttttactgcatttgtccgcttatgtaatctgttctgtgcacactaggctttagacacttgcatcaagattacttctcttatgatctatagctatgcagtaatctgacttgtgagcattcctccattgagaagtcaagaagcaagcttgaacaacctcttgagtggtgcttaagataacctgatattcctaatgtgttcatcatagttcacctgatattcctaatgtgttcatcatagttcagctaaattctaatggaccttgcttcagcagagtttttgcataacagtatttagttccaaattggcaaattgctaggagcttatcagctcagggcattattcatattaattcttatcatgataatattacagatatttgatatgttagaatcttctgttctcttttcaattgccatgctgcacaggatgtgttcttagtcccatagcatcaatctatcttgccaagtaccacgtctgcttcaatcagataaattaattatctgattttaacatgtactacttcaatcgtttaccatgcagtgttaatagtgtatttccagtgttggcatacagtaatttgctttgattttttttatttatctttatagataatgcgagatcctgaaactggaaattcacgaggctttggctttgtgagctatgactcctttgaatcatctgatcaagctatagaggtaacacaattgccacaataagttctatattttgtttcttccatttattgaatgtgtttcaccttatgtgccacaattttccaggcaatgaacaaccaacatctatgtaaccggccaattactgtctcttatgcctacaagaaagacacaaaaggagaacgccatggcacacctgcaggtattgtgttttcttttttctttttcccatctatttgtgttccttgccctctcagacacaccgatgtgaatattcacttgaatatcttgaattgactctctgttgcctacttggttgttccatatatccatgccaactttctgttcttgattctgaaatgataaatttcccgacattttccatctttgtgccttggaaatgctagggttgagtttgatgaggagttcttttgtggagttgaatcttttgtgctggcatatttaaccctgtttagtgttcaattattagacgttgaaggttcacaaagatgttatataatttcttggattatcttattttattttgagtatccatagattggatcttgatataacatgttacagctattactagacccatctaatttgtcatatggaaaacgattttcattcttttcacttattcaccattgccgttcattcaattgtccattgaaattctgaattctgactacattgcggtttactaaagttttgttccaacatattgttacaatcataatgattgatatattcttgtgttgacagagaggttgctagcagcaaataaccctggttctcagaagaataggccacacactatgtttgcaagtggcccgcctacgcaagggcttgcaaatggtgcacctgtgcctcgacctttttccaatggggcagtgccacctcagattcaacatgttcgaccgccgccacctcctatgcaacaattccctccaatgcagatgaatggtcagcctgtttggcctccgcagaatacacagctaccaccccacatgccacctcaaatgcattacaggcctgcagtgagaccacctccaccaaacatgatgccaccccctcctcttggcatggtaaggcctccgccgcctccttccagtatgccagctccacctatgtggaggccacccccacccccacaacaagctggtggtatgccaccacctcctatgtccatgccaccgccgccaccaccaccttctggttaaacatatgctggtgaaggttccataccatatggcacattgtagctgtagactgagaatgttggtacctttcttatatttccatgtaacttgcaaacactaggagaggatcagaattcagtgagtttagctgacactgatacaaattctcgaggttaactgtattttgttggaaatacatgaattttgtggttaactgtatttttgtgatttcagctgctgtttattaagcttagtgatatggtagttttgtttgcagttctactacctgcggctcttcaatcatcgccattctcgaaagctggagcagtttgctagagcccaagtcggctctgtctgggttggtttaggctcaatactcaagcccagcagcggaccacattcccagatctaaatcagtgcatataaaagcccatacaaaaaattggccaaccgatgaccatgaaaattaggcgtcccaaattatgcccataatcgaaattggtatacacctctgaacaggagcaaatttgcccacccttagaatttaaacgattttgggccacctctcaaccggatcaaattttcttgtcacaagcacggccaaattacggtttctttctagcatttgctcaactttgtttatccattaaaccatagattcgttacccttcgacagagattacagagaggttagagttaatagcttaagttagtctgaataatcccattcccctttgcaacaactacattggctaaacctgcaatattcccatccatgtgctcattacatggtggatatcatctcactgtaacactgttgcctactactccctaagtgtcaactgtcaacaccttttgcttcctttttcttctcccctttttcctaacctttccaattgaatcataatgaagcatcttacaatcacaatgggtgcaagcatatgagagcaaagagtgcaagaaacaatgaagtcaattgcagtgtcaggtcagctcggcagctccaattgccgccgctgccatagaccatcccgagataaccataccccatcccgccggcaccggcgccgccaccgcctccgccgccggttccaactccggcgtagttgacgccggcgtacgccgccgcctcgccgttgtccctgccagatcaaatctccaaaaacattagcaaactatcttatattctcttctcatgtactaccatgagagagctagtagctgccagtatgtcattagcaaaactggcacaagttgtagcaaaaactttcaagtgaaactgtacttaaggtgagatctactactgctgtctgtcacaagtgcatatgcacgctgcagaataaggaattggatgccgaggaacatgggtcttctcctgcagagtgatggacagaacgacaaaaagtgcacgccattttctaatggatcgttgcaaatggaccctcaacgttctcttcttgcttggctccatccgaaaaggtcatcgcattgcaatatggtagggtctccagtacaggacactgtttgagatccaaaacgcccaaagaacacagcttctcgcagtactagaataattcagcaacaactataatgcattgggccagtttgtgtttgtgtgtactagcttcttttgagccttttttttcttttctggctatcttttgcaggattcggcgacaaaacgaaggggtcagtggcgagcaagtggagaagaagaaggcaatgcatggtgagtgattgccggcctaccgtgatccctgggttatgcaatcgatggatatagcacgcatgttgctgagcatgcgacgatcttttcgatcccggctacttttggcatcgagcgaagaggaaaaaagaccggccaccatctgtggattcagttgatggctcatcgacatgaccggctaccaaaagataacactggtccattattttttattcataatccggacatccggaggcagattgactgaagagagtttatgtgccaacgtactagcattgcaatgtattccctcctcgtcgtataaaaaacaaccctaatttccgtattagtttattttttagaaacgaatggagtattaaagtctaacgcaatgatgtacactcttcgttctttaaaaaaaaaaatcaaattctaaagataaatccggtcatgcatttgtctagatttttctttaaaagttgattttttttaggacgaagggagtaagtcattcatgtaaaaatgtactccatccgtcaaaaataaacatatacttattacgaatacgatctatccagattcatactaggtcacatcgttttgtttattttatgatagttggaaggtttttgtaagcttgacatgagtagtctgctcttgtcttgccatggtttcagaggaaagaacgggagaacgaaaatgcaacggcggcagtgcatttgcctgcccgtgctgcccactccccaagtctcgcgtttcgcccatcccacacgagcagagtctagttcgctgtctaaaaagaatactagcactagcagtgtaccagaatacaagtactgggcctactggtagtacaagacaaagttgctttataaacttttatcccggtgtttaatcaacccgactttgtcagtcagccgctagtgttagtggtacggctctctattgagtgctcagccttgtaatagtaatcatctgttaagaatactttactttggccctcctaacctgtcctgccttttaccagctaagggtctataaattgaggatttggccaggaaaataattgtaggattatcgcggtaggacgccgacatggttagctcagttccagtcagagtgcttgtacaagtccacctgcatcgccggcctgcatttcttactgtactgccacgcttgttgctagctagccaaactgctctgctctcatgctctcaggcccgtttgtttctgactaagatcatactactagattctatcctaattttcattagcactttttttaaactgttaaataatatattacgtgcgaaaaatttttatatagaagttgatctaaactagtatcaaataaagtttatttttaagtttataatatctactccatctgtcctaaaatataagggattttggatggatgcgatatattctagtaccatgttgtcaagattcatagtactatagtacgggcctgtttggcacagctccagctccaccccttctagagctggagcttggccaaacagtttcagctccactagaactgggagtggagttggatggagctctcacaaaatgaattagatccactccagacccaactcctctaaatttaggagttggagctgtaccaaacagaccctacgactcatccacccaaaatccattatatttttggatggagggattaaaaatcaattaatgtgtgctaataactctcgtcttacgtgccctttcctaatcttcatgcttccaacgggacctcaatgttaccaaatcgacgagctgttctaccgcaaatccctctctacccatccaggtcgcggcaatggcgccgacaacaactcgacaagcggcgcccctccggcgaccggaggtggcagtttaaaggcgccgctgccgcattaaaaaaaagacggcccaacccaaaagaaaaaaaaatgcccacgtgggccccaccagtcagcgagagggatccggcggatatttcacgcagtggggcccacacacccacgctgctgctacatgtcggattcattcgaccgtgcaaaaggagagcggcgagccggcgaggcgatgacgatgcaatgtaggagggatgggtgggtgccgtacgtacctggggccgccgaggacgccggcgccggcggtgagctggtcgacgagcgccgacgacttggggtcggtgctggaggccttgtcgtagatggcctcgaggccctcgccggaggggacgaagaaggcgccgttgaccatcatgtccccctccgtcctccagttccaccccgcccactgcccctcctccgtgtccacccgcttcgtcacctgcacgttttttgtcccagtgtggggcccacatgtcagcctcaccgaatcttgggggagggtgcatctcatctcatcgcatcgcatcgtgcggtgcacgcgcctgcctcggatgctgctatcacgagggcaagggggaaaaacattcacccaaatttttgctctttaaagaagaggcgctattatgatgatgctccaaacattcgccctaaaagcgtggcaattcacatgaccatagagcgctactcacaccttaaaaacaggtcaaacgacttgagaaatttttctaaatatggtcagattgctctaaatttcacaccccacttaaaccaggaattcatcccaaattggggcatcaaacagctgacaagtgacaacctcagcaatttgagccaaaatgagaagcaaacggaggaaaaccaactaaataaaagacattttttttcctttcataagcaaaccaatgaacagaacaagaaataaccacccaataaaataaaatcatccaaaaatgggcatcaaacatccgacagcatcagcaattcgagccgaaatgagaaacaaacagaccaaaaccaatccaacacacacacacacacaaaaagatttttcttttttccttctgctatcacatctcacgactcacaagcaaagcaacaacgaagagagcaagaagccaagaacacggcaaacaacaatggcgtcgcttgcttacctccttggcgttgggatcggcgggggcgatgtagcggttgccctggctgttgatggtggggctcgcgctccctccaatggcgtacatctcccacgccgtgtagtcgttgttgacgatgtggaagtaccccctcctgcaccgaggcatccgctgcacgagctggatcccgaagtggttgaacgcgatggtcacctgcatcgccgagtccggcaggtacccgtcgctgtgccccagcagcatcacctcgttgtggtgcgagaagtagctgttcgacacggtgatcgccgtggaccccatgatggcgtcgatgaggccgtcggcgcagcgcgacagcgcgcagtggtccacccacacgtcgcgcgccgagtagagcgagatgccgtcgccgtcggagcgggtgcgccacccgtagtgcgtcggcgaggcgcgcacgttggcgttgccggcggggacgcagtcgtggacgtggatgttgtggatgatgacgttggagacgtactggagcgtgatgcacgcgccgccggcgccgacgtggacgttggcgccgcggccgtcgatggtcttgtagctgttcacgaggagctcctcgttgaggcggatggtcatgtcgccggcgaacacgatccagagggggccctcctggatggcgccgtaccggagcgtccccggcgcggggttcaccgggtcgccgtcggaggggtcggtgacgacgtacaccggcccgcccttgccgcccatggcgttgcgcccgaacccgatgccgcagtccgccagccgctgccggtcctgcctccagtccgtcccggcgcaccgccagcagtcgtcgatggggttccccgtcaaacacccccc

SEQ ID NO: 2297 - DNA, 14127 bp, Oryza sativa
cagatgtggcacttcaagattatgatcatctccaggtgccctgtcagtattgtgttcctctttttgcacacggttttcatcctccatggaagactgtttgacttgcaggtcatcgttgatttgatcagctgttgcattacccagtgcctgagaggtgctctgctcactgtccggcacataacgaaattcggtagcactttcatcatcaatatggtgttcagcttctggttgatgatcctgcgtatcagctgagactttggcccgttctttccagtccgccattgcatctccaatgctcctaaaaggatttgtctgtttgatctgcgatggtggagtatcagtctgcaactctggcttagagttagacaataacctagagccatccccagagttgggcatagatatttccagactagggacttcattgcttgaaaaattaacagaaggagcagcagcactgttcatatcagtgctgttagccaagtttgattcagattctctgttatagtccatttcggcattatttggttgtatgccttgtgaaggatgctcaagtgactcaatattatgaagttctttctccatgttatttgtctccatctgtccatcttcagcatgctcctgctcaccatcaatctcattgtcaccatgttgagctgcatctacatcctccacatcgtctgaagcatctaaacacccatctgctgctagcttttcctcttctggactgagttcttcaccatcagcatccatttcatcaatatgttctgtcccatccatatccacatcctcagaatcatcctttggttcagggagttcaggtgctgttcgatcatcataggcatcagctttgtccattaagtcattcgtatcctgatcaacatcctcacaagtactaggatcatcctccaaattattattcttgccttgctcatcacaatctgtctccatgggatcttcttcaagagcaccttcgtcctttgctctcagttccctatcattcttctgtgtctccttggctgatgaacccgactcatacttctcagtggatctgttaggatcatcatcttcatccttatcccaagatttcttgccgaccatttcacttgcatcaccagtatcacccatctgattctccaagttcgtgtcatcatcctcatcgcctgaatcattgccttcagggtcctcagaaacatcagacagttctgcattaaaatcgtcttgcatttcaactgcatcatcatcattcttaggagcttggtctggcttacgtagagcatcctgttcaacatcacaaaaaatggttaggctctgtttttatttctattcaaactcaaaaggaagaaaaaattgaaatagagagacaaccgaggaagcattgtttgatcacactaaccatttcattagctgtcccctcaagttgggatatatcatctattttagaacttgcactctctttgccttcaccctcacccatgccagttccagttgcatcctgctgtggtccatctgaagcatcttcagttgtatcatctgtggaaccaaagccttccgcaaatagatgaatcaaaagatccccaagtgcatgagtcatttcagatgtctgaaaccatcagaaaacaggattaggaatttttctgaaactgttttcccaaaacagggaaaaagaaatgagaacaaaattgtctaagcatgaaatacttacagttctatgagcttctaaaagttcagaaagaatgccttcagctgctgataggaccagaccaagcaaagcatgaagatgcattaactgcatccctatactagaaggcaactcaggtttaatgtcgaccagcctcctctgttggtgatagatggagtcaagtaatgtagcaaatatatctaattctgtagagatgaaaagatgatgcgcaaaaagtgaaggggcataccactgaaacagtaagttttttactagcatcaaacaaatggcccatttgaaggttcatgacatatgtctgcaaaatatctttccacaaagtaatatttccttccaatgaatcatgagttccatcggtggatattccctgatcagtgagctttccaacaacaccaacagccagtgaaaagatttccttaaaagcttctgcatatgaagcttcaagattgtgtaggacatcggaggatagcatatgcttgtcttcatcaacttttctggataaaatcgccattggtgaattcccctgcaacaggaatgcatgtttaagcaccaaaatatccagaaaacagacaagaaataaaaggtaaataaaagcattttgcaaaaaaaaagtatgtgtaaagtgcatagaattgccataaaatatagggtataattgcgaccagccactcctaaaagaatacagtagattaaagaagctatgaagttttctgtgacattattttgtgggatctatagcttccatgtccagtaataaagtgaacattagtgtgtgttacagtcttagcatcagaatacaagaattctacatatgttaagatctctatacatataagaacataccttctccagcaactcttcaaaccgagagagcagaactttcttaacagatctcatcgaaacatcctggtggcatagaacttggatatcctccctaaacatgctgataagctggcaatttgcagcaacaagttgctccatctctcttgtagcaagaggcatattcttgtgtgagccagcgatcatataattggatccgagtaagtatttgtctaacaagtcctgcaaaatagaatagagttactagtcacatattgcttaagtttgcatagcaatggtattcagggccttgcttgataaaggtgtagcttctccaataagcaacttgaagtgtcttaacgccaacttatttgaagcttctactggaaatagagcttattattcttggaccagaccacaaatacaagccccatgtctcagagatcataggagtggtcaaacaggaccaataagaaggcagaaatgaacaggtttaccttagattcagaaaatcttgcgatgaacttttcaaaaagcgttgacattgcagaaacttctacttggatgttgtcacaaggatcatgatgacaatcgatgaagcttctgagcagcaagttggtatccatggtcgtagccagtatgttgtcaaaaaattgctacataaaaatgcaaaaaggatacatcaaactataaaccccaattacccaaataactgtaagactttcatactgcaaaccttaccttttgctgccacatggaattcagcagtacactttggcatgacgaaaggtagtcactatcacctacaaaggatttgtaaaagttactacatggatttcaaaacaagaaaaggaatgtacagatcacaaaataagtacctccagaacctaacaacaaaattgcatgccgaaactcattcaattgctcaaacatattgtaagcaaaatgtctttgttcagacatgatggataaaagatgatccataaaagatgtagccctattaacctgcaaattttcaaacaataaatgccaatttgatactataatcactaagtacattaatactagaaggaagactaacctcttctaaaccaagatctttgttaaatttcaaggaaatttgtcgaagttgttgcatcattgccaaacatttgaagtactgctgatttgcatttttccagttatttgtgctcaagagggtagcatgagcaacgctagcatcttcaggcattttcttcgagatcacttgctggagcaaatgtgtcgtgatatacgactgctctaaaaatgggcttggtgcagccaactcgtttccctgtattattttcaatttcttacgtaaatgtgcacttgacaacaagtggggaatgaagacaagctttttgacaagtaatatacctcacgacccattggtctgtgcttcgataatccacattcctcaagtgtcttgaacaaattggatagagcagttttcttctggttcttcttaccacttttcagtatagaaccaaaatcagctgcattgcaaatccgctcaattgcagcccaaaagaaatacaatctgtcctcaagttcactttcagcttgttggcagtttgtattgtggaaaactacacgcgcaaactctgtcaaaaaaaattcagaatctcattatggaagataaaaaggagaaaatgattaacaaaattacaattttgacacgcgagaaagagagagagagagagagagagagagagagagagagagagagagagagagagagagagagagggtgcagcctagaccttcattatgaactccaatatcagtagcatttgtatgttgtaaagcttgaaatgacaatttggcctgatttgcccacttagtgtaccacaaaaacctggcacaatgaacatagtagattaagtagatgatataggtggttaaaaaatttccatactcttaaagccttaatgggacaaccttccgctaagtttcccaaggtcaacaggaaactctgattcaggcatctgttgatcaagccaacatggaacttttcttgccacagattcttgatttagcaggaccatcacaggtttttgcaaaatatcctataaaagcagaatatccaattaaatgcatttttctaaacagttaatgaatgcccacatcaataataaacactaaacacttcaggtaactttctggtaacttacatgattgctattagtaacaaactataccataaagagagatttaaaatttgggccagtcaactagagattttatggcaacaattacaacatgtgatggcaattatctagaaaaactgatagcaattatgaatcatgtatcagttagtgcttcctttcacataaaaaaaaaagactaaacaatcaccacatacattgaaacactgcagaagcttaaaaactttttgcctcgtcctcttgaaattctcaatagaagcactgtgtggatcttgctcccaacggtaaagcttgacctgatctttcaagtccttttctattgatcctttaccaccttcaatttccccaagaacactgatgtcatgaaaacgttagttataacccaccatgaagaaatgaacaaggaaaaacttcacataaatcacgaaaagcaactcacagtggcaagaactgcatgtagtacccaaacatgttgtacagaatattctggattttcttcaacgagttactgtcaagaaacataaagtcagaaaatgatgcccattttcaaaacaaagcacacccagttttcagaacagtgaaaaattataatgggcaattcaaaatgaaattaacaatcatgctgtactaaacaaagtggaacaagactcttgatctcaccttgaataagcaccaacaccagcaccatcagaaagttcaccatggaaggccagtaggagatgcaaccttctcttgaattcaccaatgcttgatgtttgaacaaactcctcaacactaaatttaggttcaacaatacattagaaaatatacagagagccaaatagagagagcaaacacggatggacaccttttgattatagatatttcctcgttctttgaaatatcacaggattgtgtgagtaatgctcgcaatggaaaccatagctgcacacacccaagaatattctgtcagccaaaaatcaagcaaaaataaattattaacaaatgtatattcatagtagaactcacttttagagcattgctctcgtacttctccagcacctcctgaagtagtataggccaacattctaactcaagcctttgccatgaagacacaatgatgaataattgtggaagatggtctgtggagaaaaagaaaattaataatcttatttgtaatttgtcaaatttgataatcaactatgtttgatgagttatctattttgtaacagtagggttctttgtaatttctgtcccttttgtgtttcatgagggctcggtcaactgtacttctggaatttattaatagcaccaaatcttttttattacaaccctatttactgaatacctccatccggtcataaatatttgacatataggacaagatacagtcaacttttgaaattttatatttgaataattttataaaatttagtgagtctatgatattatgatagtgctttcaaggcaaatatacgcataccatttttttgttttgtttttaaactaagcgtttgaaaatttattgatggtcaaagtttcaaaagtttgaccaaatcttatcatctacatcaaatattgtatgtttagtccttgactactggtcttgttaaaaaaagatgatattttaagacttccaaggggtctaaatctgaactagaggtctagagcagctgttgtaaatagaaagtaaagtgggaagtgtgtgtgttattctcggggacatgagatcaataaaactttcaaattcagcacagtaatcactaatcagcattctatgttttatactcctgccacctgagcaacagagattagaaaaaagatgctaaatatactgcaaggctccaagtcctgctaaaataggttactcaagattcagcactaccttttaagaagaacttggagtcattttcttgcaatgtttgtgcttttccaaccaaaagttgcaatccaagtaataccttcaagaataagaaatttgtgtgataattagttgcaatccaaataagttatatacaaacaaaaacattttatggataccagacctttgaaagtggagtgctcaggggaattgccaaaagggaagtaattatgtctaatattttcagaagacctggatgaccaggccactcgtccaaaaagtatctaactttttcttgaagtgcagtcaatggctcaaccattttgaacaatatagaagggtttggatcctgcaaaaggttatcagatatgctagtaacaattgggcatcaaacgtacagcttggaatatcctgtaccttgtaagcgttataggtgttgcattctaaagatggtgcacaagtttgtcgatattccagacaaacacgaagtagatgctcaggcatgagtttctcatcaaatgttgaagatgtcaattctggcaagtctgaaaaaataatcataaaatactgcaaatcaaaatacagaactattttcttgcaagtcaaaatactgcactgcttgaaatgacatggtacgttacccttcagaattcttgctcccagttgatatgagtccataaaagattgaattttcaggtcatcactaatttggcatttactaggctgaaataaattcaaaagaaaaactaccaattagctatgtacagaacaacactaaagcaattattgaacaacagctccttaaacaatactaaagcaattattgaacaacagttccttttttatccttcttttttctaatagatctgagagaaatatgctgtgccagaatgtatagcgttatttttgtttctcgatcctcatggacatccaaaaattacaaattatagtgccatacatatgattatgagttcaagaagttcacagaagatcatctctttctcctgtcactatttaccttctcaacaaggtctggcgaaccaaataactggttatgtattgttacaatacatttcagaatagattctggtatgagatcccacgagtcttcaacagcactatttttctcatcagttctctcctgaaataaacaggaatacggggttgatacataaaagtgaaaagaaataaaggcattggaagagaatcctcaaacatatgataccataattttaagaaaatcctgctctaacttttcttcagtatctgctacagcattgccttctgcatccatatctgaaagtgatggcacgtctcctttaaagatatcatgtatatcaatgatacgggacctgaacttgtaatactgtgaatcatcattttccctggccttcaaactagatttcatgtcaacccacatgcttgtaaactggtcaaatgtttcctttagcgactgcaaagacaaacaggtaaaagatcacacatttcctttcaagtaattgtgaaaatgagaatgagtacataccagataagatgttttatccaggataagggaatagcagacacggtatgttgtccgtactaaagaaatatgatggattgatactagcatctgagagtgagacctctgtaatgagtgcaaaaaggcattatgaaaagcttgaatctctacatttgaataactaacgagacagcatgaattgaaataagaagggaaacacttccatttcactaaccaatttgtcagccacttcaccaacatgcaattgactcgacacagcagctagcttcttcaacatagcaaggtcactgacctcattgtagcgaatttccagttgatcatcatttacatatttcgttaaatcgggcatgtccactgaaacattgccagtagcagatccacttggaaattgcataatagcaaaaattgcaccctgcagcaaagaaaaagattaaagtagcaccgtcagcatcattgaggactgtgcacattctctgtcactaatcaaggaaagtacaatctgtttttacagtgtatatgtattacacatatggaaacaaaatagcatgaagtttatttattactatcagctactgtttgatgacacagatacaaatctggtcaaaagaagtgcaccactaagtatgattcaaacatagctgcaacacataccagagctcgttcaatatcatcttctttaatcttcttcaaatattccctctcaagataaccagacagagcaattgccaacccaagtttcatttcatatacagcaacttgaattggttgaatcaaatcaacatattccacatactcctctgtcagtctcttgatgaaatttctggatgttatctgccacagcacgattatagggccaatcaatataattgagcgataactgccactagaacaaaataatccagctagaagacaaataaaccagtcccaacaaacctaacctgccaattgcagactctatcaatctctaattgcccaactccatcaccatttaaactagtcaacagagacttgcattcagacaatcgttcctcaaactcacagcatgccacaatcaggctcttatgcctagattgtggaggtcgaaatacaacctgcaaaaagtgagtaaggatatatagttatcaaaacaataacagattacgtaaggaaaataataaccaggtctgtagtttatattaatacatattgagtactaacacctgttgaacggctgtcttgcccaataggcaagctcaatgatctaaaggtaggatcaccaacagaacaaaatatgtctataactaacattgaacatacccacctagaacagaacagagccacagatactgataactacagattgctatgacatttttaggagtcctgagaagattcatcaagggtgtgtttagttcacaccaaaattggaagtttggttgaaattgaaacgatgtgacggaaaagttggaagtttatgtgtgtaggaaagttttgatgtgatggaaaagttggaagtttgaagaaaaagtttggaactaaacaagggccaagttgctgcattcatattcaaaacattaatatagcatattaaattattatgtcccattctttgcttgtgtctcgacattaacatatgcctgttctcaacaattgttggaataaccagtgaaagaaatactagcagcttggaagaaccatcatgaactttagaaatagtatcataggatggggaatatttaaaacttcaaattatgtattaagcaatggattagcatatatacctttgcccggatgctcttctcttttgttttgagttcttgcaataacttctgatcatacccatcttcctcagagctagacccagccaattcctcacactgatgacgaacctattacacaacaactcacagaataattagccaggctttatcttacaaatcttactagttgtgatttttttcgtccaagataacagactaagatacagtaccacagttaacattgtactactaccattctcaaatagatgtcatttttaagaatgtgtccacccaaatcttaaaattagatttgtcatgtgaaaatgacaatagtatatctcatgaaaaacacttgtttatgccaccaaaatattttgttaatataagataaaggcaaagtgaaggtcagatattgttaatatcctaattaacacaagtaaaaaagaaaggagaaaacagtttacatgccacagcattctatgtagcatgttaattcattcattatgcacccaagaaataagagaccgttcacctttccctcaagctccagtagtgaaatcttttccagaatatgagagtgcatgaaagcggattcgaatgcaggatctggattatatgagctcaacaataaccggaagcgcaactctccaatgtacacccaagcagccccaagatgcatcaaataacctgcatgccacaaaaggttaaaataagcatgcaccgttcagttgaaataaacaaaaactcagggaaaaatcaaagcaaaagtcaaaaccacagtgcctattggaacaaacaaagactaaaaaacaaagaagaaaagcataagaagaaataccacgcaatagaccattcatagtacaacagcagggtaaggaaaaacaagtgcataggatttgtcatagccatgctacatctaaatgctgtcagcaatgtctccagatatcacaatgtcaaaaagttaactagaatacattagcttcaatttcgaaagtcaaacaaaatatgatattagtatctacacaattttagattctgttcagggagaccataatggctaacaagctatgaaatggagattcaatcattcattgagaagagataaaaaagaacacaccctgtgagaacggtgagtgcaattccagaagtaaggaccctattagctcatgcgagccagcgagtgaagccaatactccatgacttgaacgtgataacagcgcacaggcagtgtcaagatcttctttctgcaacagaacaagacagaccatgaaaatacgaaccaccagcaaagaaagcttaaaagcgaaacagataacttgttaaacaatactgctgtccacaaagatgctgcaatggtcagagtggaaattgttcacagaaaagaagaaataacaagacaaaaatgtcactatggaatacatttatgggctgtctggtttgaggtttgagatgattcattgaccatttgatcctaaatagtttgtttggtctgaggaatggaatagactgatccatcatcacctcatccctcaaacgtacatactaggtgaagcaatgagtggagccatcccaccgtatttgaggaatgatcccacaatgggtcatcatcctagatgctttggtacctcaaacataactgcctcttaaaaaatagcttgttgatcacttgattaagttcatatatgactacaaaacacagttacaaagatatctgattataagttgactaagaactgaagcaaccaccatacaaatgtattaagctatccttgtttcctagtttgggaactgcactcatctgtagcattgtgagggttatattttgtcatatgtggcactgtgtctgttcaaagtgactatgttatttgtcattttagcttcacatacacacaaatatctactaacagatgcacaggaaatcaaggttacagttgtcaatccttacaaactaatacgtccagaactttccaaaacagaacttaacatgttccaacaaagcttcagtccccttaaaatgaacaagaatatattgatttctacatgacttagagctaaagaggtgggacagattaaaaacaagaatataatagcatgcaatttgcaaaaacatgtggtacatgagatctaaaatcacgtcagaagaatgacgcacaaacctttacacgatgttcagactgttggaagaggatggactctaacttgctatactcttcttgcttgaaatgcttcttatggacaactatgatctgcaaataggacatcagaatatatattccaaagggtgcatcaacacaaacacagattaatggactgatacctgtttaaagagggaatcagcagcagaatgtagactaagaacaaagtttcccgcaaacgagacaccttcccagaggtttcttgatgaaattcgaagcactaaacggttcttctgataatccatcacacgtaaatcctcttgactgcagaaacggagggtattaagagaattctttgcaattggtatcccttaaggcagaaacatctcagcagcccagaaggaaggagcagagaaatacaatagcaatcaaaaggaaagatcccttcactgtttctagcacaaagggaaaaaatggacgaaaataaaactcatcatacaggatggtatcgattgcatccatttttgtcaggtgtgcaaggtcgcaggtttcatcatgggtaactgagaactgaacctgaaaatggggctaatcagataacaaaggaatcatgaaatctccatataactctggaactgtatgaagagtcttgcgaggaaaaaccttggtctcccagagcaatatgtccacaaaaaagtatggtagttgtaccacatttcaagaatagaactagcaacttttacatgcactgcagaacattcgagtgccaacttgtaagctaaaacaaaaacaaattgatatgttctaatcaaaatgcagagatcatcttttaccgttatcaactgtggcccaagcatgatgaatccaccaaatgatctgatgttgagtaaactcaaagggagatcttgaagatgatcccaattggaagtccatagcatacttgagcatatattcaatgtttgcaataatctgtgtcataagagaaaattactaggcaaatatgcatgccacaaaatctgaagggcagttgttgcagatgaagtaccaacaacatgatacatgagatgattgcagatcaacaaattctataagctaaaatccgaatacagtttaacaacacagagacacacatactaacatagggaaagggggaggacctgatgagattcagaggagtccaattgtgcacacttggatagccgttgcagtaacacagtatccaggttcaggctcttcaagttgagcaaaggaagacttgctacccaaccatggaaaccgtgcatgttacataaaacatctgatgagacagagcaacagaattttacttcagtagttgaagccttggacaaaaattcaagatttttcttctcccagtcaaccttctcaacaagcctctgcataaagaaaatgcagtaagtcaataaattttaggggggtaacatatcatataacattacaccgagtacaaaagaaccttgtgaacttcatccaactgggccaatactgttgaatcttcttcctcggtgatagttgcagcaagagaagccatagaaagaccttggcataaagttaaaaacagtaataagaaaccaaagttaagtaatgaaatgcagctcttctgcgttttcgagggaaaaaagaaaccaaagctaacactgcaaaattaaataaaaatgcacttcgagcatttaagtgtgcttccactgctttgaagcattcgagcaatacagattaaaaatagaccacaaaaaagaactctacaaacacagaagctgcctctgaatacaggcttatagaagcaattccaatgtacagcctcaaaaagatctgttggacaaatataagagtaccttccatcgcaaggtttctaagatcctgattggctgacaacatagcatcaacgaagtgttggttgtctgcaatcaacaagatgattagatctggaagatttataaatgttctgatccataatatataatttaccatcaaaatgtcccttcagaagattcttccttggccaaacagctgcagaaaatgctaagatgtcttggattttgtagaagattctaccagatgatggtacaatagggtggccaccataaacccacaaagttggtttgtcataatgtaaattgaaatcttggaggctgttgagattgacactttccatctgtataaccatgg

SEQ ID NO: 2298 - DNA, 20173 bp, Oryza sativa
ttgggtggatttgggagtggagaactggagatgcagtggatttttatagcaatgcaggagagtgtggagcacagtgagggagtggaaaatggtggatttggagagagaatcagcagctgggtggtgaagttcttgagatttaatttggagcttgggattggacagcaatggtggggaggaaggggagaactcgctgggggaggagagagagagagagaggaggtgaaatggaatcacctgggggagatggcttccttgcttgttaaaagagggggtttgtttgagcctttggaggagggagaatggagaatgtttcatggaggggaagattggcatcaatggagtttgtcaaattgagcacatgatgatgatttgttgtgttcgtgtgttaatgctgatctcaagtcggcatagaagcgctcgcaaatcttctcttattggtgcctggaaggtgaattgagatggcgaatatcagggaaggacataatatcaaataattagaatgagtgaggcttcgaatccaaatcatctagtccatcaccttgtgaagccagccggaagacctctaacacatgattctgacaggaattgaagtgtaaaacagaggattgtaaaacacaagaaaaacataggaatggtcgtttgattggagcgcaggaaaagcgcaggaatcggatgagagaggtggactccaaggaaattttcctagaggtttgagctcttgctaaatttcttctaaaatccacatacaatgtgtcattccatagaaatttcataggatttgtaaagctttaatcctttgaatcaaagagcctttaagggagaatttagcctattgtatggaagtgcttaaaataccggtagatccacgactcaatttacataaaaagtaatgttgacttttcttccttgtttttccaagtaataaacgcaaaacaacatcttcttccctctgtatttccaaaggtgcaccgcaagtccatttcttgcgtggttgaatttccgaccgtccccgtttcagatatctagcgcgaagaaaagcatacgtagcatttggcaccaccgggaaacagaagaaaaagaaattcccccattactaaactataaaacttttcttgtcccaaactaaaaaacgaattccatcgcgaaccgcgaagacaggcgcgcacgaccaggaacccttttcccacccttcccttctaggcaaccgtgcgaagtggagtacaggagtgtttgttttttcagttaccacgaaccccgaagacgacttctgctgctagcctgctactgccggtgttgctttgttcagagttcagacatgcattgctttggttggtccttgttgtgtggtcgactgctcgtgtgcatgcaatatgcaagggtgtaaaattgaaaatttgattgaaattggaatgacgtgatggaaaagttagaagtttgtgtgtgggtgtgtttagtttacgctaaaattggaagtttggttaaaattggaacgatgtgatggaaaagttgaaagtttacgtgtgtagaaaagtttttatgcgatggaaaagttgaaagtttgtagataaaattggaaacttacctaattaagcctaattaattgggaaatgcgagacgaactttttaagcctaattaatccatcattagcagatgtttattttagcaccacattgtcaaatcatggagaaattaggcttaaaagattcgtctcataaattaatcgtaatctgtgtaattagttattttttagcctatatttaatactctatgctagtgttcaaacgttcgatatgatatagtataaaattttagagtgggatttaaacagggccatagtttcatctgacacgatatggattactaaggccgagtttacttccaaactttttcttcaaactttcaacttttccatcacatcaaaactttcttacacacacaaacttctaactttttcatcacatcgttccaattttaacgtgaactaaatacaccttaggcattagggagcatgaacacaggcaaccattgttgctagagcatgtttgctgctgtaatcatcccacggcgaggattactgcagccgcaagaaacccccttctccgttgttgcaacttgcaacttgcaacgtccgattcttcagaaacacacacacgcactctctctctctctctctctctcttatccactcttggcctcttgctatgcccacacattcccctcatccaccgccaccaccaacatcatcttttgccttccgaaaagaggtctccggtattcgttacatccggaccaggaatcggcggcgcgtaagccacaagtcgctttaatttgttgcccatatctcaaaattccaaaaccaaaaactgggagagaagtttccctctgcgaggccgaagaatggcaacgtaatctatcaacgtcgtctgaactttttgggttgtatcttcatctggtgttaaagttggtaactaatatggcttttataaatttccgtgcaaagggagcttgatctttgagttggagccgtgtcagatggaatgctggacaagtcacgcttgtagaacttgacggtggcggcgatggcgaccgttgggtaagtgtgctagcagaatgaaccagtttttcagtttcagtttcagtttcggtgtgtgctagctaaaaaaaaatcaaacgacttaggccatgtttagttatcaaaaacttttcacaaaaacatcacatcgaatctttatatacatgtatatagcattaaatatagataaaaagaaaaactaattggcacagttagggggaaatcgcgagacgaatcttttgagcctaatttagtccatgattagccataagtgttacagtaacccaaatgtgctaatgacggattaattaggctcaaaagattcgtctcgcggtttgcaagtgagttatgaaattagctttttcattcgtgtccgaaaacctcttccgacattcggtcaaacatccgatgtgacactcaaaaatttttatttcaccaactaaacatgctcttataatatgaaatagatgtagtacttgttttgtctgttgagtttaaatcaagtattaaggctaatgaagtccatttcaaaacttcatagcaagttttattagctttcgcgcattaacagacgaggccatgagagtgatatgtagtatactttaatccaacaacattcaatcaaaaaattaaaaagaatatatggacttaaagtaagaaatgccaaaaaaaataaaaaaggactcaaacaacgcccaccgtggggctcgaacccacgaccacaaggttaagagccttgcgctctaccgactgagctagacgggctttgctggtgccctgaaattcacactatatagatttcaaactgaatgaaaatgatcaagcttaacgcaaatccacgtatttggagcagtgattgtttagccttttcgtgcttgctttgaccgctggaacatgctccaattctggcaccaaccgaagtgtcaaatggtgaccgcgaggtttgcattggtctatggcagagcttgagcagaacctacaatctacagaatatatccacttctccagcatgaaaacattatagcatctccaacagatttgctaaaaaaatactcttttggccagtcatctaaaaaattagagagccaaatttgtcttttactccaacagtttctccattatctccaattaaacaccgggtcccacgcatcagtctatcagtcctcttccttcctctccttctcccaacgcgacctcaacacgaagaaatcggcaacgcaacctcaacgcggcggcggaggacggcggcgggcgcgtcggacgacgccgcggaggtcggcggcggcctcggcagcggtcgacggcggaggagccgtcagcgcggcgacggcgcggagatcggcggcgggcgcgtcgggcgacggcacggagttcggcgaagagcgcgtccggcgacgccgcggaggtcggcagcgggacggcggtggtctcggcaggtgcggcggcggcctcggcaggttgtctcggcggaggggcggaggtcggcggcggcctcagcaggttgtctcggcggaggggcaaggacggcggcggcctcggccggctgtctcggcgacgccgggaaggtcggcggcaggagacggcggtggtcggcaccggcgctggatctgggagcgctgagaaaaagcgatgcgggaggagaggaaaaatcgcggatcggacgggagggagagagaatagaggggaaagcggtggggcccacgattggccaggcctttttggctggctatatttggccagtgcaaggggaactttggccagtaggatggcttggccagccggttagccagtctattgaagcacgaatttgagccaaaattgctacaatttaacttagagaatggaataagaaggctgttgaagatgctcctagaagcctatgttcttttatccactttcccaacttcaccactcatttttcatgcatcttatgatgttctttttataaaacaaaatctttagaatagttgttttaaacttatattaatctatttttcaagttttttaattaatactacctccgtttcaggttataagattttctagcgttgcccatatttattgagaagttaaggaatctagaaacatatatatatatgtctagattcattaacatatatatgaatatggaaaatactaaaaagtcttataatataaaacggaggaagtatttaattaatcacaacctaatggataataccgttttctctaccggggagagattacggctgtgttcgggaggcaaggttgacacggagaacgaagcacacgatttagcaagattaattaaatattagcctaaaaaacttgaaaaatagattaatatgattttttaaaaaacaactttcatataaaaaacttttacaaaaaatacaccgtttgacagtttgaaaaacgtgcgcacgaaaaacgagggaagggagttaggaaagaggggaaaagaacacagccgtatacctaaaagaacacagccgtatacctctccttcggaacaactactactactctagaatttcttggtgactggtgtacactgtatacagccaatgtcccagattgaatgaaaaacatgccatgccccaccctcaacacaacaaagaaaatgcagaccatcatgatttcagagtttcagcgcaattcctaattcgcgcgtacgcgcccgcggcgcgcatttttgcccacacggtccacgcagcaccatagaagctggtgtcagtttctctttttttttcccgtgaaattaggcgctagttttgtttttccggtaatcgctcctttttttttcctctccacacgcgcgcgttttgtgatattttataaattgaatattttaccttcaatatccattgagagttttgaatttgacttgaaagtttcttaaattaaagttgaatgttttgaattttgagatgaaagttttcaaatttaaatcgagtattttgaatttcgaggtgatagtttttaaatttgagttaaaagtttttcaaacgtgagttaagtttttcaaatcttgacttgaatttttttaattttgagttgaaagttttcgaatccaagttgaaagtttttcaagtctgagttgaaagtttttaaatccaagttgaaagtttttaaatccaagttgaaagttttcaaatttgaattgaaagtttttaaatctaagttgaaaagtttttaatccgagtttcagaccacgatggccatttgtttcgggtactagacacacgggacagattccgaacctgattaatccgcagccgtcgattcctcctacgtggctcaatcccatccgtccgacggtgccatccagccctccgatttgaacgtcacgctcctcctccctcaaatacccccgtcgcctcccgcaactagccgttacgctttccccttcctccttccgcctcccacccacccaaaacctaaccccaaaaatcccccaatctctctcgcctgctcgatcccccaatccatggagttcgccgtccctgtcccccagcaggtctccagcctggcgctgccggtggtggtggcggaggcggaggcggccgccgccgccgctgctgctccggggaggaggggggcagcgggcggcgtgagctcgataccgaagggcgctggggctgccgcgaggaggaagacgctgtgcgacatcaccaacctgaggccgcggccggcggcggccgtggagcaggacggggcgacgtgtgccgcggacgcgggcggagtcgcgcaggcgcagcttgtcaaggcaagatcgccgatcctgtgcttgccagtttgaaaatctcggggtcgttcgctaacggtgatgttttttttcggaattgtttgtggcattttttcaggagaactcggaacttgtgaggctcctcgaggagagggagtacgtccctgaaatcactgatttcttgcatcatattcacttattatgtttttgagtggatggagaatttgattatatgtgatcttgttttgacttgtttttgcttgatttcgtgcatacagcaagatcatagagttgagtgggacagagttgcagaagttgcggctcgctaactggcagctcgcgcaggcaaattcccagatgctggcagtaagtttgcccctaatttttttctgattccttccactattcagttgtcgtttgaaatctgtacagtcagttattgtttcacccatcttcttgatggaacttgattgttgtctctttttgttctccaggagctcaaccttgggagagatagggtgagttcatggctctctgatcattgtgaatcttgggaagagttttggacttttgattgttgatggcattttcaacacgcatctgattagccaccatctttcttcttttgaagctaaaaaagctgcaacatcaactcgcttgctcgagagctgttatcgcaacaaaaacatcagaattggaggtataggaactgatgctaatgtcgttcttgctccaccttcgtttcataaattccatggaaaatgttgatgcaatttgctgttcttatcctcttattattgcaggaggccaagaaggcgatgaagcgcaataggaacctgccactgccagagaaggctcctcctgcaagcgaaacggcgcagcagcagcagggttctgatagagcggcacagatcaaggatggagatgtcgtcaatccagagcccgccgcggcttcagacgcatcgcatgcggcaagcaccaagaaactcagcaacgccagcaggaaacggatgcaaagatctcgatgtaacaatggccgctaaccattttgcttgcaatgacctgtactaattctcatcagcatggctcactgattgattgatctatgctttccagctctaggaccagctgcaacgacgaaactagcagcgacaccaaaggagaaggagaatgtgcagagaaggtggacgaaaatctctggagtgccaaatgattcagcaaagtaacaactgatgaactgaattgactgaaatcgcctgtgtgtttctgcaggaagtccatgagaacaccggtaccacagccgagcgagcatagggaggacctgttcgagatcgaggacctccagctcgcgatcggcggcggtggcggcggcggcgacagcaaggccgggaccagtgaccctcctgagcaagcggcggtggcggtggcggcggctcagttcccgcggaggtcgtcgctggggaggccgatcaggagggccacggagagggtggcctcctacaaggagatgcctgtcaacattaagctcaggaggtcctagcctagcatcctctcctaaggccagaatgtcttatagtctgatagagctgcgtgctgcaatgattctttgcagtttagttagttagtgtagcatgtcattttgtttgttggaatggttgttggattgaattcttgatgtaccatgtgtgtattctgagctgtgacacatttatttacggttaagagggggtgctgtgtgtgaagaattgctcgggatctgaccaatttggaaatgaaattatgattaagatgcatctgcacttctgcagcatgttcttctgcctgattaacgttgcataagtgaagaagatacttgtgctacactttgcataggtgaagaagatacttattctcccattcagattcaggcaccgagcatgttgcacaagcagatagctaggcgagacgtatttaatgtatttgacatctttaattggttgtcacaacttggtgaagtggcaagaatcgcaacggagtcggatcatcaccaagttcaagctgaaccatcgttctgaactttatagttggcagctgcaaagtgttctttcaccaaagcaagagcttttcccctgtgagatatttgattcttcactgacttgggcatctcagcgtagctgtaatacacgtgtgtcagtatttgaatcaagaggggtgcacagaaggtagtacaagctatcatgaaactcacgtttgatcaaaaccatctggttggaatactgggtcccatccaaaatcagcaggtcctctagcaggcacaatctttccctgtacaattagaattacacagttcaacaaccaaaccgtctaattttaatgtaatctatgttttgtattttttgtaacaaatgtctaaaaggatggtaccacatcctgcagaattatattgcgtcagtgtgacagaataggagtatatagagcttatctgtctgtaccaaaataaatgcactggagttcatccaaagttccagggaaagaatgatgcatggaagtatatgctacattaacaatgcatatggaaagatatctgacaagagtaacaaaagaatctagtctccttggtgatgctaatattttgcatggtacaaaaaaatgtgatatcaaacagtgtttaatataatgatagctctcaaataaaatgcagcaacacttcaaactataaacatggctgaacataatacatcaatatttgttggttttgacagaagaattattattcaacaactaataagcagaacttctctaaaaacttcacaagaaaaaaaatggaataaacagaaaattgatgtcttactgctgttttcccaacgaatgtcattggttcttctcctggtccaagagcaagagaaaagatgcacatagcaaaagcagatttatcttcataggctagcaacaaattgttcaaacctatgatgtgaaaatagtaaacatgaacttacttagtaaatctctgtgaaaaaagtaccatattataaaatgaaacaagcagatagaaaaaaggatggtttatatcaatgaccttcatgcccagttttctcaaggaaccattttctgttcatcgtgtgtcgagaagcatccagaattgcaaattaagaaaaaagaggttagcaatgacatcgaggaccaagatgtgattagatatctggcaaacagtctcttgatgagtcattgaagtgaagtatgtttttgtgtctaaaagtccaaataactcggtgacaagaaaataggttcaacttacacctcgacaggaaaagcacttacatgtagggccctgcatcaaaagggtaaattatgtcaaattgtgcattctattttgatttaacaagtgaagatgaagaagagtgtaaatcaatcacctggtaagcctttgagtgcattgaagcataggcaggtgtcctcaacaagtacaggcccattcacctaatgtgaagtacacagtgcatatttcacacagagtcattaattttgttgattgggtttatgcaatagcattagcatttaaaaacatgaagtacctgggatgcagccattcgtgctttctctttagatatgtcctccggctcaccttgcaattcagggactgcaagatttaacagaattataaacacaaattcaaaacatataataccgtaatagagaaaaaactaggaacatgacattattaacaagaacatcagtcttcagttggaacagtttgatatttcggaaactaaaattggaagttccatagggttatagtataaagtaggagtccatcaacaccaacgtgatccagaactataattgggaacatcttactctatgaaaatctaatgccggttctcctatgatcctatcgctgttcagctccaattctggtactaggccaccatgaattttacaaatcaatgttcatacttcccgaagttcttaaccagtactaatccaattatcccacacttcaaaggaaaaaaaaaactttaggctatgcgatgagcacaaatcaacattcaaccttttacctactcacaaatcacaattcaacctaactcccgttgagaacaaaaattgaatcagatcgaaatcccacaatctccagtctaatctacgaaccacatgctcactgctatcctaggaggctccagttcagtagaccaccaccgtatcacgcggcggcgccacaactgggctgctagccagcctgctactctactaccctaccgtcagccgagcagattcacacgggactggagacaaaagcgagaaccgagaagcggagacggggaggctcacggtcgagcttgagggactggaaggggatggaggagccgaggatggcgcggacttcctccagcttcttggcgttgcccgtcacgaaggtcaccgccttgggcagcgcccgcgccgccgccgccgccgccccggacatgcttgctgcgctccggtgttggccgctgcttccgccgggaggaacggtgatgcggcggaccggaggaagagattgattagcccagcaaaatagtactcactcagtatgacgccgttaactttttaacaaatatttgatattttgtcttattaaaaaaattatgtaattataatttattttattgtaatttgatttatcatcaaatgttctttaagcatgacataagtatttttatatttgcataaaaattttgaataaaacgagtggtcaaagtcaaacgttgattaaaaagttaacgccgtcgtacattaaatacggagggagtagtagctttaggcccattttaggcagatgactttggccgtgtagaactcgaccatgattttctcctgaggtaaattttacacgaagacatcgtggctttggttgatttattaacttctactcgctccgtccaaaaaaacaacatcgcactaagatatgagtacaacaaatttggacaacgttgaggttggcttttttttatagagggagtatggtaaaagtcagatcatcagaaaagatactcttagaatatttgttactagatatcttgtatgtgtattaaaatatgggtctgtctatatatactgtttgattgaaaatacccctaaaaatcttgcaaattgtagacctttcgatttgcttttaagatacatgctaggcaaactaaccacaaaaccccttccttttcatccttctcctcccaacatcccttcacgctgctgccctctcaccaacgctcgatctgtgccacttccgccccacgcagcactgcctaacctcgtcgcctggctgtaagggataacgccatcggcgaggtctcccatcctatcgtcttccgggtctctagcggctctcttccgcccgatccaccatcaccagtcgccgcctcctaaccaaatgcttgttttgttctagctaccaatgtcggcctaccagactaccaccctcctccatcccccgcggcttcaaagctatcgccggtgtcttgcctactcatgcccaccacctaccgccaccccactaagcccgacgatcatccctctcctcctcccaccctatcctaaaccaggaccctaaaccctaacatcattgccttcgtcggggtcaccaaggctagagaagaaggtaccaccagagttggaggagaatagctagggtcgctggagtacgaatcgtgaagcaaatctcaacattagtaatatgcatgattttgacaaaaaaaatctatcatcaactatttagccattttgttaaaatattcatttttagttgagtagaagatagaaacaatataaattgttgaaaatgtttaaaacgcatctaaccatggttgccacattttttccctcccatctcttgtcccctttctatgttgcccccaggggtagagatagagtatcttataggggtgcccagaaactcagtcaagaaaattttttagctatactttacctatcacctatgtcaatttaaactcgatgtaagtaaagtaaattaagcagctgacatccctctatatttcgttctagctccgcccctgtaaacactaatgtggtgcaccaatgtggtggctgccgcagaagcaacgtggcgaggacaacggtcacatgccgctcgatatcatcgacgcacgccctatggcacgagggtatcgagcaatctacatttgacggggaatttccgcacacaaaaggaagaaaatatgaacatgattagacacttgctgatcatctctgagaaaaatctcggctattactcagacatttttccaacgacatgaatacccacgaccgtgcatcaggtcattgctaaccattattatcacaaggacgacgatgtacagagttttgctgcattcattatgaatacggatctctcggacgaccaatataattacgacactagcaataatcataatcgaaagctggtcaagtcaccttcgtggtggtagcccttccatgtgttgggaacgtacgtccacaactaaggctttgttcgctccagccagatcccaacccaaaaacaaaacggaatagtacattagtgcatgattaattaagtattaattattttttaaaagaaatggattaatttaatttttttaagcaacttccgtacagaaactttttgcaaaaaaaaagaaaacacaccgtttagccatttgaaagcgtgcacgcggaaaacaagggagaggggttgggaactaagggtgccgaacacaccctaattaacgacatactgtagtatccatctttggtgtcgatgttggcggcaaaggtgctagtagtgacctaggtgatgaaaaaagacgcggatattagggaatgacctaatatcaaataataattagaagggatgagactacgaactcaggtcgtttagtccaccagcttatggagctagccggaagactcctgagtatttttcgacctaagtgatgcacacgttgttgtgttgcaaggacatcgatcaagggcgaggagaggacaaacatttgttggtcaggactcggacttttactctggaagatccccatgttctcgcataaaagttttttatgtgacatatataccaacattattttcaagcatcaaatatattaataatttttatatgtttcagtgagtcaaaatatgaaggttaagaaattagtagaacgttatgtatgtgagaacaaggttgagttatgtgacatgacaaatacacaccatcatcagttagtactagaacgtagcaattgatttgttatcggatctaatgttttattctctatcagcctcgtaacttatttttatgggcttagtcaatctggtctactactcgcaatttaccattgcttctcctgaagttccttctcctcctcgttttccttttttcgaggaatgaagtccctccttgctgctcattccacagttttcctatggagtgggatgccatcatcagctttgggtctattttttttaaaagggaacttggagaagttttttcagcaaaattataaacagttattttttaagattataagaagcttagtcgtaaaatccaaaaataaactataaatcagaaactatacaacttctctaattttttcagaatctggtaaccaaccatattacccaaatagccacttcgttcctcaccgtaacgaaattccaccaatccggacgcttctcatcgttagagcaagtttaatagtatagccaactagtagctccaattcatctatagccaatctaatagctcattcatacaatagttacatactacactattaatatctggtccacatatcatacacatactatgtcttggagtccgtgctacagctggctacaaatttttagcccgctgctcttctctctcctcatttatcttcttacaatatgtttgtagctggcttataacctgctattgccctgctaccaagccaggccaaaacgccaaaaccccaggccaaccaccgaccccaccgtccacccacgcgtccgcgtcccgcacgccaatcacacgcacggagaagagagtccattttttttttctaaaaccccgcgtgtcccgcgtgcgggcggtctgattgccgagccgacccggcaaacgaacagcccgacgcccccgacgaccaaaacctcctcgcgcgatctcgcctcgcgtcctccgtccgtcctcgtcaagtcgtcacggtcctcacggctttttcacatctcacatctcgcactcgcatcgcagctcccaactccaactcaagtgggctccttcttcccccacaactccacggaaaaaacctcgcagtacacggccacccaccacctaactcccttccttcctctccctagaaatattcccgcatccgcatcccgcatcccgcctggtttgtgattcgccgaacagctttgccgggagaaagcgaggaaggaaggaaggagaggagggagccatggagaaggcgatcaacaggcagagggtgcttctcgcccacctggagcccgccgcgagtcccgccgccgccgcgccggccatcaccgtgagtccacctaccgccgcgttccgccctggggtgtccagatctgcgcggcgtgctgatgtttttgattgttggttttggtttggttggtgcaggcgagcgcgtgcgccgcgggggacagcgccgcgtaccaccgcggggcgtgcttcgcagacgacgtcgtcatcgtcgcgtaagtgagatgtgtttccttccccccgcggcggttctgccctttggccatgccaatggcctggattttatagcttctgattatagataatttatttagatcggtgaaattgattcaagatggatggctgtttttgtgttgaccgtgttcttctcccggtcgatggttgtcgggtcaaatttagttatcagcttattacgaattaaacctggacgaaaatagtaaaggtctttcgaaaaatatctggacgaagaaaaaaacggaattgctatatttgtgtcgctacaattttgttcattttattgtcagatctcagaccatccattgctgctttgagatttgcctgttgcagttgattatcttcaaaattcatgctagtattcactttcacttggagattaaactattatcactcatggataaattactcatactaattacatcgtacttattgtaattttgggacttatattgtaaatacactaaaattacatatgtaatttaggaacttacaatgtaaatacatgccgactattttttggtgaaaaatatggcgtcttaaatatagctactccccccccccccccccccccgcggcaaaaaaaaaagctatgaaagttatgaataaaattgggctacttgtttccgctaatattttgaagaccgcatgttgaataaggagaatgatatataaacatgaaagttttagcattgccaacataggggaaaagggtgtcatagtctgatagccgttgtgtcatatggtctggattatataggatagttagctgccgtaagacaactcgtgttggcctagtttctttttctcgatgtaatttcattgctaaataaaatacccattatctaaaaacatatgaaaaagagagccaaaaaagctgtgaaaaacacatgtgattgttgcttggtttaccgttagattcagtggcaagtgatttttttccttatttgattatcataagtcataaatagaagtgaatcatgggtcttttgtgtcttcagtgcctataggacagcaatttgcaagtccaagagaggtggtttcaaggatactcccgcagaggacctcttggttccagtattcaaggtttgtatttgttatcatatactcattttctcccaacttgacaattagtgaactggttgcttctgtctcgacctttggtctcattctcatatattttgcctcccaactacaggctttgatagataaaacgaagttgaacccaagtgaagttggtgatattgttgttggtactgttttagctcctgggtcccaaagggcaattgaatgcagaatggctgcattttatgctggattccctggtaagagtcataataaacattatcatgtttgccattaatattggactgtcatcattctcaacttgattaatttgttttgtatgctccagataccgttcctcttatgactgtaaacaggcaatgttcgtctgggcttcaagcagttgcaaatgttgcttctaacattaaagcaggactttatgacattggtatgatccgctggtggttaatcttaagaagtcctttttgtgaggagaagtttgaaaaaaaaattcatggtgaactgacttttgttatttattcaaggtattgctgctggcctagagtccatgacagtgaaccaagttcgccttgatgggcaagtgaaccccaaagtatgtgaaacatgatggtcaatgcagcaagataatctttggatgcacgtgtaaagatatttgagcttgatttttttttggctgaaatctcccgctattttaggttgagctgttttctcaagcacgcgattgccttctcccaatgggcctcacgtccgagaatgttgcaaaacgatttggcataacacgaatggagcaagaccaggctgctgtaggttgccttatcaattctttctttggacatgtgtattgatacacagtgaagtgttgcacaatatgattctttcccttattattttcatatattgatgtttaggttgagtcccacaggaaggctgcggctgcagctgcttctggtaaattcaaggaagaaattgttccagttcacacgaaggtaatttagcagcttggttatcttcctaaaataactgtctgaactctttaatattattgttacatgatagtcttctgtttactgtgttatcctgacatgatcattgtgttgtgaagattgtggatccaaaaactggtgaggaaaaggagatagtggtctcggcagatgatggaatccgaccaggcacttcattggcagtcctgtcaaaactcaaaccagcattctctaaagatggcaccactactgctggtaacgtgtaatgaatgtttgttaggcacaactgttgattagttgtattcacctctaaagattagtgtttgttttaacccataggaaacgctagccaagtaagcgatggtgctggagcagtcttactaatgagacgtgacattgctatgcaaaagggtcttccaatagttggcgtcttcaggtattagtatttctctatgactctatatatcatatcttgggtcacaactcacatctataggcattgttttcagcctaattaaaaaagtaccaaagaacattaattttaagtttttaacaaggtggttcaatcttcccttcttagtcatgaaagcaaataggcatatggtacaactaactgtcgcaaaactttgttaagaaactcagcatgagctgaatgtggaaatgtaggagctttgcagcagttggagttgatccagctataatgggtgttggtcctgctgttgccatccctgcggcagtgaaagctgctggtcttcaaatagatgatgttgaccttttcgagattaatgaggtatactttcatccattcatcgagtttctccactagacaacagatctgccttgtaatatttatttgctcttgtacacaggcctttgcatcacagtacgtatactgctgcaagaagttgggacttgatcctgcaaaagttaacgttaacggaggtgcaatggctcttgggcatccattgggtgctacaggtattttcttgctgctatccttgatacttatcgtatagccaaactgttattttagtatcagtaatctataattaagcaaatgtgccaattgcaatgatatttctcatgtttcctcttggcaggtgcacggtctgtcagtacccttctcaacgaaatgaagcgacggggcaaagactgtcgatttggtgtgatttccatgtgcataggtacataaccatattccattggcctgcatgaaaattcaaaataattctttcagctgggagtaacttgacaagaacttctggtgaacaggttctggcatgggggctgctgctgtctttgagcgtggggatgcagtggatgagctcactaatgctcggtgcatcccgacccataaccggctttcgaaggacgccatgtaactagaactatatatatatgtcataaaaattgtgcaactgccactattgtttgaaatatcaacacaagagtagggaataaaacgcttgtgtatctgtaatctcatccagctctgaacttggctagttggagaatccttgttaattaggaaattcatgcataataactcaaaagttgtcccttgtcagcctgttcatctgattaccttttgctttcgaaagttatcagatgattgtctatttgtatcagaaaatgttgtgaagcctgatgcatatgacgcgggattccggtgaaaggatagaccaacttgtctaaaaagaaattggcaccctggtttttttactttcccctgttcaaatttatgcgtaaaatgaaggggggattttctccgggacaaaacatctttgttgctagttcgatgcctaagcccatgcttctcttcaagtagagaatgggaaaacttcatgttccatagacagtgaaaatatcatgggctgtttgcctcttttggacgcattgccataaaagtgtggctaacgaattattggccagacacttttctggtgagatgtggcaaaaaaatgaatagcacaaacttaaagttacgcagggattgtttttgtttggttacatacaacactttgttacgctaaatgtcaggcatatttatgtagcaaatcatgccgtctaaaactctgtccttaaaaaaaaaaagtaaactctaactatgccgtctaaaactctgtccttataaaaaaataaactctagctatgaatctggacacgcatatgttcgggttcgtagctaggattggacttttatatttatgtggcaaatcatgccgcatgaaactctgtccttaaaaaaaaggtaaactctagctatgaatctggacacgtgtaacaccctgaaaatttgaccaataaaagcaaaactctaaaaatacggaccttcgaaaacttttaaattaattgcatcatgctgatcttattcgcctattttatttggatttgatttcgaagttcattaatcgtgagtaaagaatagttaattaggaataaaccctagaagtaaattggtaaaataaatataatttaaaataaagattagtgtggatagaaataaataaaatattatcacgatcatattcgtatcaattaaatttaaatgcgatggaataagaattaaccctaattaaaaattcaaataaattatacaaataaaatatgagtaatattaatctagggtgaattcattagttgagataacacaaatattgagtaaacttcatttatgcaagatttataaattatagaatcaaatttatatgggaaataatctaaaatcgggataaataggaaaatacactgttcattatggcgtaggtgtttgatgcggtccctaaccttccccctcctctcccatctctgcccctagccgccccgagcccgcgccgacgcaccatcgccgcctgccgccgcgcgctgtcgccccgcgccgcgcgccaccgccgtcgccatcgccgccttgagccccgcgcgccatcgttgtcaccgtcgcgtcgtcgcctcgcgccccgcgcccctgcctcgccgcgcgcccgtcccatctaccatgccgcgcgcgcctcgcgccccgagccgtcgcgcgctgtcacttcgccgctgtcgcgccgcgctgccatcccggcgtaccacgcgcccacgcgccccgtcaccgccc

SEQ ID NO: 2299 - DNA, 1293 bp, Oryza sativa
tgtatgcaaagtgctatatattagctcggttctttattagttgacgtcccgcaactcttgctacgtctatatttcaatatagagcctggtcactcatgtttggacgtatctacagttcatgtatgaatattagatcattcggtttaccgtttaaacaattataattttatcattaggttgtaattgattttgaagatttttaaaaaatacaaccaaaatccatatcgtgaaactgtctctctctccatatatatttatacttatattaattaggcactttaatttttacatcatattatcatcaccttagatcttaatctgttttaatattatgggcattgtttaagctgatccaaggggctctaggaaagcccatttaaagttggttgcgaccaccaatccaatttgtcacgctcgtcctagttgggcactttgactcctatattaaccgggaagatttttgtcattggttcaatgaatcatgttattatagatcttaatttgttttaatattatatggtctttgaagtgaatccaagtgcccatttagagttagttgtgaccacccattcaacctatcacggccgtacgtttctcatccccatcgtacctaagccgacagctatgtatatggtgtaggatcgagatgtcgactaggaggggggtgaataggcgatttaaaactaaataacacctaatcaaatctaacctaagttgctaagcttggtgagggtgaattctaactaagcaactaagttatgttttgtaaacctagggtgatagtggctcaaatatatctctaggaaagtaaatcacgctcctatgtcgatgttttgcaatcctagggtgatatgatctcaagtgtgtctctagaaatgtaaattgcacaaatgtaaatgcgacaattaaatgagacaatgagacaagagatttttcaccgaggttcggaaactcgccggtttcctactccccgttgaggcgagcccaactccaccgctcaaccacgaagccaccgcacgcccccttcgtcaaggggtgggcaaggcgggagccggcccacggagaggactacccaaacctcgatcactcggggtagttcttccttcactccgaaggtggtgaactccaaaccactcacaaccggcgccgggcctcctccacaatcttctcggagaggtcaccgggcaactcctccacaagccgtctaggaggcggcaacctctaagagtaacaagcaatgacccggtgtggagatgatcaagtgccacactagctctacaatggaagcaaatg

SEQ ID NO: 2300 - DNA, 1627 bp, Oryza sativa
gagttggagaagagaagagatgagatgggatgaggaggggtcgggtagaaggaggaggaggaagaaaggacaaagtcctgggcccaccaaccctggccggtcagaccggctatacgcgtccggtcagaccgccagggtgcagccggtcagactggtccctagaggccggtcagaccgccgccaccaggccggtcagaccgcgcatatagcgccggtcagaccgcctggcccccagccgactgtgcacagcccttgcacagttcggctacccccacacaataaaattcaacaaaaatttgatttttggagcaattttgaaatatgtgagttgaaatattgccaaccattcataatatttgaaatttatgaagatttgcaacaaaactcacttgagtgctaggaggtgaccatttatggtctataggggtttttgggcgaatttgattttcaaacaacttttggaatatttggtttttgaatatgatttgaataccaaaaacatttcaaatcctcctctctaccaactttgttttgaaacttttctcagattccttctcaaactcattttggggtttaatctcattttggccaaaaacaaaaatctagattcttcaaaagagagccaaaatagcatttttcattcaaaaatcatttttctagcaaagtgaggcttggaaaacatatagggacccttttgaaacattttccaagagatagttttcaaatttcattgattttgcaaaagttttgacttatattgacttgggcattttgaaaacactactagcacttttagttgatttgctcacatataaaaggaagtagagcacatgcaagagtccaaaactgccccttaatgtgacatgctccattttcgcaatgaagaaccaaatgtcaataagtccaaagcataagagcaaataggagcaaatatacaatatgcaaaagaagcaaccatggtgcaccatctcaagccacattagagaagtctatgacatttaactcattcctcaacttgcaaaagcgggtttcattaagaggcttggtaaaaatgtcggctagttgatcctcggttcttatgtggctaatgactatgtcacacttggtaacatggtctcttaggaagtgatggcgaatgtcaatatgcttggttctagaatgttggaccgggttattggctatttttatggcacgatcattgtcacataggagtggggttttggtgaaggatataccatagtccaacaaggtttgtttcatccaaagcaattgggcacaacaactacccgccgaaacatattccgcctcggcggtagagagggctacggagttttgtttcttggatgaccatgacacaagggatctaccaagcatttggcaactaccggatgtgctctttctatccactttgcaactggcataatccgaatcggaatagccaacaagcttaaatttagcaccttttgggtaccacaggccaatagtagaggaatgctttaaatatcttaaaatccttttcacggccactaagtgacactccttaggagcggcttgaaaccgtgcacacatgcaaacactaaacatgatatccggcctagatgcggtaaggtaaagcaggctaccaatc

SEQ ID NO: 2301 - DNA, 728 bp, Oryza sativa
ttaccgaaagggtgttagactaaccaaagttgaaagtcggtgtgatgaagggtttcttctaggttatgcctcaaatagcaaggcataccgggtctacaacaagaacaaaggtattgtggaagaaaccgccgatgttcaatttgatgagactaatggctcccaagaggggcacgagaatttggatgatgtaggtgatgaaggcttgatgagagctatgaagaacatgtctattggagatgtcaagcctattgaagtggaagacaagccatccacctccactcaagatgagccatctacttccgcctcgtcaagtcaagctcaagttgaagtggaggaggagaaggcacaagatccacctatgcctccaagaatacacaccgctctttccaaggatcacccaattgaccaagtgttgggtgacattaataagggtgttcaaactcgatctcgtgtcgcttcgatttgtgaacattactcgtttgtttcttgtcttaagccaaaacatgtagatgaagttctttgtgatccggattggatgaatgctatgcatgaagagctcaacaactttgcaagaaacaaggtgtggattttggttgaaagacctagagaccacaatgtcatagggacaaagtggatctttaggaacaaacaagatgagaacggattggtggtgagaaacaaggcaaggttggtggcgcaaggtttcacacaagttgaaggtttggact

SEQ ID NO: 2302 - DNA, 13704 bp, Oryza sativa
cttaaactcattgttctcaacaacaagtgaggcatcacaaatagaaacacacgagctagaactagagcaagggctaggcatatccataagatcatcacaagaggtagaaatgctagatgatgcaacatgagcaatatggcaagtagcactatcatcaagcaaatcacaagatatgccaacatcaatgtgagctccatgttgagtagtggaaaggaggttgtcatgagcttccttaagcttctcatgagaaatggtgagtctctcattagaggtctttagctcctcatacaagacatccaaagaagcataatccttgtttagggccttgaacttgacaatctccttctcactataagcatggagctcctcaaacatactcacaagctcttcataggaaacatcatcacaatcatcatcactctcactatcactaagagatgttaccttagaggaaccctttgccatgagacaaagtggagcgaagagtgatggagcctccttgatggcaacaacgaccatcttcttcttcttggagcttgcatcatcaccaccttcttcctcagacccggatgaggcggagctctcctcatttgagtcccattccccgatgaaagcctcaatcttcttcccttccttcttaagcttcttcatgagcttgtagcctccactcttcttcttggatgacttgtctccatcatcatccttggaagggcacttggaagcaaagtgtcccttctcaccatactcaaaacacctcaagttggagagagtcttattgagtcttctatttcttctcctattggagttggagccccttcctctctcctttctcctttccaagagatcattgaaccttctagcaagaaggatcatctcttcctccaagtcctcattgacttcattcaccttactcttgctcttgtcttcaacttcggcttggagagcaatgcacttcttagagggtgaggcttcctccatctccttcttcttcaacttgtacatgtcattggtgttgatcttccccaagaggcttgcgggtgtcattcttgacatgtcggagttgatgagcatggtgacaagggtctcatacttctccggtagggctctaagcatcttttgggcaacctcaagatcggtgtagtttgccccaagccccttgagatcattcacaatgacattgagcctcccatacatgtcattcacactctcatgaggcaacatgtagaatgtctcatattggatcttgaggaaatgaagcttggcatccttgtactcacttgtaccctcatggatctccgccaacttgttccaaatctcatatgcggtctcaaggttgctcactctatcgaactcctcttggctcaaagagttgaacaaggcattcatggcttgggcattgagttggaggttgcggtgatcaatctccgtcaagggtgtgccggtgatggcaaagcctacatacacaatactccaaatatggaagctcatagctttgaggtgagtagacattttaattttccaagtggagtagtttgtgccattaaatatgggagccttccctacatggttcacctcgttcgacatcttctctctaggcggtgaagcccaatcaagagagaccaagctctgataccacttgtacgatcgagatgtcgactagagggggaggtgaataggcgatttaaaactaaataacacctaatcaaatctaacctaagttgctaggcttggtgagggtgaactctaactaagcaactaagttatgttttgcaaacttagggtgatagtggctcaaatatatctctaggaaagtaaatcacgctcctatgttgatgttttgcaatcctagggtgatatgatctcaagtgtgtctctagaaatgtaaattgcacaaatgtaaatgcgacaatcaaatgagacaataagacaagagatttttcaccgaggttcggaaactcgccggtttcctactccccgttgaggcgagcccaactccaccgctcaaccacgaagccaccgcacacccccttcgtcaaggggtgggcaagacgggagccggcccacagagaggactacccaagcctcgatcactcggggtagttcttccttcactccgaaggtggtgaactccaaaccactcacaaaccggcgccgggcctcctccacaatcttctcagagaggtcaccgggcaactcctccacaagccgtttaggaggcggcaacctccaagagtaacaagcaatgacccggtgtggagatgatcaagtgccacactagctctacaatggaagcaaatgcacttgactcttggttaaacaaccctctaacacactagatggatgaacacaaagctcaagtgagtgtgagagaggtgcaaggagtgtatgcaattgaattgggtgccaagagagcccccttgctgctggtgggggagtatttatactcccacccaccaaaactagccgttgggggcgaaatcccccaactctgtgctctgccggtctgaccggaggtatgcggccggtcagaccgtgctactctgcaacggctagaaaactagccgttgtagccctgtcagagggccccatcggcctagccggtcagaccgacatggggtggccggtcataacagcctcggctcggtcagaccgccatcggctcggtctgactgactatggctccgtcggctctgtatcggccatcccgagcagcatcatctcagcctccaggaggccggtctgaccgggaaagtgccgccggtcagaccgccactatgtagccggtctgaccggccagggcacgccggtcagaccgccactatgtggccggtctgaccgcccctggtcaggccgaacccagtgaatttgtgtaatgaaaaagagagcacaaatgaaaatgcaatgacctaatgtggcaattaaaatcatctctttgctaggtcattacccctcttaatagtacggcgaaactaaaattaaactagcaaatttgatcgtcctacacctcgatcaattctaaattaaagcgctagttttaccgtcttctttccctttgctttgcgccgtcaattttaatccatccataatcatccatgcgcgcatatgacgtagacctaacttaaaatatatagctcaaagacaacggtttgtccacaattagtgcttgtcattaattaccaaaattaacaccgggggcctagatgcttcatatggatgaaaatgatcggaaaaacggctcaaccattttcataaccatatttttcttagaaacgaaattggaaacaataaattaaaaacaaaaacggtatcgaagatataaaaaactataaacaagactatatggacagaaaaatgtcggcatcaactgaaaactagtaatacatataaaaaacattaaattgtaaaactacattttaactttgcaaaactatataatataacaaaataaatataatgttacattgaataaatgataaattgtgtacctttctaccatacactcaagttcattatctggttgaggtgttgatggtcctctaaaccatgggtcaaatagagaaatgaaccatagatatgataggcgtatttagaaatacaataatcaacataataaaaagtattttccataatacgctaaaattcgggaacggtcggtaggacagcaaaatcgtttttcgcttctatgtccatatttcttaccattaattttcgttctcatttaaatacacttctacatataatgatacatgtagaaagaaattttcaaagttgtatattaaatctaactccatgcaaaactacgtggggaaatcccctagttaattctattgtttggttggtgaatgtgtgagttttaagaggtattgggaaggaaagtttaagagtaaactcccaccttttaatacctgtatagggataagtaattgggagggaattttcctcctatgtacaacgaaataaaagtcatacatccatcactaaaagttcaattcctatcatacaccaatacgaaactgaaaattcaattcctatcatactcatctgtatgaaactgaaattaattaaaaaataagacttccatgctaggtacatgcaaggaaatagccgaagatgggaaacggtaaagaaatttcaggatcggtgaggccatatgtatttaattccattataacaaaaatttcgcgaatacataaaaggattgcacgtcaatatattagaagaaaaagagtttttgttacacaccgcaatcagccagaccggtttatgccagggaaaaaggagaaaaagcaaaacaaaactgaaattgaaactaggaaaaagactactacggtagctaaatgcaactccaaacagcgggaaggtgtatagctacgctacactccctcaaaaacgggaacgtcaactaaagaccatagatggccctccgagaggatggactccagaaccactgagaccgaagagagcgcagagttgaaaacctaagagtttcgttcctttcacagctaccactcgaaacttaaagctggcgcggagatactcgggtaagcagtccctacacgatggccaccagttctaaaaccagctgccacgggggatttaaaaagaattaaggcaatatgtatatcgtcataattgctcggtgaagctggcaaaatgtttttcctttctttgtacagaccatcggtagcctcgatctttgtgtcgcatcttcatggagggatcgaggcaatgggacggttgcccctgtgggctgtttcgaagcaagcggagcccgtgagattcatgggccggaatctcccccgatcctggtcgctgatgctttagactttggattggcgcaatgtcccgtggatgatgggccgaaatttcttcttagcttcaggtgggctgggttgctatgcggtgaatgctagtgcagcttgctttgttaaccggaggaataagttcactagtggtccctcaacttaacatcgagatcttttaagatcccttaaccacaaatccagaaatgtgcacatatcaaggtcctatggcagtatatatgggtggtttcgctgacgtggcatcctaatcagcaaaaaaatttaaaaaaaaatgtggagcccacatatcagctgcacatcgttttccttctcttttcttctccttctcttctcttttctgtcttctctcttctcttcttcaacatcgaactgaacaagttgaaccacgagatcgatcgatcgattgatcatagtgttggcagcatcatctggagcatgggagccggccgggatcggccctgccgcgacttgaacttcctgatcgccgccttgagcacccgcctcctgaagaatccaaccagcagaagcctcgtcgtaatggcggatatgattcatgaagcgtaaagatggggggatctgtatgcagaaagctaccttggctgggagaggtgatggcggcggcggtgagaagtccagcctcgcgcggcccgtcttgtggaggttcaggaaggagccgtcctcctaccacagcctcggccgccggcgctgcgacctcaacgacctgcccccaatggcggccctcgccctgcgcttcgggttggcgatgaggaagtccctcgagccctcggccccgcctccgccggagtgcggtgacgacgcgcagggcaccttgttcagcggggactagatgccgctctgggagcagtcgaagtcgaaggcaaaggagtccgagaacttgccgagcagccccgctccaggtactccaccgtcaccacgcgctccaccaccacctgcggcttgacggcgggcagagcagcggggggcgagcgcagcagcggagcgacggcggcggtagcgggacgcatgaggcggggtcggaggcgaagtacggcgcgaccggcgaggtcgaggcggggctcgggtaggctgaggccgacgacggcgcggcccacgacatcgaaaacaagagcgaggagaagggaggcgtgggaacgggcgggcacggcgaagttgaggacgaggacggggcggccggcgaggtcgagacggacgacgactggtctgcaccgccggccgccgccttcgcctcgtctcatctctcccaccgcctatgctgctcaagatagatgagtcgaggtggccggccaccgcccttcccctctccagatgcatcttcggcgaggacttcgaggacctgatgccggtgatgactgttgggaatcaaagcaactcacgcgaacacagtggacacaaatcacacttacgcgtgaagagcacaagaaagaagaacacagaacactgagtatttgtggcacaagcacgcaactggtgccttttctcttgcttttcttcttgttaacaaaatgattacaatgagcagctatttataacacagcacatacacaaagctggttgttccgcttctcaagccacacacgacgcccacgtcccgtttacttggccgcaacttcacaagtactgagtcttcgccgacgttcgttgcttgaaccaaccaactaacctgcatgcatgcaaactgaccacttcctactcctaatcttgtgcaagactcggctaatcactagcccataattatgcatggctaactaactaagctacatacatgtgctctcatctactggctctttattggctcactactcactgccaaccactactcactaagccatgcagcacccacgtacatatagctagctctccagaccatgcaacacacacatatgcatatagataaacatgctgaaattaagaaacaacaagattaatttctaacaatcaccccctaatcttgttgtctttatttgacaccttctcacttggattcaaagcagcgtcggctcgtcgtcggcatccgcaaccacaaggtgcgcctgatggttcttctttgtttcatggcacttcttctcccaagagtagtgaccatactcctggcaattgtaacaacggacctttgacttgtcaaacgtgtcgccgttcttcttgcgatttctcctacgctccagccactgctcttcggtgaggagcaagcggccgccatcaacgccaccatcattgtcaccgggcctgtaccgctcctccacagttcggaggcgccccgtgacctcctcgatggacagcgtcttcaaatcaagcaattgctcgattgcaatggccacctgcacgaaccgagaaggaacaacacgaagaaatttctgcaccaccttctcctcctccagtgggtcaccgagcatgcggaggttgttgacgatggcgttgagcctcatcgagaattcatccacagactcactttccttcatgcggatcaactcgaactcattccgcaaggtctgcgccttcgcttctcgcacacgcgcaacaccaacgcgcatggtcttcaccgactcccacgcctccttggccgtatccttcaccgccagagtcggcaacatctccggcggcacggcacggaggatggcggagagtgccatcctgtcatcctggtactccgcgtagccgggctcaattgccgaccacaaaccttgagcctgcaagttcacgcgcatgacgagagcccagtcggtgtagttggtgcgcgtcaacatggggtagaccaccgagccagccgtctccttcatcaccctctgcacgatgatctgctggccgccattgttgccgccatcagtgccgctgccgtcggcgccactgccgctaccgctaccgctaccaaatgttgggaatcaaagcaactcacgcgaacacagtgaacacaaatcacacttacgcgtgaagagcacaagaaagaagaacacagaacactgagtatttgtggcacaagcacgcaactggtgccttttctcttgcttttcttcttcttaacaaaatgattacaatgagcagctatttataacacagcacatacacaaagctggttgttccgcttctcaagccacacacgacgcccacgtcccgtttacttggccgcaacttcacaagtactgagtcttcgccgacgttcgttgcttgaaccaaccaactaacctgcatgcatgcaaactgaccacttcctactcctaatcttgtgcaagactcggctaatcactagcccataattatgcatggctaactaactaagctacatacatgtgctctcatctactggctctttattggctcactactcactgccaaccactactcactaagccatgcagcacccacgtacatatagctagctctccagaccatgcaacacacacatatgcatatagataaacatgctgaaattaagaaacaacaagattaatttctaacaatgaccgggcggctggacgacccggcgagcggcaccatccccgtggagacccctgtggtcgccggtcctgtccttctgggctaccgccaccgccaccgccgggcacgaccatcccgggctacttctcgacggctgggcactcgagtgaatgcctcatctccctccctctcctgccttcgcctcccgcgaaagctgatgctccgttgcggtcgtcaatggccacggcgctctccgctctgcaccgagggagcgacggaggtctgtgctgacgccggcttaggaagaaaagaggagagggcagctgacatgtgggccccatgtactattttatttatttttttgctgactaggatgtcacgtcaacaaaaccaccaatatatactgccataaaaacttgagtatacggtttgtgtaagtttagaggtacacatttctgattttgtagttaagggactttaaaaaatctcgatgttaagttgagggatctccggtgaacttattccttaaccggagttccttaacgttgaattatgtgcagctcaacaacgtcgactattacgtgcagtgaagaggtacaaactacttcctccatacattaagacggtttggtatcttcatcactcatctaaattaattacgtacatataaatctaatcacttatatgaaatgtatttaaaatctaaaacgtttaataatatgaaacaaaaaaagtagaaaacgggtacaaaagacacatagagggaaagagagagcgttcctatacaatatgtaaccagagctactatctcactttctataagcataaacggtacgtctttttaaatattcttttatataaaagttttctttaaaaaattgaaataattttattttttaaatgagagtagctatatttatggtgtcatatttttcacaaaaaatagttaacatgtatttacattataagttcataaattatatatgtaaatttagtgtatttataatgtataagttccaaaattttatatgcaagtctcaaaattacatatagtaattacatgtgtaagtggggtgtaaatttaaatcttactacattggaaaagttaaaaagcaaaagcatgagcagtataggagatgattttgagaagaaatcgaacggtccgaacaagcacaacctaagacatgtagtctcgtgtagtcacgtagagcaatcgtacgcacggtaaaaccgactgagattaggcaaaaaaaatatcgacatatttttagcagtccgttttaaatttgtaatcgttgatccttaactaattatattgtaatgactcgtctgtttttcatgtcgttaaaaagctcagctcatgatctgattcaaacgcatcctaagttttttttttagcttatgaacctcacatattgcagtgtgtatctcgaatgattcccccttctttcccgattgatcgtcgtagtgccaaaagtccaaaatatgacttagcattcataaaaaaaaaaactttcgttactcgttaagatcctctcataatctctatttcttcatcacttagttattgcccaattttttttaaaaaaaaccttagcattcataaatctaagggtctctttgaatcaaaggatttatatagaattttatatgattcaaattctatagaaaatttttctatttggcttttgattcaaaggattgaagctttccaaatcctatgaaattcctatggaatgacacattgcatgtggattttggagaaaatttagcaagagctccaacctctttgagtaaatttcctttgagtctatctctctcatctgatttatgcgttttcctgcgctccttttaaacgaccattcctgtgtttttcctgtgttttgtaattctctgttttacacttcacttcctgttagaattctatgttttttctatttctctgttttttttttctaccttgcgaataaaaggggccttaaatgtgcatttaatggtttggaacaggttgcacaaaatccggagttccggacttctgtcttgtttatttgagcattcctaagctcatcaccgactagttaatgccccttgctcggttaatcctagattcctagtgtgagtggtacactaatcgcccttagagatccacgtcgcgtttgaccatgtccatgaccacctgagcagtgagtgagccagtcagccagtgagctactgagcagtgaccactagtaggttctactcgtcggcaaccgatcttgcctcgccggagaagacaacgcccgcggcggcggcggcggcgacgctctccttttgatgctctcatgaagcggcacaacgcggcggaggtgccggtgccggtgagctacggcggcgagcgggatgagaagaccggaagcaaggtggataagatgggtggtggagcggctaggcggtggcggagcggcggctgctgctcccgcctctggctcgtgctcgtcgtgttcgccaccgtcacgatgctgctgcgccaccgctacgactccggcctcggccatggtgccgccgccgtggtgcgcatcgagccggtgcaccggaaggtgaagccagccgatcgcggcggcgccaggccgtcgttctccgattccggcagcgcgaagccggtcaccgtcgaccacaagtcggcgacgaccgattcttctaccggaacggagtctgacggtggaggcgagccatcgtcggcgtcatcttcgctgccggcggcggcgcacccgttctcgcgcgcgctcgcggcggcgggcgacaagggcgaccggtgcggcgggcggtacgtgtacgtgcaggagctgcctccgcggttcaacaccgacatggtcaagaactgcgtggctctgttcccgtggaaagacatgtgcaagttcacggcgaacggcggcttcggcccgccgatgagcggcggcggcggcatgttccaggagaccgggtggtacaactccgacaagtacacggtggacatcatcttccacgagcggatgaggcggtacgagtgcctcaccgacgacccctccctggccgccgccgtgtacgtgccgttcttcgccggcctcgaggtgtggcgccacctctgggggttcaacgccaccgcgcgggacgccatggcgctggaggtggtggacatcatcacgtcgcggcccgagtggcgcgccatgggaggccgcgaccacttcttcaccgccggcctcatcacgtgggacttccggaggctggccgacggcgacgccggctgggggagcaagctgttcagccttccggcgataaagaacatgacggcgctcgtggtggaggcgagcccgtggcacctcaacgacgccgccatcccgttcccgacggcgttccacccggcgagcgacgaggccgtgttcgtctggcaggacaaggtccgccgcctcgagcgcccatggctcttctccttcgccggcgcggcgcgcccgggcagcgccaagtcgatccgttccgagctcatcacgcagtgcagggcgtcgagcgcgtgctcactcatggagtgccgcgacgggccgagcaacaagtgcggctcggcggcgagctacatgagactcttccagagctccaccttctgcctccagccgcagggcgactcgtacacgcgcaagtcggcgttcgacgccatgctcgccggctgcatcccggtgttcttccaccccggcacggcgtacgtccagtacacctggcacctgcccaggaaccacgccgactactccgtctacatctccgaggacgacgtgcgccgcaacgccagcatcgaggagcggctgcggcggatcgcgccggccgccgtggagcggatgagggagacggtcatctcgctcatcccgacggtggtgtacgcgcagccgtcgtcgaggctggacacgatgaaggacgcgttcgacgtggcggtggacgccatcgtcgacaaggtgacgaggctgcggcgcgacatcgtcgacggccgcggcgaggaggagaagctggagatgtacagctggaagtatccattgctgcgagaagggcagaaggtcgaggacccccatgagtgggattcattgttcgcgttcgcctagctcaccatttctaccaattaaatttgaccttcatgtttgtgaagtgatctatcacaaattaaattatcttgttgtgttttaaaaaaattatttatatttatagtgacatgcaacaacgaaagaatatctcctcgaaaatttagaatagttttcgctatttgtagttttgtagagcaagatgggaggtactaggatagcttctttcttttctttctcctatatttgcttgtcaaccttttgtactaggaagatctctaactaaattagagttcaatctatcgcattcttgccttttagtatgtactctctccgttttaaaattgaagtatttttagtttctttagaaaaactaaggcatagagaaaatattatttctagtcacttttattgccaaattttattttttaaattatttatatttctttcccaagaatcccattagttgaaaatttatgattttcgttgttggatttagtgtcctaaaagtatttatattatggtataaattttatatcacataaatgcttatattttaaaaccagggagtatgttttaatctgttgagcacactcatatcacctctatttcccaagtatatctatgctttcacattgcatactttttaagttgtcacccagtgcgatagagaagctgacagtaaacagattaatattcctgcaaatgtagccatgatactaatggaaagtctattcatcttaaagggatgtcgtttttcatgtctcttgagaagtcatcgaaagatttgaaaataaaactaattagatagattaatatgtgatatgttatttaaatttataaattgaaataaaaacaataaatttgactttgaataaaacgtgtaattcacgatcaaatttggctctgaataatgcatctctctactactaattcttgattaggagtactgtcatagtgttatacacacggcttataacgttctttttggatatatatgatgcaacgcgatgaataatttctaatactttaccaaaagataaacaaacttaaagaatttcatatgttacctgagccgagtcgaagcggttctaggctcaaaaaacttgtgttagggcctccatcctactgtacgcactgctcgcctgggccaagcctgctgctgcccgctaagctagcttacagcccaatgacaaagccgaaaggaaaatcagcaagctggcccttctcttctctgttttcttctactttttcatcagttattccagggctttagctttacacgcgcgacgggcttgatcccaatttgatagtacgaactacctggcatcattttcctaatttttgtttttattatg

SEQ ID NO: 2303 - DNA, 3054 bp, Oryza sativa
tagaaaactagccgttgtagccctgtcagagggccccatcggcctggccggtcagaccgacatggggtggccggtcagaccggcctcggctcagtcagaccgccatcggctcggtctgaccgactacggctccgtcggctctgtatcggccatcccgagcagcatcatctcggcctccaggaggccggtctgaccgggaaagtgccgccggtcagaccgccactatgtagccggtctgaccggccagggcacgccggtcagaccgaacccagtgaatttgtgtaatgaaaaagagagcacaaatgaaaatgcaatgacctaatgtggcaattaaaatcatctctttgctaggtcattacccctcttaatagtacagcgaaactaaaattaaactagcaaatttgatcgccctacacctcgatcaattctaaattaaagcgctagttttaccgtcttctttccctttgctttgcgccgtcaattttaatccatcgataatcatccatgcgcatatgacgtggacttaacttaaaatatagctcaaagacaacggttagtccacaattagtgcttgtcattaattaccaaaattaacaccgggggcctagatgcttcaatctccccctttttggtaattgatgacaaacaccacaaatatatataatcaaacatagagcacatggacatatattgtattgacaagcaaaagctccccctaaacatatgcataacaatcacaaatagcaaatatgaagccaatgcacaattcaatttcacatttcaacatatcacaaacacaagagcaatatctcaatgtgaacttcaagaaatattcattcatgagcataagatggtcacaaatatatcaatgtcacaccaaccatccatcatagcacaagttcacattaagactacataaagggctcacaaataaatataggctattacaagaccacgaagggtccaaatgacatagagaacaacaaaacgaaaaaggaacacacaatatagagtaatagcccatacccataccaaatatagcccaatcctccttaacctattaaatatgaggtgactaacctcactactactagacccaacccacaaaacataaaacacgctattctcccccttttggcattaagcaccaaaaaggtcttcactcttgtggaggagaaggaggacgcgccgaagtggaaggatgagaagcatcacggcggcgatgatagacaaaagcttgggtactctccaaggtttggacgcgagaatccaatacacccaccctagtatgcaatcttcccaccgaagtattcaagttgccaacatcggtgcgcaagccacgaatatcctcatgcaatgcttcatgcccggtggataagcgttgaatgctttcacttagggtattaatagccccaaggaccgggttgaagaagtcatttggttgcattccaaagtaggcatattgtggatggaataaagtacttggatcatacccttgaggaggagggggggctgcacttgagcttgcaccttgatcaaaagttggttggcgcacacgaggagctctaggggaggagagttggagacgaggcttgtactccttatgttcttttaaattttgaccaatttgtcccaacttgctttgaatcaacctcattatgtaggaagcataatagattccttgtccaatagtcccctttgagatggcaatctccttcatcataaggttgataacatcaaaccgacgaccatccataatggcatcaataacatgccaagcaactccgcgtatatcatcattgttgccgcatcttgggaggatggtggcccttactatgcggttgatcacacttgggagagcccttaaacccgccacctttccatatgtgtgccttcccccttcttcataaaactgagaaaagtgatcaatggggaagggattgtgggtgtgctcatcatgaaggtcatccccgttgttgaagcgaatgtgcaagagctccttgaattcacggcggttgatagagcatcggagggtccccgacatccacttcattgcatcacaatcgccggacacccatacggtggcatagaattgccggatgagatcttcatcaaaaggttgcttcatggtgacaattctatcaatcccaacggtccggaacatctcttgcaaattctcaaactccggtgtctcaccaatgtgcctccaagagatccatttgtgttcggcgaaggctttgttggcatacacttgtacatacacggacttttggaaccgtggatcattacaatcgttaggcctccggaattgatcatgatgacagaggatagtgtattgttgagcattcctcaaattaagcacaaattggatggaggaatcgagaggactcccatcatcacttgcctcatcatcttcaccatttccactctcattgtcatcaccatcatcacttacctccatctcatcaccctcaacattttccatattgtcctcatcactttcaacatactcatcttcgcttgattcctcattctcactaacgggatcgggcgtgggagcacgacgaccatgccgagtgcggggaggcatagctgaaaaacaaggagcaaaggatggatgagcaacaattttagaaaccacatagtgaagtgagaggaagggcaagtgctgcctgtcaggggcggtcagaccgagagccacggccggtcaaaccgacggctcaaggccggtcagaccgacggctcacggccggtcagaccgcgtccggtcagaccgccactgacacaagcatacccaaatccttccacaatccacacaaatgattctaaaaattgctagaacagtgttgcacaagattggaactagaacatcaaggtgtaggtctattgaagcaaaggggaaactacccttaaccctaaagattgaaatagaccgatttgagagcaatgcacaaaagggagagggatttaccagttgaaggagttgaatcacaccaagaaactaccctctattggtgcaaatcgatgagcacctattccttcacctagggttcc

SEQ ID NO: 2304 - DNA, 750 bp, Oryza sativa
atttgcagtttacagtatgataattcagctttgccggaagaaagtatgaactgataatggatatttcactaagcaatgaaattgcatccagcctttccatctggatgcgcacagaaccaagaagaaaagaaaaacgattgattgataaattggtgatgcaataagaaggatgtaccctgcaacaactgggtagacagcgtttctccactcattctgatggtgtgcaggtcagagtgacaaatcccacagtacagcacctttatagcgacgtcgtcatctccagttttcctgaaaaatggcaatatatagaacacaagtcagaaacatatactatttctctactgagccaataaccttttagcagaactgcagtggttattacttcagcattgagagttcagactctcaagtacacaagaagagagagcctaaacaccatgcttcacctcccaagattttaactaagccatgaactggtagaactgaaatttttcttttattttgctttcccttttactttatctgaagtatttcagggaactaattcagtaccatcaaatcaacagccttgaactgctgaagctgaaagaagatgcatgcttacaacactagcaagtgaattggcatacagcaagatcctcaatttaccatcacacagatggctgtaaacttgtgaaaattcacataggctcgacaaaaaaactggtaacaaaaacaagccatgtgcagcaagccgcctactgcttgaaa

SEQ ID NO: 2305 - DNA, 583 bp, Oryza sativa
tcctgcagccctgtttgtaatatcgagaacagtcaaatggtttcaggctacaatgttatatgctacttagattgtaggaagatcaattatctaaccttgaccattgtcatttgcccgcaagacaacaaaaacatacttcagaagaggaatgagggtaagggtgtaaatgatcaaggaaagagcaccaataacatcctcttcatcgtctactccatgaggaaaggcatatagaacacatacaatggtgatgtacccaagtcaccaaagaccacccccaggctctgaaatgcaagccgcagtatcaaaagcgacgaaaacttctgtattaaggaaaaacagtcaatacaaattactgatttaccagctcacttacttcaattagaacagtataaacatccagttttttcatgccctacaaatggcaaactaaatattcgtgcactaccatccatctaatcagcaaattcattatctaaaaaagttagtagtgaatctgccaatgaaatgaattattcacatgcagagaccgatctttacatctacttcaactattctgaaagccctcatttgtgcaaaacaaatc

SEQ ID NO: 2306 - DNA, 977 bp, Oryza sativa
cttatttggaccggacgggggcctgacccacgcagacgtaaacgccaggagggcaacccgccgctggctcgctttatatcccgcgtgagctccacaccgagcgaagcggaggtccggaggaggaagcgcgagagaagctcagctaggcagggcgacgggcagaaacgcgaccacggcaacaaaccccgccgcgcgcgcccaccgtgccggttacatgggagtagaggcgggcggcggctgcggtgggagggcggtagtcaccggattctacgtctggggctgggagttcctcaccgccctcctgctcttctcggccaccacctcctactagctatacacacccatctcaccataacacacatacatagatagatagatagatagatacatacacacaaacataagtagctaggtagagaaagagatcatagcgttaggtgatcgatcgatggctgctgctgaggcggcggcggcggtggggaagcagcagcagaagggcggcgggggaaggggaggaggcggcggtgggccggcgccgttcctgacgaagacgaaccagatggtggaggagagcgcgacggacgaggtgatctcgtggggaaaggaggggcggtcgttcgtggtgtggaagccggtggagttcgcccgcgacctcctcccgctccacttcaagcactgcaacttctcctccttcgtccgccagctcaacacctacgtacgtacacattacacacactcgatctcttgctccatctcgatactcgatctcctaactttgttgatttgatcatcatatcatcatcctgcactgcatgcgtacgtcgaataattcctgtatctgcgttctgtattcaactgcaggacgccttgaacggcgtccttttgggttagatgacgatgtacttgcagggttgacgtttcttgtctgtgggcgagctttcgctgtcgtggccgagctgtgttcattacgtttccat

SEQ ID NO: 2307 - DNA, 588 bp, Oryza sativa
catgagttctgtgtggagccagtgtcatggttgtcgatgaaggtgacggccttctctggcagccagccaatcatccccggcgccttgccgttgccgtccttcatccgccacagctcaccttgcaccgccgcctgcagctcgcccttggtcgtgaagtcgaacgctgacgcagggccaccgacggctgcgcccagttcaccagctcctgccggtcaccgtcctggttccacgacggctcaccgttgccgtcgtaacgcatgttgctccatatctcggcgacgacgaaggacgggtcggtgttgtcgacgtacgtcttggcgacggccgccgagtatcccttggcgaagtcgaggcgccagccgtcgaagccgacgtcggacttgagccaattgagccagtcggacagctctgtctgcacacgcgtgttgaggtggtcgatgtcgggcgccgcgccgaagtctgcgccggtgtcgcggtgaccgcggccgctggagtactgcgtgtcgtcgctgcagatcatgtcggggccccagtcgaggcggctgtccggcgtgccaccctcgaaaatgcagtagatgccacggctat

SEQ ID NO: 2308 - DNA, 683 bp, Oryza sativa
gatttcgagcccatcatctcctccctagtgtccaaatctgagcatgtaagcctaggagaggcttactcacagctgctcagctttgagcagcgcatgaagatgcgccaggaacactcggccaatctcgccaacagagggcgtggccgcggcaatccaggaaggggccgcaacaataagcagccgcagcagcagcaacgcggccatggaggaaacagccgcggcagaggacgcggcaacaactccaaccagcgacaaggaggcaatggcgttgattatcgccccaagtgccaactttgttacaaaagggggcacaccgtgattgattgctggtacaggtatgatgaggattttgttcctgatgagaaatatgcaggcacaacagcatcctatggagtagattcaaattggtatgtagacaccggcactacggaccatgtcaccggggaacttgagaagttgaccatccgggacaaatacaagggccaggaccaagtgcaaactgcaaacggcgcaggtatggtaatcactcacataggtcattcagttgttaacaccccaacacgttcccttcacttgaaaaacattctatatgttcccaatgctagtaaaaacttgatttcagcctattgtcttatggttgacaatgcagcctactttgaactgtaccctaaacatttttctct

SEQ ID NO: 2309 - DNA, 12216 bp, Oryza sativa
agaacagggcaacagctattaacattacaatccatcatactattctagttacagcaatcaattggtgaatatgaggacaaaggattcagacaatcccatcacagatgaaagggaaagagtggaaaggaaccttcaggtgcaatattattcagaaaataaaaaagtatttttattggaggaaagcaaccaacagcatataaagggaactataaggttgaaaatcctatgcagcccatggatgttaaactgtcgtgcatatacttgcagttaaatatggcgctagggatcgttcacatattagaacatgcatatttgtagccatatatgtatgtgcacatcctggttaatcattctggtattagaccaaaaaagaagaagagagaaactgcgctgaggttgagcatccgaggttttttttggtctggacaagagttggtactgactcaatgaatgtacaagtgtacaaagtatcatcaatatgccaatatgaaacaaataccacgcaaagattatgtgatttcgcagcttgataccttgagtgatgtgagcatggatggattgagcgtttggccatttgccactctctcaatgcgtgagcttccaacaatcactccaacggcccaggggctgcagatcttcacaacatcacacccagcaaattgcgacaaagtgtttctattagtgtaatgcttaaaattggaatgctggaaaaaaacgaggaaaaaataatcaatgaataggaatcatggatcaaaccggaacaagaactgaagcgtgaatcgacgtttcgccctccctccgagtcaccgctgtcccgcctgactccccacgccggatctgaccggccgacggctaccacctgagccagatctgtgcaggcaacgtcggccctcgcgcgaaacctggctgccaagcctttctctctataagacctggccggccgacgaccgggaaccgctgcgctttccgccgccgccgccgccgccggagctcgtggtcggcctctcgagctcatcgtgtgaggcgaacagtgtgcgaggtgagcaagtgagccgcacggcccattatgaccaatggcccaacagatagtgggccaagaaggtggctatcagaacagcccaaatacggcagaaggaaatccgcttctcttttttttttttttgagaaggtggaaatccgctataggtacggttttcctagtacgtctcggattggtttcgcaatcgcattgtccgtccggtccctatatattcagtagatccccggcatcgaaagcgtactagaccattagtagcttgtttgtcgatcaatgggttctcttgtgtctcggttgatggcgacttgtgtacaagaggaaaaagaactagaggagaaagaagaagaagaagtagaagaagaagacgaaaatgaagaagaagaagaggaggaggaggaggatcctcagccttatgtgcctagccgcccgcttccatccgaagagtaagtacactagtacgactgatttgattatatcggggtatgtatccctaaactgttaaaaaaaattgtatttgacggcaaatccccgtgcattaatttacagggtgcgcgacggctattccattcgcgaggcccacgccgctcttgactactacaatgccaatcatacggtaattaagtgtatatgaatttactactagtatttaatgtttatgaatcacttgcttaattatatagatgaaaagtgaattgatatattattgatctttcgctacgtaattatttagatgtgtgtctgatcgatatgatttattttataattaatttcagggagcggagtatgaactcgtcaagccattgatggcggcctgcgttttcttcaagcgtcgcatgtggtaccacgttagcttgttggcgcgcaggaaggatcagaccactgcaccacccatcgaatacttcttcgccgagctacgcgagggcgcatccgactccttcatcgttgaagcatgcaccatgatcggtaagctttccgtgtgttaatttctttctaataacaatgcttaataatttgatgaatgtctccatcaatcaatgtgtctaagaaaatcggccaatcatcctaaattcctaattcagcttaattgatatgttttctctctgtcagaaaatccgcaaagctgctccgggaacaagtgttcactttgccctactcgctatgagatcgtgcaccctagcgaagaggagcttttgtgtggaaaggaaggagatgtcaaggactttctgcggttgaggaatttgtccccgttgccgttcacatgccccgtcacagtgcctgaaattgaaattgtggttgaaaaatagtaactactagcaaattagcaactgctcgcaaacattcttagcgacctgtttatttgcacatctgacagctggacacgatcgatacatagatcggtgtatcatgagggtgccccggctttgtggttaatctcgggcatgtagtggcctctatgatgccctttgtaatattaaaacttattttttctctcctcataagctattaacacgtcaggcaaagttctttgatatcttttcaaaaaggaatatatcaattcaaattcaggtatcatcaaacaaattctaatcgtagctgtgcttaggtgtgcccctcttcttagtaacaattcctctttttattttagctttaagatacaagtgagacgatccattaatccacctacagattgaataaatggatttgcgggtccacccacttactcccttatttgcccatctgttttgggtacgtgtctgctctccttaaaacttatttcttgtcatgctctaaaaatctttaataacccacaagtcagtacaactgtttacagtgcataagaacagctcgcaggcattcgaaagttaaaacttaaaaatgttgtgacaactcggcgattactcacagaaatctcaacatatgagctagtactagaaaacaatccatgggcgattgctaatcaggtagtgtatatcgaaaaatatatatgattcgttatacgtgttttgatataatcaatgctctaaatctccggagatttagaacactggatataatacagtacaaatgaattgcaccaatgatgaattagtagagtacagaacccctacatgaatcttgcagccgctcacgtgtgtcgggcggcggcgcagatgccagataaagggatgcctgaactcgccatccgtccccctctggctcaattgctggtgcgtatggcggtgagcccggccggcgtgtgcgtcctcccaatggtcgacgcctcgacgggtagcctagccgctgcacctcaagctagctgatcctcttgctcggcagaggcagacgtggaggaacacgctgaccccggagcgacgcacgcagcgatgatcatcgatcaagtgctagctagctgatcctcgtcggcggccacgcttcgccgtcgtttccttgaggctgtgctggtggtcgcgggaagccatgcggcggattcccatctcgatcggagcctccaactccaagttccaacacctggatcgaagccagccgccgacgcagagacgcagtcctggctggaggagataacgagagaggaggtcagagagagagaggagaataaatagctttgatgtaaaaaggtgggacccacatgtaagtcgtaggtcgagatgtatacacgaatcaaggaacataatcaaacggtggggaagcacttcttctcacgaatctccaagcatcccaaccctgtttaaagctgcttgtttccctcctcttcttcttcttcctccttccgccccttcctcctcgtctctgttttctccatcctcccgtcaacctccgcctcgtctcgtcacctcccaggatcggaggatccccacctcggcaatcgagaaagaacacgacggtgaagcaggcacctccgttccagcccatcgcgccaccggcgttgagttcttgcccccgcctgcatcttcccgtcaacctccgcctcgtcgcctcccagggccaggatcccacctccggaaccaagaaagggcacgagggtgaggcgggcgccaccggcgttgaggtattgttgctgctcgtctcccgccggcgaaccttgtgacgattccccggccggtgaattcaagaagccaagaacttgaccaagaaacacctgatgcgatggaccgggttcacggcaaggatggcgcagaggaagctcccgctggcgcttcacatcattcctcctgctactgctccttctcctcctcgtctccgacttctagcgacgatcgtccaggcgtgagagccatcccctgctccagccatcatgacgagagagaaattgcagaagcagactgctgcgctggggccggcgccggtgtacatctctccggctgctcgtcttcgccggaaaacgctcttgcccacggctacattagctggaagcttgactttcctcccgtcctcatccttgtggcctcctgccccagcgatcatgttgggttttccggcgagcagcccatccagggagcaagaatacaagtagccccgagagacacggcaagctgtgccatttcctctggcgaagaccatcccagcttcatcatgacagtcatcagcgagtctgctgagttccaatctggccatcccagacgagaggtaattccctaacccttgtcagaataatctcttaaaaagccatcccagaaaccatcatgttgccttgcaaatataagttagaagaaatatgaatagcgtcactatttctgagaagaaaatgtatactgacctcttaggaagtactatcatgtctctgaataataattcgttgattatgtatagcaccccaaaatccaattgccttagccattactttccatgtttatttcccactgtgaataaaccatatcacaatcgatgcattgcgtttatccttgaatattttatgaaataaaaacgaacatcaaattaggacgctaaattatgtgccaatgataactaatttactgaaacaaatggatattgcaggatttggaaaggaatttatattcagaaaatgatgaactgttcgactcaatttgcaatagactatagtatgacataaagaatgggcgtgaaaatcaataattagcagactgtatacagtgatacagattagttcataggcactgaaagttggtatgccttttaactaacctgtatcactgcatgtactggtacaacaaagattagccagaccaaagaaatagataaaatacctgtgtggattccagatgcgatgataagggatggatcttcatatgtgcaaataattttgccagattctatatcaaaattactcctttatcagcaaagagcctcatgtggtgtcttggacatatcatgaaaaatgtgcatgccactctattccaaaaaaaaaaaaaactgcaaattagagctaccatcgagtcaaatgcaatccagagatgcattttacctacacctggcttgagcaccaccaataactaagcacttaatcagttaatccggatcagaagcactgcaccgtcaagaatttgatgcattacagccttcttttagaatttcctctgcaggcacaatagttaaaagtttttgttaccatactgaagaaacatgttgcaaaaagtttttttcaccactatgatgccattttgtgatatgtgtagcattgtggttatttataaatcatgctaaatctacaatgatattcttactttgtaaatcttacttaatctaaattatggtaatgggacaggtaaaagcaaaacaaggaacgccacagctcaagcttggttttaatgattgtgatgaaaatttagctgccccaaacttattacacttgctcatggacaacatcctaagggatgtattggaattctccatcagttgggtcacactacgacggtatcaaccaaaacttccgagtgaatggagttggtggatggcaatgggttcactgttcattcagatagatggttggttactgtccatatcctctcattaaaaaattttgataaccgctgaacaaaacaaatgtatgttgactctattggttactgatcttgttacaggaatatgctctatagctgccagtgttatgtgtgtggaagcacaacataggctagcctttgagatcctacatggaattggtaggttccccttaaaagcaaagagactcaagggtgtaaagaagaaatgcataaacaaaaaaggtgtggagccctgcagacggagcatttgtagaggatgtgctgaaggtggtggcgaagggaaggggagtggagacaatacagggtatcttcttaccaataaatggatatcatatgtacaaaaatgtccagaaagacgtcagtcatgaggcagcaggtgcttctcttacttgcccatggtccactgctggcaacattgtgggtgaatgacgagtacatgatctgcacaacaaagaatgatcttgtctaccgtgggagcagcaacagggaaaaggatcccaatcatacggtggtctgcttcgcttatcggtttgttggcgaggaattacgagtgcatagatgaaatccacctgttgacactaaaggaacctttaaccaaagaactcatcgacagatacagaaagaagggacagactgagagcttcttgtcaaactctgcaaacaaagtaaaggccatgctgattcgaagactaatgactaagtactcagaattagagagcagtcagggatctagcagttgtggtaggcagagttgggaaaaatagtcaaacttgttcaggtatacacattgaacaacggatcttgtattgaactcggaagcaaagtacatgagttacattgcctcaagagtagttctgaaagccacggttatgcacttatttgtcgttcagtctcttccagatgaaacttagttttattattattatttcttttgtgttgtttccacgatcaagttgttctgcttctttttattctctggactctttatagatttctcctttacccatatgctggaccattcacttcaaacataatatagtgaacttaacaagttttcagatattagcacacaaactatttgaactaacgtgacctctgctcagcctctgttatacacaaccacagaaaaaaggatttctataaaaagaacctttaaaaaaaatggctctgtaatgaaactgtagcaactaatcatggtgcaagcagatttattgctttcccatcacttaattcagaaacacttgctattctgaacatattacagtatataacaacataactatttgtatgttctataggttgattttccatcttggtggtatttatatatattgaaagaaaacaccatatgtttatagtacacgcaacataatcgatttaatgtgatacgcacctcttgttgcagcaagatcatccttcctaccttccaattatatcaccaatccaggtagttaggtactgtctttaactctttataactaatctgaaaattcaaaaatcaggtcaagtgtttttttaaatcaccaccagaagcaaaagatatgttatatgttcaatcagaacagggcaacagctattaacattacaatccatcatactattctagttacagcaatcaattggtgaatatgaggacaaaggattcagacaatcccatcacagatgaaagggaaagagtggaaaggaaccttcaggtgcaatattattcagaaaataaaaatgtacttttattggaggaaagcaaccaacagcatataaagggaactataaggtggaaaatctatgcagcccatggatgttaaactgtcgtgcatatactttttttgccgggttggccgaaagttcggtcgaccaatttcattaagattgggagaaaggatcattacaatagaagcttacaacgacgaaatgattggggaaaaaaccccaaccatgtaagctatagttgtatgctacagggattacaaattaatcattatcgccattacaagtggtgaaaattcctgccgacttccaaatgaggatctcctccttgatgtcgctcactagctgctctgtgcttcaaaatttctgctcgaacactcgcgcattacgctccttccacaggaaccagcaggttagtgcgaagacgccgtcgaaaatgtccctatagcccgtccaaaaattcagtctcgccgccatccaccattcagttaggcttgtatcgttgattgttggtggcgcaaagccgatgccaatccatctttgcatcaaagtccagactctcctggataaatcgcaggttaggaaaagatgcaaacagctctcctcctctcgctgacataagtggcaagaatcgtcgtgcaaccaccctctcttctcaagattatcagctgttaaacaacgacctttggccgccagccacaggaagaatcacacccaggagggagccttgatatgccagataagttcactgaatgggcagatcttccttgccatgtagaagagctcatatgccgaagaggctgagagctggccatcggcagagaacttccaccgaatggtatcatcttcccgattgagaaccacctcctgaatctcgtcccatagctgaaagaactgcgctatagcttcatttgagagtgcacctcgcaggtctcgcacccatctattgttgctcagcgcctgagatattgtaatttgggaccggcccacataagtgtaaagggtcggccatctccaagaaatgctgtgtccattcaaccagtttgctgtccagaattttgtgtctttgccattgccaacacaaaactcggcggcagaactgaaaattcgctccacatctaatcccaggcgatatcctgccatggcccaaggacggtttttctgttctatacttttgactagccacttgagtctcagcgcctgtccaaaagcatccaggtttcacttgagtccccagtcctccatttgtcaccggcacacaaacatttttccaggccacgagaatatatatatatagttaatttaaacatgcatatttgtagccatatatatatgtgcacatcctggttaatcattctggtattagaacaaaaaaaaaagaagagagaaactgcgctgaggtttgagcatcggagggtttttttttttttggtctggacaagagtttgtactgactcaatgaatgtacaagtgtacaaagtatcatcaatatggcaatatgaaacaaatactacgcaaagattatgtgatttcgcagcttgataccttgagtgatgtgagcatggatggattgagcgtttggccatttgccactctctcaatgcgtgaccttccaacaatcactccaacggcccaggggctgcagatcttcagttcttcacaccatcacacccagcaaactgcgacaaaatgtttctattagtaatgcttaaaattggaatgctggaaaaaaacgaggaaaaaataatcaatgaataggaataatggatcaaaccggaacaagaactgaagcgtgaatcgacgtttcgccctccctccgagtcaccgccgtcccgcctgactccccacgcctgatctgaccggccgacggctaccacctgagccagatctgtgcaggaaacgtcggcccccgcgcgaaacctggctgccaagcctttctctctataagacctggccggccgacgaccgggaaccgctgcgctttccgccgccgccggagctcgtggtcggcctctcgagctcatcgtgtgaggcgaacagtgtgcgaggtgagcaagtgagccgcacggcccattatgaccaatggcccaacagatagtgggccaagaaggtgactatcagaacagcccaaatacggcagaaggaaatccgcttcttcatcatgatacttaacgcctgttcactttgatgtcatttttaaccttatcaagttttggtaaagttgcaaaaaaaagtgtctatatttagtttgctgccaaattttggtaactatataagaaatcattacagaattttagcaagttaccaaaattttgacaactatgccaaaatttggtaaggttttttttggcatcaaagtgaacaggcccttacttttcatcaagtccactttgcgtcccccaactttacgtcgaatctataagtactagaaatctctatccctcaagtgttcaaaaccgtataaaataggtcatgcaagtatgcatgagtagtttcgctgacgtggcatcctagtcaacaaggagagaattaaaataatgtggaacccacatgtaagtcacacgaaaaacatataaaataaaaacttatctcccacctctccccaagcgcacggcggcaacgacgcacctttctctccatcccgagcttcagccgcgggcgcagggaggcagaggttgaggcggggcgcaaggaggccgaggacagcgctgccgacgaggtcaagacggacctatcactcgctgcaacacaggaataggcggcggatgcatcctcctcactctcctcctgccatcaccgttgagcccaaccccaccgagccggtcccaacggcattcacctccatatccggagtggcggcagcccaggaggacagaatcgacggtcgtaggttctccatagtgaggaagtggtggtgttgaggacggatatcgaggtggaggctatcgagccggtaacatcaaatttggtaaagatactcgaagttgaagtccagatcgaagcggatttgaaggagataagattgtttccaaacagaatagcgtatcgtctggaggctgtatcagttgatacggaatcagattcagttagccgataggggtaggaaagccaatacaagcagtgttcaagatcaagttggattcagattaaaagcttcagaggtattgccgaataagagttgattttgtaatgggtaattatatctattaattagggataagagttagttgtttccattaagaaatttgtgggaggaatccgcctagggattcatttgtttatcgtactttagcaagtttgagtcttgtccgatatggacatggtttgtatgttacgggtataaatatatgcctaggggcttgtaaaaaaacaatagttcaatacacgttttcggcacatcgcctcacctttgttttacttttctcgacgagttcttgtttcgaattgggctacattggtttcgctctccaggaagaggtatagcttatcatagcggtttgtatcggcggattagcacgtcgttttagatgttttaatatatcttttctaattgttggttatcatatatcttagttaatttagtccaattattcgatttatttgtattaacggaacctttcttaaggttttaagattgtacaatatctcataataaaagcacagtgaaatgatatggttctcctaattttgtgtattttcaagtggtagtgctgtgagaatgggaaaaaaaaatacacatgtgattttctacatatgtcaaagcaatttttttcaatcataggtaacatgtcatatgtacaaggtatgctcatgtggatagttagatgaacaagtaactcacttgactcattagtgacctacttgatgcacccaatgaccctccatgcattttactcaattaaactgcactacagaaaaggggtggtaagtgaacttattcttttattatttttacatactcttttggtgggccttctgtcggcccactaacgtcgtcttcccttccggctggctgcgtctcctgccatcgacgacgacatggatcaaatcggattggaaaggaaggatataggaccgaatcggagagcgtttcggattctttctcctccttatatactactggtccgcagccaaggcgccacttcgatcggaaataagagatcgatcagacgccaccagaattatatatattgtgcgaagaaatttgatcagtccagttatcatattcgaaaaaaagtagtaataatctgttctgcccgatccatgggtgctctcgtgtctcgagctgccgctgccatgctaggcgatgcctcggatgaagcggagttgaggagatggatggaggaggatgctagacgtcaggccaggaagaggaagattatctgtgcacccgcccgctaccatccgaggagtacgtataaattgaaattgatctgaatagtaccggcttaaataggatggcaacggggcggggcggggacgggttggataagaacaccc

SEQ ID NO: 2310 - DNA, 4336 bp, Oryza sativa
tgcagtcactgacatggggggacacgaacgtgggtcccacttgtcagtggcgtggttctggacgacggagacgtcgggattgtttctgccgcgatggggatagccgaggtgagatgtgtggcgggaaggggaaggggcgcagccatggcgcgtggtacaatgaatctggtgtgggcccggttgtcagcgtggggttgtggtgaccgggctctgggccgacgtggcccgtcctgcgcctcccatgagaaaaatcgggttgggcagtgggccaaatctcgttccaccatctgtttgagcttattttcaacttgtaaaaaaaattgcagagttcggagtttgcacagtgtaatttgagggtctgtttggcacagctccagctccaactccacccctcctagagttagagctcagccaaacagtttcagctctatcaaaactgggagtggagttgggtagagctctctcacaaaatatactagagttgtgaagctgggtttaggcagctccacaactccactccagactcaactcctggagttatatttaggagttaaagctgtaccaaacagaccttgaatctttatttttaattaaaatataaataagatagatagtccaaaatgacagtctacacctagatgcatcacatttcacatgagatttatcacatgtgaagaaaaggggaaattatgtttttttggaaagtccctcctatatccaaagttccacattaccggtgatatatgatcattgtattgccattatgtacttcagatgatgaacatgttgattttgtttatcttccttgcgagttgacatcaagtgattttgcaactgacatttgccgatgaccacgaatgcctagaagctactaggctttatttgaggcaaattccgacctttgaagtataaactttgtccttttggagaaagctctgtgagtgccgattttttacacacgcatcagtgtcaccatcgctatccaagtaggttgttccaacataacccaacgagaagtggtctgaaacgaccgtggtgtacttggttagaccaaatgctagatttttcttgtaaaatcccgatttggagaaaaaaaacagatagtatattgttctaacaaatttataattaaatcaagtttcaatattcaataatttctcaaatgcttatttcaaaataaaaatgtcatacatataaatttgttctaaaaaaatacaatcattatctagactttataaacttatgctaacataaagttgattatttgaaattttaactgaatattatctaaacttcaaatatgactggaatgagtagatcagtgcagtattttaggcctacatcaacatgctgggtcggtaccagagtactggacgaggcccaagcccatgtgtccgtacgtgacagctggaattcaaaacccgcgagcccaaaacggcctcgtctcaccttctctctcgcacccgcaaaagctcaaacccctacactcgcacaccgcaccagcgatgtcggcggcggcgaaggcgaaggcgagcggcggcgggaggcggggaggagccaaggacccaaccgacgcgctccgctccgacaagaagcgccgcgacatggacgactccgacgacgccgagctcgacaggtgcctagctagcagcgccccccccccccctcgcctccccttccccctcctccccggggtccccgcgctatgttcggatcgaactcgaagcgagggtttcctggttgctctcccgcttgccgcgattttgtcttaattttgcgccggatttttgtgcgattaaccgattttctgcgtatgcatttcgtgattcgtgacgtgcttcggtggggatcgggggaggcagtgacatgaaggagatcgtgttgctgctgcgccagatcaaggacaaggctcacaaggatggccagaagaagaccgagcaaaccctctccaggtgattccgagtcccaccctttttacggcggctttattaccatgccaattggtattgtagattacacgcgtgaaattgtttctaagttttctattagtgctaattgagagataatttaacgtgcttactgttagatatcaacagatggtgctcactagtcactatgcaccacacttgcttaatttctgcagaattgtgctcaagtctctatacaccaatgatctgttatgagttccgttgtgttgaccagcagtagttggtccacgtcactttaatttctgtggaattgtgaacagatcaccgtttaggtctcctatcttttatgaaccaatgatatagtaggatgtaccagtgtgccaactgcttattgttcaacttatctcctgaatccgatttttttttactgtataagtctgtgtgagccttggagctcctgtaggctatactcaatgtagcagatgtgaggcgtagagtgcgttaattgaatcgctcccaaagcatggaaaatgagttgagactagtgatgtggaagaatagcttcatctaacatggttttcatatccacatgacaaaattaatatggtgtctcaatgtggtctgtttctgaagttatctaccacgtgcataatattagattacatgactaactgttctgctcaattttcagtgttgctacagaaattcagactatcgtacaggatgccaagggcaagtttgagaaggaaaggtaaaggaccaattcattttacttgcctgtgaacttctacttgtatgaatgcagttcttttttgttgtacatctgtggtgagatttaaagtggtttttgattcattcctataacatgattatcatatgaagctttcttggaaatgattacggtgcatcattcaaatatactatgaattctgacaactgttttttatttgcattagcaggcaaaattatctgaaagttctatcaaagacttcaaaagaggttaccgacctgtatccaatgcagtgatgctcatctggtaacaatcccctcatagtttgtgctaatgtcagcttcatttgtatttgatgtagtgtgaaggtttactgaagaacgagtacaccaagtttcaagcaacacatgataaattctgcaaagaaaaagctgcacacatgcaaactctcaaaggtatgtcaaatgagctacctgcaaacacatttacttagaagtgagttttgctgtttgtttcctgtgctattaggtgaattatataggtgaactttgtgcaaggaaaaactgtcatattttatcttgagatttggtaccaggattattgtactagttaaccttgacctttgttttcttttgtacaaaaatggagcgatatcattaaataatactcataatgagcaatgtgcatgcaccttggcagtttcctgacttcattagttcctgccacatagatatcatcagttgtcacctgttatcaacctatttacacatgcatatactgtgttctgcagaccttttctcaaagttcgaagatgcaaaggagaaattacttatccagtatgaactgcaaagtaaggatatatcattttctatctcattgtaaatgttctttattcttaaccagtgtctcttaaacagttaccatgtgtgaaagacatttgttctgatcttgtctaacagggaagaaggagaaggctactctgtctgaactcgagaaaacattttcagagaagataactaatgcagaagaatctctgaagaagatgaagcaggttccgtcatttaatggcttacatgatctactataatttcttgtttctgttgatacttgataccatgtctcatagtccaagttagaattgatgtgtcctgattttcttactcgcaagtacttctctttgtgtgtttgcaggatgacaaatccattgtcaaccttcgcaagtccattggctcattcctggacccggatgatgagtttggagcagacgatgactgaaactgctgttgccaaaatggtccttttagaacgccgtggatagtatttgagaatatcgatagtatatatatgaacagaagttacaaagttctgtagagatttggtagcatcatacagttaggtaccacatcatccgttattttgttttaagttcattgggttaggcggttccatcatctgttttaaatgcatcttggtcgattcaacagcaagaggctcaagattgtttaacctctttggcctgattttccttcttatataggagtaagtcataaccagtagctcgctaaacttacttgtcaatatatttgtatatttgcaacaaattattcatatacagtatcagatttgtatatcaacagcatagaattgcaatgaatcttccttctaatttacaaatctg

SEQ ID NO: 2311 - DNA, 18966 bp, Oryza sativa
ggggggtgagggggagctcacccccgcatcacccggggtgcacaaggctgccaatgttgaacggcaactcagaaagaatgaaagatggcatggggtgtaactactccactactccagtcagtaatcaatatatcacaaatgcacaattagtagtaatatgcattctagggagccggatgcccaaatacacataaacacaagtactaatgtagttaagtcctatgtatgacaaatacacaacaaccaactcacaagcaaagcagcagccagccaattagcagtatactagtagctttgctcgaggttgaggagctggccgcaggagtcaagctttgctcgagattgaggagctggtcgcaggagtcaagcactcggacagtcggacggcatgcctgcaacgcgcggcgatggcgctccactccggctcgatgttgcgggctccggcgctctggtcgccagcgtcgcgctccgcttcgccgccacgccgccgccgcacgcaatgggcgcccgggagctaccaaactaatttagggttaggtattcttcagatttttcttttatactatgctggttgggctgttgggctgacctttgtgggcttctttctcataatttttatcgactgggctacatacctcggggccccgcaggtacccgcgggtgggaatagccacccgcccccgcccccgcataattccggggccccgccccgatggacccgcggggtgaaatttgtacccgcccccagccccgtaggggcgggtactcggcgggtccccggccccgcggggcaaattgccatccctaggcttaaactgtttttttatacctttggtttatacttgatgatttgtattgtattgtactaactactatcgtccttcaatcaaaaaaaccagatgcaacaggtccctcaactattaaaactggtgtagataagatccctcgacagtttagatggtggttttggctgacgtggcgcctacgtggcaaattcgacttggtcttcatctgacgtggcgcttacgtggcaatttgatccgaaaaaataataaaccatgtgggacccacatgtctgtttcacatacaaaataataaaaatggtgggacccacgtgggccccacatgtcatcctcctacccctcatcttcttcccgttatcctctctctcttcttcacgatgtgcactagggcagcgggcgaagtggggcgaccgcggcccggagcggtggcgcgcgaagaccacctccaactgcgacgagctcgaagaccacctctacgttgccgccgccgccgcggcagccagcacacccactgcctcatccactccgaccacgaccccgccgtcctccaactccaacctcctcctccacccgccggccggcgccgcgccctccaagtccaaccgcatcagcctccctaccaatcccaatcgcaaccccaaaccctagccttccctctcctccatgcctcccgtgatggaggtcgagatcaagctccgtctccccgacgccgctgcgcaccgtcgcctctcctcattccttgtgccccgcctccaccgcgcaccgccgcctctcctccttcctcgcgccccgcctccgccgcaccaccgccgcgcgccccctctgcgccgccaccgccgtgctccgcgtccgtctctacggcctcgaagaccgggccgtcgtcgcactcaagcgccgcccgcgcatcgacgccggcgtcagccgcgtcgaggaggtcgaggagcctctcgagcccgccatcgccctcgaggatgaggaggcgttggtggcgagtgggggaggcagtggttgacgcgcgtgacgaggtaggtggtgaatcggtgggggcgcggggcgccgtgacagagcatgtggacgcggagcgcgtcgcggatttctcccgctcccctcggcctccgcccgtggctcctatacttccgccggccgagcacacgcgccactcctctcctccctccggccggtgcccacgcccgcgcctgcgcaccgctcctctcctccctccggctgacgctcgtgtgctgcttctttcccagcggccgccggcgataggctcgagggggtggaagcggaggaggtcacgcctctccaggccgtcgttatctccgccggctggcgagactgcgagaggagggaggagaggggagagagatggagagaggaggaagaagaggaaggctgggagtatgacatgtgggccccacatgggtcccaccattttttaatgtgaaactgacatgtgggtcccatgggttttattattttttccgatcgaattgtcacgtaagcgccacgtcaatgccacgtcagacgaagaccgagtccaattggccacgtagacgccacgtctgccaaaaccacccttaaaaccgctaagggacctaatctgcgccggttttgatagttgagggactcgttgtgtctggttttccgtttgagggatgaaaatcagattcattgacaagttgagggacctcagatggactttattcctttccgcgcagcgagcggtaaatcgttaattaacttgagtgctgggccggcggaagtcaaaatagtttctttaggccgtggtgctgtggtgggttaaatgtggccgagcggacgctttcggcaccgagtacgagtgcacgcctcacgaaacaacggaacggagggactctacgattggtcactcgatttaaaatggagtcggttcacattagatcccttaatttgtcaccgagtcggaaattcattgctaaaccaaattatcatatataaccgatctctcaatttataaaactggatcacctgagatctaggtagtattgtgtaaggttttaactgacgtgacaagctgacttagcatgggacccacgtgggccccacatgccagtgggtagcactttcattctcctctttctctccccttctccctcttcccaatcgttctggacgtcggctgcccgccagccaacgttttcgtcgtcgtctccttagctcctgctggtacatacgcatcaagacaactagatgaaactccgcacattgttgcgggagcttagtatgataacaataagtaaaaataatgtgtaacataggtacataacataagattacgtaagttaacgtggtttatgataatttaattttaatagtatatagaatgatgattaaatgtaaaagtaaggtgatatgattttatgaaagaagaaaaatattgagatagtttgggcctatttgaaagtagaaagacttatttggaaatcatggatatacacggtgatgtaataactttgtaaattctatctctctccctatttgtaaatattatttatatatatatatatatatatgcgcgcgcgcacatggtggcgctacgaaggaagtagcgcgcctctcagcgctcgccttcctggcttttagttttttctgggtccaacttcggatttctcgcttttctcatgtgccgcatcctcatggaccgcttttactactaccaccgcctgcaaaggcttttcccatcccatttgtcccgagttaaaaagttactcgtctggtgatgtgaacgcttaatgagtaaaaaaattatacggcaagtaaaaaaatcactggatcatctctcctctaatttgcctgtacaccactcctagtatatattaattgcagggtgcgcgacggctattccatttggaaagctcgcgccgctcttcaccattacaatgccaatcatccggtaagcagcttatatgtgtgtgcatcactttcttcgctctttacttatacgtagatgtgtgcttatgttgttcacggattaaattaaattaaattcagggagcggagtatgatctcgtcaagcctttgatggccgcctgcgtcattttcagaggtaaactgtggcatcatgtcagcttcttggctcacaggagggatcagctggttgcaccacccgttgaatacttcttcgcagagctacgcgatggctgctccgacgacgactccatcgtcgaagcttgcaccatgatcggtaagtaaaattaccctattcttacaaaagtcatctacattcagattcagaattattcttattcaccagtctaaaagcaattattcttattcagctttctttctttcttactttcgatcttcccatttcagaaaatccacagagctgctccggaaacaagtgttcgttttgccctgaacaatatcaaattgcgcacccgagcgagcaggagcttttatgtggaaaagaagaacatgccaaggactttatcagactgatgaatatgtccccgatgcccttcacatgctccaccgaaacgcctgagattggaattgtgattgaacaatagcaatatgcatgaaggcattattatggagcatgccttcatattagggtccataatataataaaagccttcatgcatcatcaagtgtacatattatggtcatgatgtaacaaatgcatatgttattggtttgatgctattcataagagaacagaaacggcacctgacctgcttgcacaaaagctgacgttgaacctcgttgcagatgcacaaacatcgatatgatcaaatttccacataatattttttttaaaaaaagagaaggtcgatcattcattctccttttactactagagaaaaatattatcagataattaatcagaaacaaaaatgcatttttttccctttaatcatgttggaggcagccattaaagtggctcgctgttatttcagtttgttcagactattggatgatctgttccatgctttttttttaaaaaaaaagaaaagaaaaacgtactatcttcaactgtgtagtgtagctgtgtagatcacttattataggctatttcttaggtttcaaaatatttaacttatacatgtaacctaatcagtaatccgtagcaataatctcaatcaatcaagatctgtttaactattcttcttttggttagcagcgatgtggttttcattgatatggagcgagcagtagcaaaaatgagatctttcgtttagacagaagagagatcctttccttcctttctataggaaatgactgatattgctaagtcatcttcggctgctcttgcattatcccttttccaattctttttgtatggctcggttgcatccgactgatcgatccctagtcactgattacatacatgagtattggctttggcaagcaagtcaaggaaagaagaggaaattaagggcctgttcactttaatgccatttttaaccttaccaaattttggtaaaattgtcaaaaaagtggctacatttagtttactgtcaaattttggtaactatataaaaaatccggccaaaaatttggtaaggtttttttggcatcaaagtgaacaggccctaaaagttctcttgagtttgatggtactaagttagatgtcacaaatagaaattcatggtctactgtatgcatgtatgtgctaaaagaatataaaaaatcggggaatcacttaataagaaattctaactattgttcaaaactcaaagtaccactgaagaaatagaattaaatggttaactaagatttttttttgactggctatatggagcggatttaacgtccctctacacaccatcaatagaaagacacgagagatgaggtaagaagagggagagaagaaaatagtagaggtctgaaatttagataagtctcctctaaattttattctcgatccgctctatgcatgtgatttcttatgttcagcaacatggttttatacaatttatattttacgaaatgaaaagctataccgtcatttatattttgaaaaagatcttttttttaagaaaaaactaaacgacagagatagagaagggagacacgtgttggtgggattgggattccacatcctctccttgtcgattccaaatccccttcttcgattgcagtgttgcgcctcgcgaattccaaccccgatcgctcgcacggccggccgccatggagagccccacgtcgccggcgtcgcggctggacttctacgacttcatcggccgcatgcgccgccccgccgccgccgacctcttccactccatcaggaggtccgtcgcttcgcccccctccctgctcccctcctcgtaggcccttgccccgcgtcaattctgacctgagattcaactgcagcttcctcgcgtccctctcccagggcggcgagcccaacgccgaggtcgacggcggcagggtccagaccttcttcgcggagatggagaccgccatcagggaccacccgctttgggccaatgccaccaatcaggaaatcgacaacgcgctcgaggtgaccccgccctaacccttgcgcttgatttgctttctgattcaattgaacatcttgcgtctctcttgttatgcgcgattaggggcttgagaagtatatcatgaccaaattgttcgatcgagccttcgcttcatccgcggaggatgtgaaatccgacatggagatttcggagaagattggtctcttgcagcactttgtcaggcctcatcacttggacatacccaagcttctgcacaatgaggcagcgtggctggtaagacaacaatgacagatctttgagtcattatttcattgttccgggtgttagcccaaaattcagaacttcccatgtgatttttattgttcctgcacgcggcctgtacaagttcacaacgcattgttacctaatgctaatggtcaatagtctgcgactgtaacattgtgaacaatgaacttatgagttatacttataccccctagtaatatttttagatgcactctgaaagctttgtatattgatcacggtgtaaggtaaattgcaaattatcgtgttgggttactttgaattatctcttatataaaaccagcattagcttgcattttggtcaccatgtagaatatatgataaaaatgcatggggtcaacatttaagcgattatctttccctgtattcttcctatgattggttcattgctgtaattttacatctgcttgacataaaagaaatactgccacctgccatcaacacaccaatgcccaagttaactctgaccttgggatgtttatgccattctagcttgcagttaaagagttgcaaaagattaattccttcaaatcaccacgagaaaagcttagttgcatcatgagctgttgccaagtcatcaataacttgctgctaaatgtgtcaatgtcaaatgatcgaacactatcaggggctgatgattttcttcctattcttatttacattacaatcaaggtaagcttacttttgttcctatttattctttctctaatttttctcatccagattgacatgattacatgctgacagatcattgagtacttatgggggaaactattttgattcctcgaggggatgtcacctcgtttgcttaaaaaaacatctaaatgattatgaaaaattctggaaaaatttgacaacactcatataacatatctatacaactccacaaaatcttaggttgaaactcaactcacgtcgagatataaaaaaggacaaattcaacgtatgaacagagaacagtagcgtactgttcacatctaaatttatcttttttgtttctcaatgtgtagatcgaattagaacttgatttttggtagaccgatagatatcactatactctacggtctacattgtcaatttttttcagaatttttcgtaactatttatatcgaatttggaagaaaaaggtatacgaggggacatcccctcgagggattagaatccaatccctacttatggttcaagttttacaatcataaattttatgaatctcgtatcatatgtacagttaacattagggtgtttttacctttattctgtacagctaaattgggtaacattactgataaattgcattttgttacttgctaatgtgacaatgcctattttttacaatgtaactagtatagatgtttggtgtattaatgggatctaatggtcttatggtgtaaatttgattgtttctgtttgttattagttaatattactcttatatgccgcattgttaccaaagcttattttctttttggttcattaaggaatatgagtttctctagagagcatatgatactagtcagttgaaagctgttagttgtcaccaatgtctctgtgttactttgtgcattctacttagggaatcctatccctaatatatgcaactttttactatatggagttcaactgaccaagcacctaaaaaattgatgtaggccaatcctcctcagttgcactcaaatctaaagtttattcagctcttcagaagagaaacaaggcttatctctgaagtcgaatactatctcacgaacctcatttcagcaaagatgtttataatgaatgttaatggacactcactgtccatggaggaaagtgtgttccagacacatatggagtctgcaagacttggtaaccacatatctgttgctagcactaatagttcacaaggattgggtacatccacaccaggacagaacgaggaatctggtgatacagaaggtctgtttttaacattagtggatcagtttgtttcagaataaagtttcacctcaattaaagtattagtcttttttgcacgttcatggtaagtttccttctggacttcttgtctcgtctaagaatcagtttagttagcagctatacaagagcattctgtcaaagtatttgaggtgtctaccgtacctatgatgttcctcaatccatctaaggttgggtttagatttagttttcctggcttcagctgcataatcacgatgcttagttcatatttaacaggattgaaattcccattcatggactctgaaactgaaagcttgactccagcggaagtcaagcaattgcacgagctctacaggcaagtagtcaccagatatacgctgctgtctaaagctttaagaaagttatcggtagatgaggatcagctccttaattcagtagatgattgatgaagccatgtaaaaatgctgaccagagatgacatgtcctattaaccacataattgatcgagattgtacacgcacgcaaagttttccattgactgtaggaaagcaaacgagttccaggcatctgcaacatggttccagggattccaggatacactacaggtatggccaaatgatcatcagagttgagaatggattcttgtgcctttgcattgcaacttgcaagccctctgtaatagcgtccacttctgtaatttttagttcctgtctgccccactccttggagctagcgtagtctctaggtgtgcgtgaggaactgcatatggcacatgttgctgttgctgatcatgttcaaccgttctacctcgtacttcgtatgttatacagcaaatcttctgtgctgaaaggtatctgtttgccttggtgcaatggtgggtgaacgtggtgacattgtgagacatatgcatgatttgctcatgaagtcattatggctgtgttttgcaaaaagtttctatgggaagttgttcttaaaaagcatattaatctatttttcaagttttttattattaaaacttaattaatcaagcgttaatctatcgctccgttttacgtgtgttcccaaccccttcaaaagaacacagcctattatatccgagttctctgcttcattgttgagcagaacagtatactgatgctgccacaatctgctagtgcttgtgtaattaactgacaactggaagcatggggcaaccaatcatacatggcttctcttgctagaatagtaatatgcaaatatgactaattcagaatattcggtgatcaattctgagggttgagcttgaaggttttcttgtactcgtgaaagagtgattatacagtatcatgacaaaaaaaaaacagagacagtttgcttctgtcatgacagaacaaaagttcaaaaaaacgtggtcggcaggattcgaacctgcgcgggcaaagcccacatgatttctagtcatgcccgataaccactccggcacgaccaccttggggttgcaatcacatactttttttactaattgtttcatacaacaacactgcaatttgattcatattcgctacagatatcgtatcttttattcaaacaccgaccaaatcagttcatagatatcacagtcaccaccagatatcacacagcaatatcatgcgatggcgcgaactcatgttcatacatatatcactgcatcgtgtcatctgcgcacagctgcacataacgcacgcagctagcactgtcgcccaaacttgtcgtcactccagcttgtgctgctgggcggcgcgcccggggctccgagccgacgggtactcgagcagcgggtggagcggcggagccggcagcgcggcgagctggtggcgacgggcgctcgccggcggcgacggcgatggcgtggacagcaggaggcggaacgtccaggcgaggacgtcgggcgcgaaggcgcggaagacaaggaagacgtcgtaccagttggggtgcttcacgtgggcgtcgccgcggcacgcgccggcgaccaccatcctcgcgtacgcctccacttgcccgccggcgagcggcacctaattacatatgattaatcaatggcaagttaattaatcgacgagcagctatagcatttgattgttgaactaatctttacctctcgctcctcccctttccattgcatctctgcgccttcctcgagcatgaacttgccgccgctggcctcgccgccgatccagccgtgggtcgccacgctgatgcccacctcatcgcccacctcgtaccggagcgactcgtagaaatcgatcaccgccgccttggccgcctgcaggcacacacatgacagttttcagatgattctgaagaacttgctggtgaattttgagtagaagagagatgggttattacagagtagagggtcatcctgggcatgggcagccagatctcgacggcggcgttgacgacgacacggccatggctccgccgcaggtaggggagcgcggcgtacgtcgggtacacgttcccccagaagttgacgtcctgcacggcacggccggatcgaacacagttattgcagcagcagctgatgaaatttgatcaagaaatcgtaggcgtaccatgaggtgagggaacgcgaccgtgtcgccggcctcctcgaagcagaaatcgtggcccaagctcaccgtgttcaccagatggtttactgcatgcatcaatattaataagaaattcagaggtttgattaattgcaagtgatgcgtggtacaggtgactgacactggccgaagaagctgatggtgtcgccgacgagcctccggcagtcgtcctccttgacgacgtcggcggcgatgacgaggacctggccggcgccgagggcccgcgcgttctcccgcaccgcgaacagccggtgctcccgcctcgccaccagcaccaggttcgcgttcctccgcgcgtactcgtacgcgatttgctgcatgcaaacaccacaccgatgatctttgacgttcgccgaccgggcactggttatatgcttagcttaattacctctccgatggcggaggaggcgccggtgatgaggacgaccttgttgtgcatgttctccacggtgagcgtcttgacgacccactccacgccgcgcaggaaggagagcgtcggccacgcgaacgccagcatcaccatgctcgccggcggcaccaccaggtccagcaccgcgttcaccacctgctccatctcgatcgatcaatcaatcgatctctcccacactatacagttcctcttccgatccacagctcaatccaatccaattgaaagaatggatcaaccagcccgcctctggtttctggggttcttgggaggtgaagaaccgaggaggaggaagaagagggatcaaagatcgagtctctcaatgagtttgccaatttggtgaggacgatgagcagataaggacaggagaggacggacgggtgcaggcgtgcatggatggcagctgcgcaggcatgccgccatagacacacgtcgagcaggacgggaggcgccacggtgagaccacggggggaagaggcaagctttggccgctttcaaagccttgttccatatgcctttctcctccgatcggctgcatatattactcctccaccttaatccgcgcctactacaacatttacagttctgatcagatacaatatgcatcttgatgtgaaatcagagaaagggcctgtagcctatggttaatctccataatttgccttagaagatgttgtactgtgtaatttttttttttaaaaaagtcaatctccaggatttgacacagtgacgaagacctgctgagcggtgagtgactcatgcatgttagtcctccctcctttttttttaaaatagacgatgccgtttatcattcggtctaatttaaaatttttgtgcaaatacatatgatatcaattatgcttaaagtatttttagtgataaaatatctcacaacaaatatttttttaataagacgaataatcaaacgtgtgcttaaaagtcaaagtgtcctttattaaaaaacaatggtagtagtatttgcatgtgactaaaataataataaaaagaaattggtaatatcaattaggatgatacagacaaatatacaccaataaatttgatctacaaataaagaaataaaagtaataagatcagacattgaacaatacctatacaacgtaaataaaatttattatttttaattttttatgtatagatcgaatttagacttgtatatttatacaatatcttatatcttatatcgcgtgcaggcgataacagttagacgtagaaaatatttccctgtttacacagtgtgtaaactgtaaagtaattttgcacagcaacccttcgtttaccccgtattattattttcacgcccgtattctggatcgctaccactcgtcccgtttaaccgttggattttacatgggcggcctggatcgagaaggaggagggcggcccacgcgtatttctacgtgagcccttcccttttggaataactattatctttcacgctcctcccaagctttcgattctgaaccagaattccacggtgaatcgatcttccgacgccagatcgacgcgagttgagagacggccgtgctcaggacggcggagcgccggcgagatgcggaggcggcggcgccgccaccacgcgcgctcctaggttactttcctcttttttttttctctctttttgatgcttgtcttcagatgttcagagttcagaggagttagccaggtagggctcttgtgctacgtctgtgagagcttgtgtttagaactttagatcaaccattttatgtttttttttgggtgaaacaattgttgtagcagggagacaacgccctctctcctatccggtcgaaacatctaagatggtttatggaaagttcctaagtgtaaaacaaggaaaacactctcgagttggaaaacactctcgagtggaaaaacactatcgagttggaaaacattctcgggtggtttcttatcacttatatgtaactcatcttgtttggagatgatttctgaatacatggcaggtgaatctggcgatcgggaagttgttgaaggatgtgcaaaccctcaatcatagaagacattcggctaagagagctcgaaggaaaaaacctgctcgagtaaagatccggtcgaatggaagattctgtgggggccgtttctcaaccactcttgccagctggagccaaaagactagaatgaccctgagaatgtactaaaatacccctagggttgctgacatggcaagggcattataggaagatcactaaagcccatgagggtagaaatgtaacatcacatgtaagaccgtaggctataaaagccggtcaagtccctatagctagaggagacattttttaatacaaaaagtaatcctctaaagtggtgtttgctgtttgagcttatttctaaggataggtaggaaaatacttctttccggcctatccccaatcttgttcgtgacctaaggtcacaacaacaatcaatctctttttgattggagaagaaaaaaagaacatcgttttcttataaggcattgctgtatcataatccatacaaattggtctggcaagcctgaacaaattcttcttccgagcaaagcctgaaactgagaatatggacacatagcaagacttactttatgttgtaccacagtttcacagtagtaggacaaaatatttcaattttggcaatagtataacagcaactgcatcacccatgcatagcacgagtttatgatattcagatccaaattgtcgaagcggctgtactatgttactcttatgtacagaatgaaaaatcttcatctcctgaatgtaatcctttattcttgttgcatgacaccacattttgacaattacaaataggatcacctcaagcaatccaatggaaacgatatcgatggccactagaaagagcaacatcttgatgtaaaactgctggaatctgtcgcggagacttggatagattggccctctctgacagcaccagcaccagctccagcctcatctgcagccaatgccttcttgctgatgatccggtagatctcagtgagcactgtctgaaaagctttatccacattcgtcgcgtcgagcgccgaggtctcgacgaaggataggccctccctctctgcaaagcttgttgcgtcctccaaggacactgaccggagatgcttgaggtcgatcttgttgccgatgagcatgacgacgatgttggagtcggcatggtcacggagctccttgagccacctcttcacattctcaaaagttgtggcctttgtgacatcatagactagcaatgctcccactgcgccgcggtagtatgcgcttgtgatggcccggtaccgttcttgcccggctgtgtcccatatctgtgcctttacaatctttccttcaacctgggtcacaaaattgaagcaatttaacaatggacctttggggaaacaatagtactgaacataaaaataaaaatctgtgatatcatggataacagcctaacaggatcataataaaaatctgtgatatcatggataacagcctaacaggatcatgtattcatttgttgtatgcagctaattaggttctctgattatgctttaaagcaagtgagccactagccagtgttagtttcctgtcaatctaaattcgcgtgtactgcaattcagtttgtacaaaatttcaacaaagaaagaactatcctttggccattttatttttttttttaaaaaagaattctgctttggcgtaagcaattgcactgtacccatcgatgaaaaccaaaaggagggactgatttccaagagaaagcgaacaatagttagcaaatcaaatagagaaacttgctgaattcctctgtcttctactagctctgaattctactgtcaagcatgggtgtcaaactatcaggtcagtcggcgatcgtggtcaagcccgccggcagcacgcatgcacaagggcatcatccaattcgagcaactcaagaaacattcagagaaagcagtaacagcgaagcaccgaagcagaacacaaacagagcaagcactagtaagcagaggagatcaggagaagcagaggagaagctagcactagcaggcatggtgacctggatggtgcgggtggcgaactcgacgccgatggtggacttggagtcgagggagaagctgttgcgggtgaagcgggagaggaggttcgacttccccacgccggagtccccgatcagcacgatcttgaacaggtagtcgtactcgtcgccgccctgctcccacggcgccggccgccgagccatcgatcgatcgattcaacctcccttctccttcctcctcagattttcgcactttcttgctgctttcttggagcctccgcctccgatctccgttccctcctccttcccgagaagctagctagcttcttcttcttcttcctctggctggctacttgcagctttggtttcttggctttggacgggaagacgcggaggctgatggcgacctgatcgatttttattggggaagagagagagagagagagagagtgcgcgtgcaaattggtaaggccacacttgggttcaacgctaatcttttgttttgtgtacgatttgtaattggatttgcaaaggtggagcatgttgtctagtcgttggctgctatagaatttttctggagtggtcatgagtacacaggcacgtacccaagaatgtcactagaacagtggattatgtcactagaacagtggattaagggctcatttggtttggtgccctaccaaatcattggtagtgtcaaatcatgggcaagatttgatactaccaatattttggtatagttggtttataggagttgtattaactttgttaaattttgacatcaatccaaacatctataaggtactattcaaagtgctaattatttggtagggcaaattttggcatcaaaccaaaacagccctaagtactactccttccattccaaaatgatcaaatttgaactaaaagagtgtacttatttcaagacggagggagtagatcagtaaccaaataaattttaaatcgtaaggtttattagcgataaaaaaatactttgtaagtaaaacttttatatatgtattattagcgtcttaaaagctaatgttaaaaaataaattatgatgataaaaacatcaaaatcaatttaaagttaagttttaaaatataaatgttagtgcggctagcaagccgaagagcaaacgctggtgttattgtgtgaatcaaaatgatcaaaatacagtggcggagccagaatttttccaaacctagggcccaattagttgagtgtatatgattttgcctttatcttctagtttttgaagttttaaaatggaatttcaatgaatatttagaatcaggagtagggagtagggctgcagccctagctgccctactcctgtctccgccccctgtcaatatagcaattaaaatgactagagatatgaaaaaaactatatataggtactgtcataatggccatatgttgaaaatatttatctcgggtgcatgtaacattttttttctagaaaaagatgtagttactatataacaatttacacctatggtataatgtgttttcagagtagtttcgcaactttctaattcaattttaactcccaaatagcattgttgacacggttatcccttgcaccagtaccatcaaccttccgcactaatggcaaccatggtaattggatgtggacacatcagtgtaatcctaccaatattccactatgaaaaagaaaaaaaaagattccaaaaccaaaggcacaattttgagaccaccctatcaaggataattctgccattctgctgagctgggaagaagatttgatcagttggaatagggaagatggtattggaatcattctaacttccaaacagaaacacacaggctctataatattaacttcaatcatgacttgacctcaaactaacaattaaacaaactcccttctgcctttgtttccgtgattgaaagagttatggatggtcgatgaacaggcaggaagaaagaaagcaatggaaaagagcaagagaattaacggctggactggaagagaacttttaaagacacgctttcgatgagaaccacacaaattgcccggcttctcacgagttaacaatctgcagcttgcgtgtaaataaaaaggggaaaaatggaaataagaagaggggaagatgccaccgtgtcaacccaagtatgcataaaaatggcgagggctatcatgcacatgaaaagtcaaaaacacacttgcaatagcattatccgacacaactcatcactgattattcgttcaataatagcatcactcacaagcatacaagcatacgtttgttcctttaataatgtttgcataatcatagggtatgtttggctagccaatagagccgctgcacgcagccataactgttgcagctacagacacaaacagtacactgtttgtgttggctgcacaacagtgaagttaagtgcagccgaacagagccaaaatcaacaattaatagtatcattttttaaaagacccaattactccgtcagacagacagtagcatgaaacggaccaaaggaagcagacttgcagaatagtgacattagattgatgaaggccaggagcagaagtgcgtgtgcgtctgtggtccgtccgatcgggcatcggacggtccagatggcgcgggaggttatggctggcgtcttcgtgcggcggccgcaccacacccacccgttgcgttgcggcggcctctctctctctttctctcctctctctctgcggctgcgcggtctccacggcgcggcgaggcaccggcggagggatggtgggctcggccgcgtactccgcggcgtcggccatcgtcgtggtgatggccaagggcaaggggcggggcggcagaggcggcccctctggcgccaacaaggtcagctcattcctcctcccctcaggtaccaacagtttgggtaatgggtacagtatgatcgaattcagcgcggggagtttggattgaactgaatgtgcctgtgaatgaacattgctgcaagggattagaggaattatcagttacgaatcattgcttcacaaaattctggggcacccacatggaaggggaaaaacggctgctgtgcgtgctcaaccatgcaaaaaaaaaagagttattcatgaggattgagttatgttttttttgttgttgtattaatcagaacatttagtgtggtacattctcaatttaatagcacatttgttggattatcaacaaatggaagatcttgtattggacccatgggtaacaggtcggctttatggctttgcgtcctcacacatgacacgctgcctatttatgtgtaggtttctgagcgacggcctcctaggataacttccaatgtgaagcagagcttgaggattctaaaattttggaaggtg

SEQ ID NO: 2312 - DNA, 604 bp, Oryza sativa
ttgccaaagtatctctagtttaataagggatggtactacaatatgtacacatatatccttgaatcctactcttcctacataactggtttgcatagagaaaatatttatgcataataatactaaactaaaattttgtgccatacctatgattagaggacgatggtcctgatggaatttctttgccctatagagcaaaaagcaaattggatatcaacagcacaaaaatgttcaataaacagaactaataaatgtggcacgacaaaactcgccttaatacgttctttcgcctcctgtaacagtctaagatgtgtcacacttagcttcatgcgatctatctcgtgatcaggtgtttctagtaaagtcttgacttctaaaaaaagtggacaaaaataaatgagttaagacctcatgttgtatgaaattgatgttttactatttgagccagctaccttccattctctttcgacgaattcggtgtgtaagcttcttctcaggttgttccaccgatgaatcttttgatgttttcttctgaccccctgaagatgctttacttttatttttctgaagcttctgcttctgtgattcctctatagtggaatccccc

SEQ ID NO: 2313 - DNA, 513 bp, Oryza sativa
atctggtttggaatccctcaattgcatttccagcatctcccttcctagacattcaaccgaactagccgggcccttgaatccatgtcccggccgagaggagctcccaacgccgccatgccttagtccagaataggccatcccccactacccgagattccccaggtcaggacaagaaaaacagaccagtattcactccattgcttgcagaagatcagcccgccattgcaatgccgtttcctccagcatcacttcagcaacagctgcatacacattccataaaaatgtgtcaagatcgagatgaaccttctatggcatagtaggaaatttttcttgtaaaagttgcttcatcaatttataactgatgaagaacatccaaaaaatcttcaggaagtaagtacactgcactcaagtacgaaacacataattcgtctgttagtacactactccaaaaggcatccggatttccagccacacagcgatcaagaagggccactaaataatcatcaagaaaaa

SEQ ID NO: 2314 - DNA, 588 bp, Oryza sativa
aagcaccgaaatctgaaaccttagtagtgaaggtaccatccaagagtatattagttgatttcacatctctatggaagattggcattgcagcagaggaatggagataagcaagtgcccctgcagcctctagagcaatcctcattcgatcatcccatgtcaacaaacaattggtgctcagatcaccatgaagaagaccatgaagtgtgccattagaaatgaattcatacactagaagaggcacctcagattcaaggcaacaaccaaaaagtttcaccacattacgatgaataatctgggaaaggatggcaacctcattaacaaattggtcaatctcactctgctccacaattttggacctctttatggcaaccactcgttgatcggataaaatccccttgtaaacagtaccatggcctccatatccaaggatacgtgttgggtcaaagttgttggctgctttctctaaatcttccaaagaaaatattcttgtgttaggagtaacattgttactggatgagatcagctgctccaagagaagccctctgttttttcggaagtatgcccttcgaatttcttccgagtgcttct

SEQ ID NO: 2315 - DNA, 510 bp, Oryza sativa
ccccatatatgcctagctggcttgctctgagcagtaacatgccctgagccaacaacaaaatggtagttgcaccttcacgcactgttggaattttttgctgcattttttgctctgttgaccacacaagcactcttgcacgagcaaggtattaattattttttctttttgctaattctatgttgacggtttcaggcaaagccattactatcaagtggggaaattaaacaattggttgatccattcttgggaaatgattatgactgtgacgaaatggaaaggatgatgttggattaggcctccattctttagctgatgactgactcttgcagccttgctatgcacaaggacatcttctcattcccgaccggaaatgtcacaggtaagaacctgaacaaattacatgtgcaaaatacttaaaaaatgtcttgatgattgacctcaacttgctatgttctggcaacacagattttgaaactgcttgaaggagatgacgaaacgatccactgacca

SEQ ID NO: 2316 - DNA, 22984 bp, Oryza sativa
  unsure (1)..(22984): unsure at all n locations
aaaactcaaaatcccttatattatgggacggagggagtaaatcgtagatgatgctgtatgtttgcatgagtttaaatatataattattactagtaggtaatgatgtggcatggttatattttgagctttagatttggtggactataactttatataaagtatatattaaagccctgacttaacaaatgctaagaagtgaaaatagtacattttaatttggagtactatgtatattcatcgaagttacacaataaactagatggactcatttttttcatttaacaacaaaaaaaattgtatcctggtgtagtgatttgttttatattaaacgtaaaaaaaattgtataccttcacatcgttgctataagctatagttctttgaggtggccatgattaccattgaacatttatcggagctaaagaaaataagctcgttctaggattaggtaaaggataatagaatgttattatgattcgtttcgatgtgcatgaaaacacgctgattttactctgtacatgcatgttatacgtggctaggggactgtcaggacgactgagagacagcaaacagaatccaaacatgtgacttcgcttgagtaaggaagtaaggggttaagcttaattactctgcaagttaacgtgcgtaagttgtaaccaattattccgcacgttgcccatggtttcttgttactactatagctagctagctttctttgatgagtgcatatgcctagtttgtctcatcatgtggcaaactcaatcaacgacaggcatgcatgctccattgcttgttcttccagccaggattagaaggacaaggactactacaacaaattaatttagattacttaaccttcaatttatcaccaaagtctgcaagtatgcatttgaattgtatacatacaaaatctcttgtgctcttcaagtaattacatgattcaactatgtgttgttcttttttagttcatatacaatatattgtcatcaattatcacatccacacatcattgcaaattctgacagaaaacacaagtgcaatcaagcaggtccccaacaacgagcggacatcattaagcatagtacaagaagatctgctagataaacactgaaaaatcaggtttgagtacacaccaaatcaaccagtagacttttattttgttttatgtgtaatctgtcctgcttacttgtgttctaatttctatatatatgtatatatcgagggaaacagctgtgtaattgcacatcatcatgccaccagtttgagtacaaataaattagacctgtcatcataatggcatatttacattaattaattagttagtgtaagagacagccataagctaacttttgtggattatgacagtactccctcaattctaaattggtctacatatttcatatatacactaagatcaagaaaagctaataactctctcatactatatttactctaacaacaaactcgatgcatgcaccatccatactattttctagccaatagcaaatcaagatattacatgtgtgttataaatatttatgtgcatgaatgtatgcatcaatatccatttacttcaatacacaaataacgaatagacttaatgaatgaacaaatatgtagatcgatttggaatggaggaagtactttttaatcacaagaatactcccttaaaccgttgggcgcggcaaccaaaaatacacgttgtgcaccaatgtcaaccagagtttcatacgacgtactaggaattaatagcctaaactttttaattcctctttttttcagggcaaagtgatagcgtatgtaaattcaggaaagggatcggacaacgctttgtgacaggaatcagaagtttcagaacaatcaatccgtcctcggatccatccagcaggagaaacaggtactgtatgcctgaacaatcataacttgttaatgtgtcacattctagtaccagttcagttttgtaggatggagagagtatattctgaatgatctgatgactaacctaagaacacaatattaaggaaatctagtagccagtatgaacacccaatgtgtgctgtcatgcgtcatgcggcgcatcatcacttcatcagtcagtattattattattattattattattggttcagagtagtgagctccagaataatggcagctgataggctcatcttcagataactacataattaagcaatgctgtctcaagaaccgttgacatcgcaaaacaataatcaatgaacgatgatgacaatgatgatgctggccttggggggtgatgtgagactcctgaaaagttaagcaatgaactgcatgctactggagtagtagctagccctagctggccgatggtgataaacttgatcttggaatattctgatagggttggtgctctgtaaaatatacttcactagtcggtggacgaggtattagctgactggagtatatgcaaatttgcatgcccttgaagagttgacgtagatttatttcaaaagaaaaaggacgaagaagtagtagtagcttgtaaacttgggaaaacccaaggaaacgtaacgcaacgcccttgttgtttcttcgggactgttcaaattactaccaaaatgaacattttaaaatttggtcatacccaaattttggcaagttggtaacattgctaaattttggtaggatatattaaatatgttattgtcaaattctttaagcagtaccaatatgtgataacaaactaaatgcatccatatatttattatttgttttaagaaatggtatggttcaagttcatgttatttctgagtgttttgagctcagcccacgttctcatgccctagagctcacattgggccagattttgaagcccagccccagcatagccgagcgaagcctatgggccgttttcctgtcagcccagataagtatgaggctcatatactacagcccaaagaagaagcccatgaaaaatctcggtggaaagcccagctacctcgcgaattcgtcgttttcggcggctcgagctcgaagcctcgaacggagtagttgcacgatgaatttttttcgtttttagattttttttaatatttacagaaataatctatcgaccaaaataattgcagaaatagcccctgccgccctaatggtgggcggcaagctgacgtggcagacggtgggtcgaccgcgccgtctgccgccgtcggccaaaattgcgattaggcccttgccgcccatacagagggcggcaaggggctaattgcaattttggctgcccataaagagcttgcggccgtactttttcatctggatcccttgccgccccaatagagggcggcaagggacccagatgaaaaaagtacggccaaaagatttttctatgttatgttaataataaataaagaagtatttattggtaaaacttgttaatattgttataaaaatgtattgaagttggttgttgcgcaatttcatatgttaagtgaggtattattttgtaccttattcgacgtattagtactcggataatttatataggcctatcgcagtctgggacgtagaaacattatatggacttaaacaaggagaattatgtaacatgaagaaatagtagtacaatttgaacatgatacgactatttgcattgcggttacatagatgatattagattcgaactagaagggaggtagtgcaatagttgaacacaacgacgatgtagtaatgggacaaggaagcatgacagtagaaatttcaatatgccaagttgtccgataatagctaacccctacgtgaggatccctctcctctctcaaaccgtgctttagtaaccctgtattgctctggtagttcaagctgcacaacacggctaggtggagttagaacccttctggtgtctatctattctctgtattgacatctccttggtggttcctgggaggaaagaatagatgtaaagcaagcaaagttagtaaatgttgtgagaaaataaggattcatgtaatcaaaatattcttaccatgaaatcgtcgtcaagaatatttggacaaacaaagaaccttcgacccaatgttgtaggatttatggaacgaagaacctgacaacgatcaccacacctgcatcttggacgggcttcccatggagggagtgccgtagttagcacccgccagtcgctctgttgttcacgacattgtcgttcataagccgcttttctctgtaagtattgctcagtactttcggatgcgaaataccagcgaccttcttgtaaacaagtggttagatcgagaatgggattttctgtatcgacccactcgatgtatgcgcaagccgtagtgcgggtctgccgaatagagtagtgttacgaagaataaagcgattgcccatacggaatgaataagcatatgcagataataaaatacctcacggtcatagttagggcacctaaaaaagcgccttcctcgaatatcaggattcctcgaagctattagttggcatcgatcaccgcataggcagcgaggacgctggcaccaaggtggtagtaggtatacacaaggatcgctacgccagtttggatcctcaacaccccggcgtctagccattgacgaaagccggtcggatttgtaatgaagcaagtggggaagagagtactgaatgtgactgagttctgaaagattgtgaggcctcactcgttaaggcgacttatataggcgcaaaaaatcgagtgatacccctgacatgtgaacgtggtggggtatggtgggtacacctgattggcgccgaaagatacatgcatgatcggcgccgaaagttacattggtcgtatgcgccaaatggcgggcaaatactcgtatcacacgcgaataaaggaggctgcatcggtgcggcagaaagtagtcgtgcatgcgccgaaaggtatcgtgcatgcgccgaaaggtatcgtgcatatataacaacaacgtagtcattacacaagcatacagtactggaaagtgaagcaagtaaacaaagagaagactgctctactggccctgccccgcgccgcgaccacgcttggtcctccgggcctgtgctcgcacgtggtcctgggagtaggtgaaacgatccggtggcatagcacgggtagcacgagtgtcccgcggaggagtggcctgcgcctggtcctgcgtctgcaccggcggtgcgcctcccagctgtgaggggccgatgatgtcctctgtcgagcctgaagcgaagtcgaagtcagtgatgtcgaagagcaaggtggaaggcagcaagcggtccgacgaggtcccagcatggtccagtggtggaccctgactcgacgtgccggctgcctgtgacgaagtcccggtgtactgccagaactgcgctgagtgcgaggtcgacacagctgcctgagacgctgaccctgcagcctgggagaagtgggcagcctgcgtcatagcgaactgggcgaaacctacacatcgacaacgggacccttgtaagctaagacataaaatgtatgtaaattgattgtcgaagtaatgttgtttttttaagtacctgtggggggcacaacagaaggcctagccgaggaaggcggggtgttgaacggtgcacgaaaccctgaagcaatcggcaagtgaaacggctcacttatatgtgcgaggcatgtacagaaatagtaataaaaatacttacctccgtgcggagggggagtcggcctaggaacgtgagcagctggatggggactagtcggtacgggtggccgctgtacagctacgtctgcccgagcaatgtcgtctgcacgacaggtgagcactcggagaatcgagcgcatcgactccaccatccgcgtgtacgtcgtcaggtgctcctctacgggtaccggaatccccgcgcctaaacgttggatcgtcgttgaaccgtcaacgacgacccggttgatgtcgtcgacctgcatggttaatttgttcgtaaatatttgtaaaatttgacgaagagaaagacatgaaaacataaaggaatggtgcgatgcagggtactcacagcacgagcgaagtcctggtcgcggtgcctggcatagaggtctctagtgctcgcaacgtggggctgctgctccaagggagcgaaggtgaccctagtacgggtgcgtggctggtaccagcgtaggtaggcctggtacgactcctcagtgtgtggctctccctcgtggtccatgacctcctcggttgcgagcaaccagtcctcaacaaaagtcgccaacttggcgggccagtcgccagctgactgctgacccttgcgcgagtacctgcgaattaatgtgtaatattagtgtgaaacgacagatgttacaaattattgtgaacaggcagattttaatgcaacaacggaaagcgtagtgcaagatcttaccggtgaacagcagctgggacggtggtcggaaacggtactggaaagggctgacggaagccgaactgccgcattacgcggaaaggggcgtgaggctcaacgcagatgtcgaagaccatcggaactgtagtcatccagtacgcctggtccctggtgcagagtgtggacagacccaacggcgcatgagcctgggtagccgcggcactgtagggctcccacacgacgtcagtcggcagaaggcggtcgaactccataacaaactcaggatacgaccgcctaacctggacgtgagcccatcggcgctgcaatacgagacgatcgatgtgatgtacaatgaacttagcaattaacttaacaatacgataagatcgatgcaacgtacctgacgacggcaccacagagtacccatcgtaggatagtcgacctctggtcgctcctcgtacagtgactcctcgtacgcgtgctggtccacctcagggcggccgatcgcaatcctctcagctgcccagatagaaagaaagagagggcacccaccaaaggtcgcgctgggatccgtcttcgtgcaagactcacaaagtgcacggtacagagccgccaacaacgcggaaccccagctccactgaggcacctcgcctaccgcggcgtcggcgatgctcctggcgtagtgcacgagtcccttgtcgaccgcgtgcccgtgaccgccacagaacatcacccagccaaaaagccagagcaagtacgcctccaaacatcggctgtaggagtactcgtcggcctccgcctatagctgctcaacctgcaagccgtcgataaaatgttaggcaccttaactacggactaaatatgtaatacgattgtcatttcggtacaaaaacactctcggtgaactgaagcagccacctcttcgtaggtccggtgttgcggtggtgtgccaacggctcgagcgggaggtgcggtgcgcgctgtactagtgcgaaacgtgccgtcagatcgtcctgccagtccacagccatggtcactggcccaacagcgtctcccgcgagcggtagccctaacaagtacgatacgtcctgtagggtaggggctacctcaccgcacggcaagtgaaaagtgtgcgtctttggcctccatcgatcgaccaaagctgctaggagggacctgtccacagtccatcgtctggctgggtccgcgtcgccggccgcagcctccaccagccgacgcatcggtaggaggccggcctcacgtagcctgcaataacaaattaatatgtcattataaaaaatattacagtgcaactaacttatagtaaaacactgttcgtacctctcgacaaaggagtcatgaaccgtgagtagctcaccgcacgtccgtgcccggaacgtcccaagctgagccccctgcaccgtagtaaggtgagaccggtgtcggtgatctatcgccgggtccaacaactgaggtgtatcctgacgtgccatctctgaaaaatatagtgtttcgtgttagaacaattcaaaaaatagtaatgtaaaacaaaagataacttgcaaaattataaaatagtaataaaatcatgagattaattatgtacaacaagagtacaggctatttaaatatagcaaacgttactaatggtacataacgatgacgtgcaatttaacatatatgtagagttcaataatataacataacattacgtgtcgaagtccgacatacatcagcatacctaagacgttaggcgccttagtccgacgttacatcacgagacctaaagacatgacatgccgaagtctgacattacacgacgaaacataaacacatcgataagttcgaaacgaattacaagcaaatccacatgccgacatagaacataagaactacaccacgtagccagacgtggcacgacgacgcctaggacgtggtcgagtggaggtagtgccttcacccgtagggcgagctccatctgctgctgatcctgatagtcctgcctccgtcgcacttggtttctccttgtctttaggacaatgcttgtaggtgtgcccatgttcatcgcatttgctgcaacgcttcaccatgccagcctccgactcgtccatatcgttgcggatgcgacgagtcctcctccttccagccttgcctcggagcttcgatgggtcaggaatattgagtacttcatcgttagtctctgtgaactccccagctatgccgaacccataaatctcgccgctccatgtatgatatattgcttgcttactgaagtactgtgacacatatactgcatctggtatgccacactccgctgcggcagcaatgacatgggtgcatggcctgtggagcagcttcggctttgcacaagagcaatgacatgtgccgtcggctttgagaacacactcctacttcactctcttgcggtagatacccctgcctgccttatcttgacatagtatctcaaacctgtgctgttgggtaccttgcactagagctcgatgtttcatggcctttttacgcaactcctctagctttttctgcatgaaagctccaaacaaaatgctgttgttcggcatagagggaagaactgcctggaaccgatccctaaaatacctgcatgtcccatgtaaaatgaactccactatgccaactagtggcagtccacggacaccgcgcatcacccagttgtaaacttctgccaaatttgttgtcattattccatatctagcaccacctgtgtcatacgccttggcccatttctcttttggttcatgcagaatccactgagaaaatttccgaatctccaatccagttcttctaaccaatgttggactatccgttgggagaggtccaagagcttgaggagggtcagcaacggcggtcgatggagctgctgcacgctgatcactgcatttggctgtcaactcatctaatctcttccaaagctcattgaattttttctcctggttctgattgcacagcctcttgaacatgttcatgagctccttgttcttgaattgcttgaagaaattagctcccatatgacgcatgcaccacctactctgtacatcttcccaaacaccggggtatcctcgttccatactcccaaactgcaactcttctatcactcgcagaatgccagcgtgcctatcatgtatcaggcacacatttggcctcataccaacaacttttgttttaaccaatttcaggaaccagtaccagctgtcggtattctcactctcaacaaaagcaaatgccaagggcaatacctgattgttcccatctacccctattgctgttagtatctggccccgatactttcctgtcaagaatgtcccatcaatacagagaacaggacgacagttcacgaatgccatcttgcatacatgtagagctaagaacgccctttgcagcacactcttgctaggatattcaattgaggggaatttcttcacttcgtaagagctcccagggtttctttcctcgataacaccaagcaggcgtggcaaattgtcatacgaggcttcgtaagttccaaatctcatctctattattttctgtttggccctccaggccttggcatagctaatagtatacttgtatgtctcttcgatgtgtcggattattgaccttggttcatatgtgagattatcgatgacatgcgcatacatctcagatgcaacaaatgcacaagtaatgttcctgtggtatttctaaacaccaggtagaaaacatgtatgcttggtaacgactgacactgtccaataatccttccatttccccttatacgcgtgcactctctagggacaaccatctttttccttaacacaccgaacttcatattgcgaccggttcgacttggcaacccaaaactctctatgaagtgacactgcaaaatgttttaccgcctccttcatatcttctgctctactataaatcgctccctgaataacctcattttctttgtactcccatctcacactatcctcttcagagacgatcagcccagaaaaatcctcactagcccattctgctggattaatatccgtctcatcatctaacgaatcaccttcctctacacgctcgttgtcagaattctccctctctatttcatccacaatggcaccgacagtctccccctcgtcggccactccacctggttgaataccaactggagctactacgcccccgtcctctcgtgcgttgacctcctccacagaagtctcgtttacttcagcacttggtccctcgccatcatccatgttcatctgcacacctggatccttcgggtgaacaaacggaaccaaagctagaggccacccgcgttgcaatgcattttccaaataccatctccacactcgagagttttgaactggcattagttcccaataaaaaccctcagttgcccgacttactataacattgattgttatgtcacttgtctgtggatcaactctcaagcccttcattaaccatccttttatagaaggtacactcctctcagccggtctatcaattcccctttctgatacaataaaatctgacagatctaccccagttggcccgtaacggacgtttcctggtccatggtaaacttggaatatttgtttgttcgacatatctgtcaacgaaataactagatcatattactctttcatgcaataaacatctacaacgtaatatcttcttgtgtaagccaatgcaacggtaatgtattgattccaaactagcatatctacgtagttactaatatctacaatacgcacttctagattagtacaactaaaaccctaaaaatataatgcattttttcaaacaaatttttaaagaatacacactatttaactcaatagtcacatataggatctatgaatattacctgaaattggcgtctgaatccggcagggcttcgccccttcttctcttctcctcccctctcttcttttttttttcactggaattgaggagagaagaatgagggctgggggctgggcagcaggccttttataggcagcgaggcctgccgcccggccaaagggcggcaaggggccgcctgcaaaatagccggccccgactggctttttttgcattcgggccccttgccgccccaccagagggcggcaagggttttcctgcaaaaaaccctccctccgtcaccgcccgttcctcccccgtttgccacgtcagcttgccgccccagagatggggcggcagggtctatttttgtaattttttttggccgatagattatttctgtaaatatttttaaaaaaaatctaaaaccgaaaaaaatccattgcacgatgatgagtcgatgagatgacaaattcacaaatgctccactcaaggaagagcgccaccgttcacaaacctatctttctgctttcctaacctgacatgtattattgtgtagtactccctccgtcacataatataagagattttgagtttttgtttgcattgtttgaccactcgttttatttaaaaaatttgtgcaaatataaaaaacgaaaagttgtgcttaaaatactttagataataaagtaagtcaaaaaaataaataataattctaatattttttaaataagatgagtgaacaaatagtgtaagtaaaaactcaaaatcccttgtattatggaatggagtaatacgtactactttcgtgttgtctgacttgttgtctgcctgtaatttactatttacccagggtcaacaatcagtttgacattttgtaaattgtgatccctcttgcgttgatcttccgttgtcacagattttaattttcatacaagtactaatacatgtatttcagccgtcaaaaccttccagatatcgcacaactcgctagcaatacagaagtagtaatactgtaacttccaagaaggattaaggaataatcttctctgaaaggtcaaatatcaaattctgtcccaaaattcagtagcacaaaagacagtcgtacaagaaagggagaaggaaaagaaacattcgtaattaattctgaattttaatctcactgcttatgttaattactaaaccgagtgacacactgacacctgaagaagatgaatcattaacgaccatggagagaaccacaacgaaaacagcaaacgataatgtggtctgaggatgatgagccgcccatgttgaccaacctactccactaggctgaccaccactgcaaccatcagctcatcaggagcacgagcacgaggactcatcaaggccgtccatggtccattggacgcctgtgattgcttcctgagggagactgtcattcgtgaacgtccacataccgtgttgcaacagcaaagtcgatgtccatcctgactcggtctatttatgctcataaaccatggtctcttgtttttctctctttctttcgatgcttcgacgaacttgactatttgcttcttttacttcttaatttaaaaaaaaagattatttgcttcttttcttaccaggaacagaaacaattgattagtacaaaatggtacttcctccgtttcacaatataagactttctagcattgttcacattcatatagatgttaatgaatctaaacacatataaatatttagaatcatttatatctttatgaatgtaaacaatgctaaaaaaaattttacattgtgaaacggaaggttgtacaaaacaaaatacatcttaaaaaaaatcacttggggttacatctgagaaaaaaaaatcttaaggattaacaaaccagctatgctctcattggatgtactagtatcatgtatgatatggaagcattttatgtaaactaattgagcacttgaggtgttgaagtggcgttaattagtccaataagcagacgatttgaccctaatagagtcattacaaggagcagcccggtcggtcagtgtgtgtcactgtctctcaccctcccaacgcttagacatttcaacgttctcctccacagcaacagcagcagcagcagcatctcctcttcttcaccgcatctgccagcctagcgagcctaatcaggtcttcgtcttcttcttcctcatccccgtgccaataccgatttcgcgagctccgatggattccgcgagagaggagacgtcgccatgagaggggaagccgagctgtgcgtgtagctcgctgcaatcgctgcgccggtcaagaaaccagccggaatcggcggctgattccggtggaggaagatgcggcggaaggcggccggagatgctgctctggtaggcggctgcttcttgctgctcctccaccctctcctctcccatggcgcggacatgccgttgggctcctccctctcgccggcgaaccaggcgttgtggtcgtctcccaacaacaccttctccctctccttcacggcgtccccgacctcgccgtccctcttcgtcgccgccatcacctacgccggcggggtgcccgtgtggacggccggcaacggcgcgaccgttgactccggtggcgcgctccgcctctcgtccagcggcgacctccagctcgtcaacggctccggcgccgtggtctggtcatcgaacaccggcgggcagggggtcaccaccgccgcgctgcaggagagcggcaacctcctgctcaggaactcgtcggcgacgttgtggcaatcgttcgaacaccccacggacacggtggtgatggggcagaacttcacctccggcatgaacctcacctcggcgagctaccaattctccctcgaccggaacaccggcaacctcaccctcaagtggaccggcggcggcacggtcacctacttcaacaaggggtacaacaccaccttcacggcgaacaagacgctgagctcgccgacgctggcgatgcaaaccaacggtatcgtctccctcaccgacggctcgctcacctctcccgtcgtcgtcgcgtacagcagcaactacggcgagagcggcgacatgctgaggttcgtgcgcctagacacggacggcaacttccgcgcctacagcgcggcgcgcggcagcaacgcgccgacggagcagtggtcggcggtggcggaccagtgccaggtgttcggctactgcggcaacatgggcgtgtgcggctacaacggcacgtcgccggtgtgccggtgcccgtcggagaacttccagctgagcaacccggccgacccgcgcggcggctgccggcgcaagatcgagctccagaactgcccgggcaactccaccatgctccagctcgacaacacgcagttcctgacctacccgccggagatcacgacggagcagttcttcgtcggcatcaccgcctgccgcctcaactgcctctccggcagctcgtgcgtcgcctccacggcgctctccgacggctcgggcctctgcttcctcaaggtgtccaacttcgtcagcgggtaccagtccgcggcgctgcccagcacgtcgttcgtcaaggtctgcttcccggggatccccaacccgcccctcggcggcggcgggtcgccgtcgggcagggcgtcgggcgtccgcgggtgggtggtcgcggtggtggtgctcggcgcggtgtccgggctggtgctgtgcgagtgggcgctgtggtgggtgttctgccggcacagccccaagtacggcgcggcgtcggcgcagtacgcgctgctggagtacgcgtccggcgcgccggtgcagttctcgtaccgggagctgcagcgatcgaccaaggggttcaaggagaagctgggcgccggcgggttcggcgccgtgtaccgcggcgtgctggcgaaccggacggtggtggcggtgaagcagctggaggggatcgagcagggggagaagcagttcaggatggaggtggccaccatcagcagcacgcaccacctcaacctcgtccgcctcatcggcttctgctccgaggggcgccaccgcctgctcgtctacgagttcatgaagaacggctccctcgacgccttcctcttcgccgacgcgccgggcggcaggatgccgtggccgacgcggttcgccgtcgccgtcggcaccgcccgcggcatcacctacctccacgaggagtgccgcgactgcatcgtccactgcgacatcaagcccgagaacatcctcctcgacgagcaccacaacgccaaggtctccgacttcggcctcgccaagctcgtcaaccccaaggatcaccgccaccggacgctcaccagcgtgcgcgggacgaggggctacctcgcgccggagtggctcgccaacctccccatcacggccaagtccgacgtctacagctacggcatggtgctgctcgagctcgtcagcggccaccgcaacttcgacgtgtcggaggagaccggccggaagaagtactccgtgtgggcgtacgaggagtacgagaaggggaacatcgccgccattgtcgacaagaagctccccggggaggacatcgacatggtccaggtggagcgcgcgctgcaggtgagcttctggtgcatccaggagcagccggcgcagcggccgtcgatggggaaggtggtgcagatgctggaagggatcatggatctcgagaggccgccgccgcccaagtcgtcggacagcttcttgagcctgacgtcggcgaccaccgccaccggtgtcagcggcagcggcagcaccagcatggtctccacgtttacttcctcggcggcgccgccggcgcccacgccgtcgccgaacgtcgacgaggtccagcaggagatggccgtgggacgctcggcgtcggccaggatccgcgaccgggcgtctcgttcgctgctggggcaggagccatacatgacaatgtaaaacttcatcttctcatgaggtgaatagcaaaatgattttgctttttttttttgctccagtaaatgggaaaattgctctggttagtgagcaattagggagttgatctggttgattttgttttggtggaacatagaagcagctgtcggtggaagagaagtgcttttcactgatggtgagcaatttcgtacttctacttgagaggatatctatgtgcctgatgagctgaattctgcaatttgtaagtacagattagatcaaactcaatggtatattcgcgttgtaacttgtacaaataattcaaatgaggcgatgcattgataaatggagtgcaaacatagatgcaatagcttgtctgattgtagattatggttttggggaagctaaagcaaaggcagagataagcagatcaataaaaattcagctacttcagtttgttcagtactgagaagcagcttgcctcacactcacatgcatactactggtaagagattgttttggcatttggggcaaggcatgagcaatctggcagattgatagtacacaaaaacatgtgcaggaactttcaacaaacttctctatcaacctttattccattaaattaaatgcatgggacccatgacaaccctttccaaagatcaaattgcctgcatcatgtgtcatcactggcaattgcatctccatgtccatggagagcttgcaattgcgtagtagctgaggaaacatgtgattaaggcttatactgggtcttatttaatgctagatttatgagcacacagctgttcttgagtcttggccccttgttcagctattcattcagaagcagtcactgaagaatgttgttgagcttagactcactgatttataagcttcctgtttagcaagcagactcatcggtgttacattcagaaaataccggcacattccaacttgaacctagatttattggccaattgctttagttaagaaaatgaagtaaaatggttccatagtgtagtggttagcactccagactttgaatctggcgacctgggttcgaatcccggtgggacctttttttttagttttactaatctttttgcatcactgcatttaacatcatcactgtctaaacaacttcttgacgcaaactgcatatcctttccttttcttaggtgcatttatgcgaagttactgatgattatgatgttggagccataagtttccaaaacaataacaaccttaccgacagaattcctcctaccctcaaactgttgaagtcattttcttgatcaaaacgaactaagtgtcatgtccttttattgttggaccacttatcgtccttatcttagcttctcgtagtttaacatgtgacaccgaagaaacattcagccatgataagagcagtccgaactaagatattcgccagtctcacccaccaccaattgaactgtcatatacggtctttctccaggtctcctgcctcccggtcagccaatgcccaagaacaattagtgtaaccacacaagtaatcatcctcagcttttccaatgtttgtgagcttggacaggatgaacaaaaggcggggttcaaatgtcaatgaataactttgaacatgccctgngtttaaaataattccattcttaccagttctgcacttcaattcggttgcaacaacaaagttggcagttctagaaagtcattcagaaagacccaagcacttcaaattttcttttgaagaaaaaggacagataacgaagaaaagctgtggaatactttacagagcggggagttttgcgtggaaaacttacagtgttgtaatccagtattgtaggcaagaaacttgcccacctttatctgtacatgattatcagatccttcttcattgaagtcagatgataaatttgaaggaccgtattagtgaagtcctcctagttagtactcaatccaattagcatccagatccttcagcttcaggagccatttctgtttgtccggagaaacgcttggtttgtttggcttgcttgcgtgtttatttgttatggcatatgaggatccagccttactctcatcatcagagttggctcgccttctaggtcgtctgagttcaagagaaagaaggcgagaaacctcgtgtactccaccccatttttccaacgcccgagcaatgtcataacgtcctatcattaacaacaaagtacgagcattattcataaagaaagattgtgagttcttgacaaaagagagaactggtaaaactagcatgataggaacccaggcaataaggttgttacaaacatcagtctgacataaaggaatggcatccatgaatgctatgttgctatgtagtcaactcctcaattcaccgctctaaaaaaactactgaattcaccaatcttaacatgtatatatatctggcctgacgatcgagaattgacggaagtgttaaaaatgggaacatggtgaactttgggtgctattaaagtgaaccggtaactttcggtgctataaaaccaaaaacgtgaactttcgatgctatataaccaaatttgccaaaattttaatatgattagaggaaactgaacatattttcatgccccagagaaaaaaaagggtccaaggtttccaggtaccttaagcaagcatgggaaaaattttgttcaaaacacctcagtcaaacatggcttcaataattttgaccagaaaaaagtcagaatgactttgtataactctataaggtttatcaactgccagataaactacactaagaaaatatagataataaattgaccatagcaaatatttagacaaaaataatcaaatacctgctctctcaaaggactttctacttggcatataagcagggtccatcccccaattcttctggaatcgcctgatctgtatataatggttactgttaataacatgtcaagaatgaaaggagtgctcattatcactcctcatgctggaaatctcagctcacaatttttagcattctgaactactaaagccctgtagaacacagtgggaggaggggtatatacttttcattacctcttcttgcaagttctccagattatcccaataacctcttggtttccggtttttataagaaagtgaaagattcattatgctggcaatcttcctgaacccacccatgcgtgttattgccttctcgatatccacccttccatgcaaacgaaggtgttttctcttaggcatgaagccatcctgaccatattttgcaataaatttctcaagttcagatttgaggacctcaatgtccttttgaaggcctgggacttttggtctctgcttcacaggactcgaagaacatgacgtggatgcttgttctgattgcctaccttctgcataatcaatagcaatagtatctgcatttgatgctacaatagagctacttgtggagttaccgctctcagcttctgccttttcaatataatcacggattgcacataagtttgatggaagatcttcatatatgacctgaggtacgtaatcaaaatgtttgttttcttttagcaaaaaaaaatcattaacatgtttatcaaagcaccatgaccatgcataaatcagcttttgataagaagaaagagtggcaaaaaatcataaagctgcattcattcccctacataccccccctccccccccccccaaatagcatcaagtcataagattagatatccttaaagaatgtgacggtacaactaagtttaataaagcgcaatgtctgcgtcatgaggatatcttataaaaagctgtttaaacaagtttttggtactgacgagagggggaaaaaatccatgtgaggttatccagagataataaaatatggaactattattcttgcactaaccaaatgaagcaacgcaggataatacagatagaggatgtgtgcttatacctattcagaatttagagattcattcatttttcaggaaggtgtttatttttactgaatttctggtgaacataaagactaaaagttttcgcatgagcacaatagcacgatgttatgctcaactagatgatacatccatcagaaagttgctttgaaaacttaatcaccaagcatcaaaaccaactattatgaacatatacccctggattaaatagtattagtacaattggtcctcagtgaaccacaattgaaattcaggggcacaacaaagcgtattttaattaccatttttccacttcataacattaacgtgttctctatatttattgataaactacatgcatataaatttcttatacctcttcaaggatagactctgagagaaaggtatctttatgcatcttagtctcaaccatatacttcaataaggtgtgctgatcaccaagttgttctaggcgccattttcctttaaatgagtagaaatcaccttcaacttgctcaaagcttatctcacgttcaagtttctcgcgaagatccataacaacacgggcatgaagcaccatataaagtagacccttgcaaccctcctataaaagatatgagatgttgcagttcttgcaaagctcatgaaacaaccaaattgaattaaattcttccagaaaaagtatcttttgggaggagaaggtgatctttcttcccatttttaggacaaaagctaaattccatttgtttagtattctggagtgataggtgcataaaagcatgaagttgcaagacttggtaaaaatgatagatcacttggtagcttggactaaaagtgaaaacctaagctagctatcaaccagaaagtgaaattgaggattgacgctttctatagaaaaggagcaatcccacctctagacttaagatgctaattcagtaacgtatgagataagtatttagcaaagctcccacctgcagtatgcgaaccttgttattatcccgacgaataatcctactgatagccagattcggcacaaatctgacagataactttgttagctcatacttgtataacaagatatctgaactgtaaaaactgaaggaagatagaactactaactcaggcaacttctcatatgcagtgagaatattccatacttctcgcactggcgctttcacagtgatactagcaaacacaaacctgtgagccccttcatgttccttcaatcaaatcatttcacgaggggaagacaaatctgtcagtgtgcttcccatcaaaatataagaacccaatgataattcttagatgcatacaaatttagtaagttaccaggagaccatcaaatcttcgaagatggatctcatctaccacacacggcctatcaagtctgcagacatttccatatactccccatttgctgttcaactcagaaggaggtgaagcaagcacaccaccaagaccagaaggaggtgtttctttgaacttactaggagcaatggcatcattctcagtggttgcattacggaagttatgaaacctggagcctgcaccactaaattttgcagttccatgtctttggtttcctaaatatatgttttcagctctacaggccaacgctccaagattcacaggaagatccgaccttatgatcctctcaagaaatattgctgggaaattaaatcttggaatcacattaacttcatacaacaaaattgcactagatgacctgtcataaaacgaaacaaaatgtcatatgagacctctaaactggcattacttttttgctagctaaaacatgaagatgtttaaggatccacgaattctagatcagagcatcatgtggctgccaaaaatgtaagtaactggtaactcagtaagcaaacagtctggacgatcatcaaaggcatatgcaataaacaagacaagacgatgaccatgaaatccccaccttggaccagatctgatggaccatttcccttcgaacttcttaaagtcaccatcaaccatggagaagtggagctctcgtccattaacctggatgttgactgtttaataaggaagaatagcttgatataataactaggaaattaggagaatcattcaatagtcaacacctctttaaattcgctatctaaaatttatacaactaaacgccaaatatggtgtaacatcaagatagtttcaccacaagaatcaacgcattcagaaaggttaacagtagaagatgacggctaggttcgttcatgccatgggttgtcaggaacaaatctacaaatattctcatgcattcagctcaaatgttcacctaacctaaccatctatatgtttcaattgcatcttaattacctcgtgaaaaacgaaaatcacgactaatttagttgcaacataacaaaaacgaggttagggtgatcacttcacgtacagcatccggaacctccttgagatccaacacgacgcgtgcctcgatatgccagtaaagcgcttgctgcagccccctctgctcgagccatactcggccctgatgcgggcatggaatcctcccactgcgttgccgaacgacgcacaaatttcccccaattagaccctcaatgagcatgcgagaatttgcaatgacacacgagaaggagagatggaatgtggacctgtgaacgaggttggggatgaattcggcgagccgctcgtagtcggtgatgacgcgccacacggtgtcgacgtcggcggccaccgccacggacgcgaacacccgccgctcgcgccacgacaccacgtccacgtcgcactgcacgccggggcccgcggcgctcttcccgccgcgcccgcctccgccgccgtggtactcagcgccccagtggtcgccggtggcggcggcggccgcggccgtggtgaccgcacggccagaatggtgccgccagagcgccgccccgcaaggaggcgcgccgcggtggctagggttcgcgcaggggttcggaattcgcggcaggaatgc

SEQ ID NO: 2317 - DNA, 7045 bp, Oryza sativa
gcccgcgcgccgctccgcccgccgtccgccgcccaccgctcgcgcgccactccgccgcctgccgcccgagcgccgctccgcccgccgtctgcccgtgcgccactccgccgcccgctgcccgcgcgtggcttctccccccgccggtgccatgaagaggagagaggaagagaggtgaggggagaggaagaagaggctgacgcgtggggcccacgtggggtgccacgctgagtcagctgccacatcagataaaacaagactcaaaaccaccgagggatctagtttgcactggttttataagttgggggacgccgaatatctggtattgtggttgggggatgattttgtaacttgatgacaaagttgagggacctccggtgtactatttcctatttgtacaccaccagcaacatgatctgacatctagctccaaaacatatgtgcattcgtctataattatccattcacataaatagacaagtatttgtacagcgtagaattgcatagtacagagataagcacacgtcggcagtttaaacaagattaattaaggagaaaaaaaagctgaatcagtgtgctacacaatcacccaaagcacacgcctacacgcagcaaaagaacatgaaagcacgagaaattaaaattaaaaacaccgagcggatctcccagcgaaatcgttcgttttgatctcatcagctgatgccgtcgaagttgctgctcatgagcgacaatgtcgcgctcggtagcacccggttcacctgaggttgctctgcgaattgattaaaccaaacacaccattgcgttcagttcgcatcatcaggatctgacaaaactgtagctaaaatcaccaattaattaatttgattagactactcactcttaaccgcctccagctccgacggagtgagcctcgccgagaacccgctcacgacgttcttgtagttgtatatgattgcccccttcgccttctcctcgctgaattcatttccagattccaaatcatttatcagaagttgcattaattcagaattgttaatttggatcggttgattttgatcgatgcagcggcgaggatggtatactattacctgccgagcgcggcggcgaggatggagagctggtaggcggtgcagacgacgccggagggcggggggtcgacgaagacgaggtaattagctgcgccgccttctccggcggcgacagccgcggccatggcgacggcggcggcgaggaggagggagacggtggcggtccaaggtttcatggcgagattggcgaaggatctcagcggtgcctctcctctatcggattgctgtttatgagcagcgaacgagaggtccgtattaagctgcgggatgcattagcattagctcctataatagaatgtgaatgtatagctaatctgcattttggaaaaaatggagcttaattaacaaaatacaatattacacttgtgttcattcagatcaagtaaggatacaaaactacgtatgtatttttacaaactaacaaaaatacagaaccggactcccctgaatctgcaaagtgcaatacctaaaaactccacacgcgcgctgttaaatacacgtaaaacttgaacatagattttcataattaacgagtagaagcaaacacgtagtattaatttctgtgtgtatgaatttcttgaggttttcatcaggtgacagcacatgcaatgtcatcgatcatacgacgacgggcgcaacggcggcgtcggagccgtgcttggtgacgtcgtacatctcgccgtcgccccagagcgcgtaggcctcctcgccgtggacggcgtcgtcgccgacctcgagcttgtcgtcgggcatgcggagcgggacgaggaggttgatggcgaggcagatgagggaggtgacggcgacgttccaggcgacgacgaagaggccaccggcgatctgcttgccgaactgggcgccgccggcgccgccgtagaaggcgccccgggagtcggcgacggggaggaagaggttgcagagggtgggctcggcgaagaggccggtgaggaggccgccgaggaggccggcgacgccgtgggtgtggaagacgccgagggtgtcgtcgacgcgctgcaggatcttggagcgcttgtggaggatcatcatggtgtaccacgggatgctgccggcgagcacccccatcaccagcgccgcccacccctgcaccacccctgcaataccaatccatacaacgtttgattcttcgtcttatttacttttttaatgataaatattcttattgttattagatgataaaacatgaataatactttatatatgtctatttcattaaaaaaattataaattttttaaataaaacagatggtcaaacgttggatacagaaatacaaaaatgaacttaatttagaacggaggcagtaattcagtactaagttgctatgttttgatacgaaaagagtactttctccgttttacaatgtaagtcattctaacattttccacatttatattgatgttatttgttagaatgacttacattgtaaaacagaggtagtatatgttttattgacattcatgtatatattgtatggaaaagaaaaatcataatattatgctctattgaaatctgtattatacgcacgaatctaaaaacaaatataacgataagggggtgtaggtgtgtgtcgtaaataaggacacggatcctttgcaatagcagtgacggtggctgatgtcatcgattgctatggagtactgtagtccatcttcgccgcgtaaatagactttgaacgaagtcaccgacggaatgggaggctgtaaaatattctacttttattttcagtgtgcttttcttggctgcttgcgtacaagaaaaactcagaaaaaacaaattggcagtgtcagacgactttgactttactagtactacgagttagtgataggtattgacataagcacgaacgacaaataagattcctggtttccgacgaaatatgtactacctccgcccaactttaatcattcgttttatttaaaatttttttataattagcaattttgtagttataagatgataaaacataaatattactttactcgtgaattatgtttttaatttttttcaaaaaattttcaaataagacgagttgtcaaagttgaatgcggaaaaccatagctgcacttattttgggacgaagtgattatgtatcaaccaacctagattccgatgaacgttttgtatttgttcacattaggtactgtagtgaccagtgaccggaaattgagtatgaaaaatttacgactcttcgactacaagagagagagagagagagagacatgatgaatcagttgcgtgtgcgtgtttaattagttgccacaaaatggtaaacggcgtaatctacggggaaaatgcagattatttggcaggcaaggtaacgaacctcctgtattgttggcaacgcagacagtttagaattcaaagtcaaaacaacctgggcgtgaaggatcattaatctgcaaaccgggataatctaatctaattaagaatcgatccgagctcgtcacgcgcgccatcacgttatagttcatcgatcccaaagttaattagagtactagacaacaatttgattaatataaggctatgttaggtactcagtttttccaatttcaactcctttgttttgcatacacgtgtcttcccaaactactaaatggtacattttcgtaaaagttttgtatagaaagattgtttttttaaaaaaaataacaataatttacttttaagttattttagctaacacttaagtaataaggtttcgttttctgtgtagtgtgatgaatgacgtacctgcagcgggggtgatgcagacgaggccggtgatcatgccctggacggcgccgacgacggagggcttcttgaagaagatgacgtcgaggcatgtccagacgatgaggctcatggcggtgcagatgttggtgttgaggacggccatggaggcgacggagttggcggcgtacggaccaccgccgttgaaccctgcccaccccatccatagtaaccctgcccccgtcagcgtgaacagtatgttgttcggcgggaacctctccctgtccttctgtgcccttggccccacctgccagccacacattgatatatatgtacacttgtcagagccacttcgacgtcggcggcggcggagtactattgtttagcttattcgtgaacgataagtaattcgtgaataaaacttttatatatatgttcttagcgaacttaaaaaaggctgaaaaataaacttcgatgaaaaagctccaaaatcagctttaaattaatataaggttaaaaattttaatattggcttatgagtataagcataagcgaaaagatgagactggtggtacggacccagtaggcggcggtgaagccggcgatgccggcggagacgtggatgacgtagccgccgcagtagtcgatgacgccccagtggaagaggaagccgccgccccagagggagaaggcgccgacggtgtaggagaaggtgagccagagcgggacgaagatcatccaggcgaggaagctcatgcggccgaggagggagccggcgacgaggatgagggtgatggcggcgaacacgcactggaagtacaccaccgtcgccatcgggtacagcggctccaccgccgccgtctccacgctgccgtcggcgcggtagtggaccgtcgccggcagcgcggcgcggccgacgaggaggccctggtccagcgccggccgcgccttcccccagatcgggaggagcttctccccgaacgacatgttgtacgcccaggtgacccagcagatccacacggcggcgaaggcgtagagcgccatgaacgccgagttcaccgcccacttcttcttcaccacgccgccgtacagcaccaccaagcccggcacgctctgcagccccaccaccgtcgccgccaccagctgccacgcgttgtcgcccttgttcagccagtccgccaccgacgccgacgtgttcccctggtacgccagcggcaccaccgtcgccgacgacgacatcttcgtcgccgattcaacacacactaagcttagtatgctttctttaatttggtatcctagttagtgttagttaggcagcttatatagagatagagagaggatgcatggtccaggtggcgatcgattaaccattttgactcgctagctaggactgtacgtactagcggttaagataaatttaagagaggttaaattcgtttgtttaattagggaaggaatcatcaacgaccagcatgtacaccacaaactcgtttgaagtagccatgagcacatgactttggctgcatgtagtacagatcatcatccacatcaactaattaatatatttttctcatttttacccagcagcagattcctggctacaagcctactacaaccctagctttgtccatcaagattcaataatgattaagaaatgatcaagtatacttgctgttttgactaaagaaatctgtacttgcactaagtttacaaatactgtatattttggtctgttagtagtgtgcagagaagtgcagcttagcatgatcaagcaatctaattggaggttgtgtcgtgctggtcatatacatgaactttctgcataataatctatgctgcgcaaagattcttccggtacatcataagttctagtaaatgtagttttctgtttcaatgatgcaacctacgatgcaatggctattccaatcgggaacatgcagtacaagtgcgatcttcatgttttcttcttctacgtgactactgatgaaaaaaaaactaaaaatatacgctaagttgcaaaatgagtactcaaacctatatcatactagtaatactgatgaaattaataccgaaaaatacattaagttttagcagacgtactactggcatgagcatgacaatgctagcaaggacatgcatctagaaatctatggcatgatatctttgactaaacgctagcaccagtgttattgacctcaccaacaaatctgacagtgcatagagattcttgtagctctgacctcagttaacacaggcccatgtatacatttctactgaacactagtactccgtactacttttcaccaaacatatatattcgatcatgtgtgcaaatactgggattgctacaagtgtgtttcatatataaggcaggtgctaggcgcacgcgtgtattcttatgtgagcacatccaaaaactagaccaatataccttaagattattaaagttaatataaacatattgctattaacgggtacatcacttaattaccaccaaaagaatagttaataaaaaatacgagcaattaaacgtgttgagtctaatatttaaatatggctggttatatcagtgggtaggttccactacagaaaacctagcgagctaagctatgctaagtttgtttcctccatttttaaatattcaatggttgatttttcgacataatgtttaactatttatcttaatataaaatactatgaatttaataaaaagactaattcctaaaatacatcgcaacaaaacaaaataaatggttctctaaataaagaaaatgatcaaatattatgtctaaaagttaacgtcttatatttaaagtggaggcagtattatcgcagaacattttgaccgtccctttccatgtatagtgctacaatgaccacttaagttatactcataagttctcaaaacaaaaaaagtcatattcataatactctcgagcatccctctcctattagttttaggagcttcgtatgcatgacctcacgcatacgacccgaataacatttatttaaattagtattcttaattatagagtactcttgcatttagattattgcgctggtatgcttttttttttaccttgatccatcgatataggcttcgtaactgggcgtacattagaatcttagaaactaggtgattttctgtgctttacagcgggaattactaagcaattctcaatatatattttttttcgacaatcaagttaggagtaaaaagcaaaaatataat

SEQ ID NO: 2318 - DNA, 22396 bp, Oryza sativa
aaaatccctccaaatacgaatggccgtgcataacgcataacgcgtaacttgccattagcacattaaggctgtgtgcttagatcaaggcgtaaaaagttttaacttgtcatattagatatatggacacatatttaaagtattaaacgtagattaataacaaaaataaattatagattccgcttataaactacgagacgaatttactaaacctaattaatctgttatttacaaatatttaatgtattaccactttgttgtcccgctctcgacgcttgggattcactctaaattctcgtggatttattatacgcttcttccaaacacgaggagattatggcctttttcagtgtcgcaacaagtcaatggaacactccctccggtctcattttaattaacgttttagacaatgacacggtctacaaaatatatatttgaccttatttttctattataatatatacaataaatatatgtatgtttacttttattatagtgatttgaaatacaaatctatatatgttgttatagttcctttaaactaaatatttttaaagtttttgatggtcaaaattataaaagtttgatcttaatcttgtctaaaacgtcaattaatatggtaccggagggtcaagattcttctttaattcttcggtctacaaaaattttacatcccttcacatcaaacgtttaaacatctgcatgaagtattaaatataggctaaaaaaaactaattatacagattgtgactaatttgcgagacaaatcttttgagcctatttgctccatgatttgacaatatggtgctacattaaacatttgctaatgacagattaattagacttaataaattcatctcgcggtttactgatggattttgtaattagttttttttattagtgcctgaacacctcatgcaacaccctatataatatctaatgtgacatgccaaactttatacccctggatctaaacactcccttcatccagagatagattaagttcattctagatctcttaaatttgacatcaaatctgaaattcattcttgaactgaaataccatatataacacgttcttcaacttctaaaaccgatacaaacatggtcccaccgtcttttacgattgcaagtgccacgttaacaccacgtgagacgaggacctaattaaaccagccacgtaaccgaaaaccgccatcaaaaccatcaattaccccggtttaggagttgaagaacgctttatatatggtatttcgattctactagtcaaataaaaggacctaaagtgaacttattccccgagaggttactaattacggcctgcttgcatttggaaggccagatcgaggcctaaaattggtacgtataagttacaaggccgaaaagttttcacattgggctgcttggtgggttggttgggcccaatccacgacgaaagaaaagtccaagtccgggcccagtgcgcttgcctgctttctgcggacgtgtcgcggagtcggccacaaactcgcaaaccaaacccggcgacggcacacaggttttagcaccggacgggagctctccgccgtcgccgacgacgccgccgccgccgccgccgccgccatctccggcatgctctccagaggaaggtgcgccgcgcgatctctccgattgagccttactgcctcctcctcccccctcccctgctcgttgcgcttgaatttggattattccttactcattccgtgggttttccctctccccccttccaaaccagatgtttcccggcggcgagtcggatccggccgctggtcagggccttctgcgacgtgccgccttcgctccaggatgcggccgccggggtgcccagctcgcaggtacttttaccactggagcgtgccgattttgttgtttagggtgttgtgaactgctctgtgtggaactgaactgaggagttgatgtggaacaagcgtatactggtgttgactctggctgtaaacttgtaggatcacacagagaaggttgatgatgtgaaagctagacccgacgagctcgacattgctatcgttggtggaggcatggtgggattggctgttgcttgtgcattgtgtaggtattttctgttcatgttgtgcttccttgttttttgttggctctgcttactgtcagtcgttttcggctgtaaagaagacttctcccttattgttgtaggctatgatattgtctagaaaaaagtttttaacccagatgaaaatagttctcaacgatcctcaccgacctattagtgcaatttgaagtgctattaatgattcttttttttcattggtattggtatgagtagcttttcatgctatagttgaatcgcaccttagacatgtgaaaatgacgattggatgtttcaaatcagaaacacctgtcatttaaggatcaagtttttcacatgcttatttatccacatgcagccaatatgccattgactaaacatctgagggttggcatcattgatagcaatcctgcattgaagtcaagaaattatctgaagaaagatggtgtacctgattcaagggtcagtactattactcccgcgaccatatccttcttcagaggtacagtttttaatcgaacatgcgttgatattatctgtacgtgttcagaatttttcaggcgcttgtactttgaattaagtttttcttaacatggttgggtactttgttgatgacgttttatgttggttttgagcagatatataaacataatgctataatcgtttttgtattacttctatgtctccatcattttgtaaagttatctagttacatcattagtagtttattttattatcttcctttttactcttgtggatatctgcttcattatataaattagttgatagcctaccgcctacctgggatgatcactatgcaatattcggctgaactttctttcttttggagtacgtactacagtaccgtatagtgataagctgaagcgacttgtgaactccattgatctatatgctcaccatttccgttgcagtacagttgcatcatattatatatcctttctcatgtgtgatcttcacaattttttgctaaggtttcagccctatttttgcacattaaggctgggaaattgcatgcttgcacagtacagcttgagaattgctgtatctgtatttctcccttcaaacgtgcaaataagctacttttacctactagtgatggtagcgtaccattcaacaatttcttcatacttgtaccatgttatattgcagatattggtgcatgggatcatgttcaacagcaaagacacgctttctttggtaaaatgcaggtgatataccttgcttgtcctgatgaaatgatttgttctgtatgtatagtgaatatccttttattttcaatttcacctttactctatttttgtccaacacatttaactctatttcctctttgagcccacttatttctttaaagttcaaaattctgaacatgttgattcttattggactaggcggctttgttcttgcctttatatcaatatcaatgaaaaactaagtcagcctctgaattcatctactgcaggttccacatcaggctagcaataaaagatcattgtacttagaattttaaaatactcgtaatcagttctcaattggaacatagaatagttgtatacctatattatgcttctgtttgcatacccatatttttagtagtctggacccatacatgcaagtattagaacttggatcctttaccttttgtattttcttctttgatgttgaacttgcacaaaataagagcagtttcttcctccagatagtgggcgcttcagtttaagcactaactgcaattctggatgtgctcatgtgctatttgctaacaggtatgggattacactggactgggttacacaaggtatagtgcaagggatgtgggaaaagaatatctcgggtatgctctatgaaagcagctgtgatttatgactaatttctgtcaccaactcattactaacttcttatttattaattcaatgtttagatgcgtggtggagaacaaggtgctttgcaactcactgttgttacgattacaggtttgtcttcaattgacatatttgattttttttagtatctgcatggagcgtgatgtttgaactcgtctaataccactttaatctgtaaatggaattgtatgcttccttgcatatatttggaatagaacattcttaccatctatgcattcaagacagctaaatttatgaggcctttataaacacacacacacacacacacacaccattttatggttcctttcctcttggttaaccaatatagtttattagcagtaaaggttttgtgataataatagagtaaattgcattagcggtacatgaacttgtcaggtgggtgcactttagtgtatgaacttataaaatgctcgttttggtgcatgaacttgtttgatacatgcaaactaaggctaaaatgacacgacaagaccgatttttctatgctgaacattataaattataaattagtagatgatgtgcgtgcacatagtagaaatgttatatttgtaaacttactttccactttatctttctttgtttctatctcttacatcattactcggttttttattttatgcaatcgttatgcctatatgtttatccttcttagacacatgtttacatagagtttaaatcaacaagattaaccttgatgtgcgattttgaccttgttcgcacgcaccaaacaagtttgtgcaccaaaacaagcgttttacaagttcatgtactagatgcacccatctgacaagttcgtgtacctctgatacaatttactcataataatactcccacccatgtgtaggacagagtaaacctacatagaagttgatggtcgggttatttgcagccagataatcttacctttatttttagtaaggctaatgcttaaagatttttgcttgatcaggaggaaaatggagacattgaaaagatgatctaccctactagactgatttctcttgctttgccatcaaagagcagacaagcaccaacaagggaagcaatatccagtggttaccctccagaagaattaaatcgcagcaatttagttaaacttgagctaagtgatggacaaactttatattcaaaactagtggtaattgcctaccatcttcttttgcatttgttcaaacttctgtctttgtccattgccttcagttgcctacttaaatgtatggttgcaggtgggagctgacggttccaagtccaatgtaaggcaaacagcaggcataaaaacaacagggtggaattatcctcaaagtgcaattatttgtacagtggagcatattaccgaaaacgattgtgcatggcagaggtttctcccttctgggccaattgctctacttccaataggtgacaactacagcaatattgtgtggacaatgagcccagaggagtcattgcgccataagtcaatgagtcctgaagattttgtgaagtctgtgaacaatgcattggattttggttacggtccacatccacactctggtagtcttgactattacatggaaaagttattttctgacattggaagtactgctgcatctacaaaggaatgctttgaagtacctccaaaagcaatcggggtagtctgtgagagaatggcatttccattgtcgctgaagcattcacatgattatatttcaaaaaggttagcactagtcggtgatgcagctcatacagtccatcccttagctggccaaggtgtcaacttaggttttggagatgcagctgctttagcaaaagttatcgctgaaggagtttctgtgggtgctgattttggggatgtaagtacctcttgctgcaatcttttggttaacattttattcaaatactaacacaacctggattctattagcaaatatatcatcatcttgaaagttgaaacttaagtacttgactagatacaagtgaaagaaccgatcatgctgcatctgaaatattgtaattcatttcccctttagtgtagtgtaattcttgttggagtgcactataaacatcatatttatcatcacatcaaactaacatgataaatgattttatttgacagatttccttgctcaaaaggtatgagaataatcgcaaagcagccaatgttgcaatggcagcgctgctagatggtttccagaagatgtactctgttgattttggacccctcaatgtgcttagggctgcagcgtttcacggtgcccagtacatatcaccactgaagaagaacataatctcgtatgcaatgggcgacgcgaaatggccgctgttttcatagacagtagatccggaaactttaaatttgttagttgttactgcagtgtcgatgtgttattctaaattagtatagtgtactttgtctccagtgttctcatccagagtagtaatgcatcacaggcacacgttgcagagaagaaatgtagctagaaagaaataaattggatctcctggtgatctaggattaccttgaatgtactcctcttgcactccagtaactcgcttctgttttgacccacaaagttcagatctgtgcaaggcaagatgatattgaagtgttgactgttgacgaagatcagtcaatctgtgcaggttgcagtctagcacctcctttgcacgtagatattctttttctcgatttctacgggtactatatcaatcaactcgtgtgaaagttctataaatatttgggtggggttactgaattttaaagaacgattgttcagctgttttttttttgtgtgggtttctagattttagattttcgtttgtatgctttattaagtttgtttcgtgtaaatttttttttcttagaatatctttctaaatcattttttttactttgtgttaggtaatccatttgtctgtaccctcatatagctatcatggaaatcatataatctatcaattcgagcgaaatggggctataggtaattatgcttagaagtccggttcatcgaactttcctaggcataattgcaaaaccagtctgagccatgtgggtcctagcggctaatgtttccgatgataacatcacaccaccattttccgatgataacatcacaccaccattttacctgctgttaaaatgacaaaaaaaatgaaaaaaaaaacagaaaataagcaagaacttttacctgctgttaaaatgacaaaaactaaaaaaacacagaaaaaaaaccagaattttacctgctgttaaaatgacaaaaaaatgaaaaagaaaagaaaaacacagaaataaaaccagagtataaactcctactagcttccttggtggcgggggtgtcaaatcggatcgtggccgtggctgaagaaagcaactcaaccagctgccctcccaaatttctctcctcttgccgacgactcggaaaaaaaccgcggacaccgcgtccgctcgacggagggaaggggatgagctcctcgtcggcgtcggctgtgccgccggaggacgacgtctgctcggtctgccacgaccgcttccggatcccctgccaggccaactgctcccattggttctgcggttcgtctcccaatcttccctcgcccttaccccccccccccccccccccgcgcgcttcctggaacctcgatccacctgtttccaccgattaggttgggagattatgcgaaactgtaggttttcatttgattccggtcgtttttttttggcttccgctggatatagaaatggtttgtattggctagaattgacaaggatgttgtagattacgcggtttttgagttggctgcatgatgagaaggctctaatttgccggtttaggataatttgtgtatgtgtgtgtcgatgccaaatgagggtttatggtggttttttggtaggttggttgaaattttggaactcatgtagctggaagactgggagtagtgtgtaatacattctacatgaactgatggaaaaccaggtcagatctaagattgtgccatacacttgaataccaatgaacaccacaattgctcatcgagcaactatgtggaaaagtcaacttcatccctaaagccaatcaaacaccatctcagtgcttgtgcgcattcatatttataggactgaattaggtttatacattaggattatttgggataaccaaatggctcttacccccttagttcaatggtattacttgtcatgttatgaaatggtagcattaattttattcactccaaaagagcaatatcttctatgatgcatgaatcaggctcaacactatgaaatcagtatgatatgatatattatactaccactttgtcttttacaacagagctacccactgcatcagttattctttttatttcagtttggccataagacctggtagcgcatatgctttttgagcatgtatttcctacccaactatacttccttcactacttctctagtattactgaaagtattagtagtaactatgctaattttgttgcaggagagtgcattatccgtgtttggaatcatggaccttctgtacagccttgcaagtgtcccatttgccgtcgccttattaatcttctggtaccagcaaatgtatcaatagataatgatgatgatccgcaaattcagcatgttctaggagaggttcagcattacaaccgcatatttggtggaacaccccgcaacctgactcaggtttatacattgttcacgaaagcttacttattttgtcttcagatttggaaatttgaatgtacataggactaatcaacatcaataaatgttgtatttgcaaacacacacacacacacacatcaataaatgttctccaaggggatatgtttcattttctcataattagctcattgttccttgcttgcatgctccccaaattcttttataggattcatagtgtagttttgattcctgcacaggttatgattgagaaatcatctgtcttctaactcctacaatgcatgcacatttcagatactggcatgcaaatgggcctctgcaccgttgagttctaaaaaatggtagcatgcatttaatattgttgctagataatctctattaggtcaggtttcataacacctagcattttatgcctttctgttggttcagtatctttagctttctatttctttgtgattgtgtatccctatacagagtaacatccatttttacataatcaaaccaacgctaatagtagcttctactcttgctctgaaaggcagtacttcaacattaatcagggtaaaatggaaacatgaacacggttactctgttatgttggaaagattatagataatagtgtgacatacccttattcatcattactctatttgtacatattgactagagttgtcatagttgttgtacgaggaatgtgactaaggtgtaacatgttgtcatatttaactatcttagatataacaaatatgagcatatctagttgactaactgcagtagctttggtagctaattacttgatgttttcacgatcttttttcagaggttgcaagacctaccctttttcatcagaagactgttcagggaactactggatccccagaggaccctcccacttgtcttcagggcgaggatggtcatgatggtaaggttttatgccattaaagtgccttttgttatctgtaaagctactatatgtttgtggaagtaaacattgtttctcactgattaaaatttgcaggtagccctgagtgcaatttatgtcctgagccccatcgacattcttcctgaaagtaagttcgatattcttctccgcgatctgaattccagtaccactgggcatacgattgttaaatgttaatgttttgaatatattatagacgtgctggggctgtttggattcttcgatgacttcctcgtgctgctgatcgtgttcctccaccttgctgctgtctaccgttctctgctgctctaccgccacggaggccactgaattgctgctgcacattacgtgatggcagatggagtacttgcgtccctggctgacgttctgagacaagagatatttcatttgtgctggaagagattgctagctaaagtcgatgatgattgatggtacgaatgatggcggcagtagtttctctccccctgtgtattctatttcgctatgctatgccttgtttggtgatattcacatggtggatttaatgagaccgattgctttttctttagtttgatatatatactcacacgagattagcaaatagcaacaacagtgagcacttgttcatccttgatgagccccaatggcattgctgctccaacaactatggatgggcctatggcctctgccagagaaagttttcttttcttttctctttattttttcttccttttctgaggagtggaaagaaacatacactactccctccgtcccaaaaaaactcaatttttaggtttttgtgtctagcgtttgaccgtccgtcttatatgaaatttttttgtgattagtattttcattactgttagatgataaaccataaataatattttgtgcatgacttatctctttaaattttttcataattttttaaaataagacggacgttagacacgaaaactcagaaattaagtttccaaacggcaaatacacttttttcttttattttcctttttttcaaatacacgtatttagaaaattctcctcatcaaataatagtgtatacattctaaaatctgtcgaaattctatagctcgtcacattccgggggaaaaaaaattgttcgtagtcgtggcgtggctcttgctgatgccaagtactccagctccccagtagtgtgaagggctaggctacggctcgcctcccatcttgtctctctctctctcccctctcccaccggcagagacgcgctcctgtggcggggagggagcagattcattcagccacacagacacaactcgtcttctcctcgaggagctagcaaccggctagcggagcaagagcaaagccttcaggaatcaggaggcggccagattcgcgcgcggttcctccctcctgtgcgtgcgtgcgtgctctctctctctctctctctctcgtcctcgaatttatctgttgttttttactactagtgtctagtacttgtgatttcaatcggctgctatgctcgttacttgcttcttcattcatagaccatatagtccctacctctctggatggatgaaattgtgtgagtaattgcttgtgctctggtgtcaaagggaaaggaattcagtcgcgtgctacagactacagagagctcttttgatcggaagccaatgaagtaatggagggtatataacctggggggggggggggggttgtgcgagagttcatctagattgaaatctgactcagaatttgcggccccatttatctccttaggaaatttctgagcaccaagaccatcaaattcccccttctgtcacctgtatataagtgtctgcctttcctccatgccattaactgttttagccatttgattgatatgcaggatgttggcgaaatccccatcattgcctttcttaactgctactgaaactgctgcgatcagcctctctccaagcgtaagatgctccactttgtccggtgatggccattcatgttgtgtttttccagagattctcaccttcatttcctgccatgctgaatcgacaaattatatagttttgcactgttaatattgagcatgtgcgcctttcagtgtcggactatatttattggcactctttatatgaacgtgcgccccacataaggattaaatgtcttgttcagtgaaaaaaaaatattgtgccagctgactacttatgtatcatatactatgacaccatatgaatttgatgaaatggcctctcaaatgcgtttaatgaaacagatgtgcgtggggttcttcagtcatccagtggttagatacttagatatacctttacacctcgacacgttcagcaaattcagactgcatttaagtatttattttggttaggtccctggcagcattctcattgatttgatgttcaatactagatgcttttctcaaacatcatttaccaattctccatttgttcaaaaatctatgttttcagtgaagggccatgtactgtgtttctgcacttggagttatgtaataagttatgcggtgttttatacttttattatgttacctctagtttgtaacaagcttgatatctccattaggagttctctatttctatatgtctatcttttttttccttgaaaaaactggttcactatatcacattcagttccagcttgcttcagattgatttaatgtattttgatgaattttgagtgattcatgttttgtgtagtgtgatctctttagttcaccaaatgcgagattttccaagaagaaatatggaggaagattaactatccagccaaacattgaatttggaaaaactcaaaatagtaggactcagagaaaatggaggacattctccgctgatcaagctcaagctaccgttgtcgatgctggtgacaacaaaacatgggaagaagccaaacagatactaacatcactggattactccattgaagacgccgacaaaatgctgaagaaggcatttggatggattcattcaccatactggagtgaagagagaaagaaggaggttccaaatgctgaggtggttagtggagtactgaactacattagaactcttgggctctccgatgatgaccttcgcaaattgctgaagaaattcccagaagtacttggatgtgatcttgacagcgaggtgaaactgaatgtaggcaagctggacagtgactggggaataaatggaaaaacactccggagtcttcttttaaggaatccaaaagttttggggtacaatgtggactgccgaggggactgcatggcgcagtgcacccgttgctgggttaggttctagttctgctctacgttaatgtgcagaacttacagttgaattataggttcccagctatttgtctatttctatatcggttactcaaaacctctcttaacataaacaaaacacatttatagtagatggattagcctcagcatgttagttttgtttacatcttgaacagcaccttttccatactatctgtatcagggatgtaaaaacaaatatatcagatacctgaatttctgtgagtgcttcaacgtttaattgttcttttcttttggtctgttgaggcaatgagagtacttgaattgtgctgttctgccattcttgtcattgtgcttgatatataatcagtatctcatatttgtgtattaaaaaaaatcagtttctcatttgcatctgattacctgatatatgtatgatgaacaagtgtttcacggttctgagtaatgaaatgcaatatgatatgtcagtatctgcagatggaaggggtctcagattccccaatctcttgggttgtttcaacatgtgcaggattaaggtatgtccagtctaatgccctcttctgatttcccctttttagagagaaaaaaaatgtttctaacatgtttcctaagtgttgtacatgctagtgtcaattgattaagcttaagctttgacattattcatcaggtttgagagacagttcaaagtttgaaaccatcctctgttctcaaaaatcgaatgctgctgctgcaaagagatcaattccatcgaattcacagtaatcgagccccatcggcgagaggcttcctcgctcatcctccatgctgcctttgatcatcaatccatcggagaagaagcggttcgtgtccaccgttctgcccactgcctcgccggcggcgtgcggcagctgaccggaggcggcgtcgtcgtcgtagtcctcgggcggcagcgccggcgagtggccgtcgaagatggcgacgtgggcgaagagcttgtccttgcgggagaaggaggtgccgcaggagcagacccagcggtcgcggccgcagtgcttctcgtgggtgcggaggtcggcgacgacggagaacctcttgacgttgcagcggcggcaggtgaagctcttgtcgcagtggctccgccggtaatggttcttgacgcaggtgggcgtcttgagcggctggaagctcttgtgctccctgttcctcttgcaccccacgtacgggcaggagtagaagcgcctcctcgccgccgcgtccgccgccgccggcgaacgcgacggcgaaccgccgggcttggccagcgcggccgccgacttgtactcctcgccgtgtccgcgcatgtgcatccgcaggttggcgtcgcgcttgaagcccttgccgcacacgccgcagaagtggacgtgcggcgccaggatctcctccttctcgatctggaccacctcgtaggagccccgcggcggggcgcgctcgccgtcgccatcggcgccctcgtcggcgtcgctgctgccgtcgtgcttggcgtccgcgtccgcgtcgtcgccgccgcggcgcgccgcggcgaggttcttggagatggagacgagctgcacgacgatgcagctgagctcggcggcgacgatctgcggcggcgggttcggcgtcgacgagattatgccgcggaggtggccgatcttctgctccagaaatgtcaggtacgtcagcaccgccctcgcgttcccagctgctgctgctgctgcttcgccgccatggcgagcttgcgtcgtgctactcgcatcaaaatcacacagctccatgatcatctgggagaaatcttcatcttgctccaagtacatcgcctgattattattattgttgctgaaatgatcggcactactactcatcatcatcgtcgacaacaacgatgaatatgatccttcccctgaaatacatgccaacaaaaattgaatcaatgatcaagaacccaaatggacatgttcagagtggcattggcaatggcataacacttaccctgagatgatgagaatgacaatgctgatcaaagaaaggtaaaaattcgatcgagtgtcagatgattttttttgtgctcctgatcagatcacttctgcttgtcggtgatgaaatgtgagtcgagctgacagctgagctaatcaaggcagtaatatatactccaattgataaggtgtgtgggctccacggcggcggcgactaggtcgacggcatggtaagctcttgcgtcactaaagccgaagcattggcatggaaatgtaatgtgcacgagttggttgactggtttcttcttcaggatctcgtgctttttcttcctggctcttggtgctctgctttggtcaggaaagccaccaaattttgcccttttgaacaacagaaagcttacatattataatcacttttttctaattaaacttctttaatattttttacacaaaacaaacatattatcaaaaaaatctatcaacagatgaatagcaattccgtatatttaatgttagaaaatatattcaatgttagatttaatgaaattaatttgatttttaagatgttactaatttttatgtaaatctagctaaacttaataaaatttgactagaaaaaaagttaacgacttataatataaaggggatggagtattttataattttactgggtacacgttgcgttaaaaggccccatggatgtgttgacctcacttgccgatcaccattccttcactgatcatttttttgcctttcctctgaaagagaacagcaaggtcaccttccttccacagcataagtaacaaggtaagcatgatgcatatgcttgggaagttgggttgatgtcaccgggtattaccgtattgtgttcctcttgagtatctgtgagtgttcacaccaaccgattttattaagagcgggctaaccgcatatttgtgctgtaacagaagtgtttacacacgatacgtatgctccacagtccacatacgctactggtacttattttgttttggagatctctaggctttagataacttaaaattgtgagaaatttcgctcacctccaacctctaaatcaagggaaataggagaaaagagagagggaaattaatggcaaaggactcaatggcggctgcgatactaagttagaggttagggggttgaaggcagaagaaacagggggattccatgaacttggaaggatgacgggaagcgctgaggacatgcgatcggccgtggacgtgggcaggtggcttgaggggttggaggagccacggtggacgaggtcgacaatgggtgcttccgatctggagtacttcctccgttttatattataaaactttttaatattacctatatttatatatatgttaacgaatctagacatatatatgggtttagattcattaacatttatatgaatgtggacaatactagaaaatcttataatatgaaacggaggaggtagttagaaagatgagggtggcagtggtggcggtgtctcatagcacaagccgtcgggaaaaaaaacaagcagggtgggggtactttaccgccgcttgggctttaggaggagcaagaggaggggaagggagaaggccggtagggcaagccttgttgacaatacgcaaggggtaggaaaaagcacaaattataacgcatgtggctcaatcagatctggagtcaggggaagatgtccgttactgtagtagcacacacaaatattgatgcaatctagccatgcataacacaacttaaaattatgggtagttttaggtgactgaaaattacacaaccacatttcttttatttcttttatttgagattagtcttaaatgtatcacacttctctcgcatgttgtgtgcgaggacaaggagacactaaaactaagtttttctctaccaactaatttgttgcatcaatagtgaagattaaaagtaaagtaatatttcttttttttaagaccaagagcttgagttttgtttaccagaaaaaagatacaatcatatgcgaaatcgtcaacatatataaagctagaccaacggctataacactctagataattctcgctaaaaacatgatggaaaaaactgcatagttggattatacattatcggttagtattgtgtaaacgaaccacggaacaaggtgtgtagaaattagtaagtcgagaggggcgaccaagtcaaaacgaagagcgaaatggcagcatgcagtgcaccgtattcggacatgcatgtaacagcgtccagattaagtgacagtgtgccacgtatgtccacgtacagttgcgctctgcttagaagcaaaaggcaaattttactacatgacatcacgactttgtggttttagttgtaaaacactgcacaaactcatttttggggggaaacactatctaacactgcacaaactcatttttggggggaaacactatctaacactacacaaactcacttttggggggaaacactatctaaacgtggttatttgtttgctgctggacaccgcgcgcattaaaatattaatttctagttgagtaggagagataaagagtgtgaaatgtcaaaaataccccttgccccacttgtcatattcttcctcttcctccttattttccctttctaatgtcacggcagcgctccaccgcgtcgtgggtgcactctggcacggcggcattcggcggagacagcgctttggcagtatctgtgagtggtggcgcctgcatgaggagatggaggcggactcgtggcgcgtcatcgagctccgaaacgatgggaaggcggcgctcgacgacgggcggcatctgccgaagttgaggaagagagagagggaagcggcagtgcgaaaagagaaggcttcggcctcggagcggccggagctcaccggcggcggcagcggcacgggaatgacgtggcagtgacgatgtcgcagctcgaggcgacggcatgaagtagcggcggcgtggcttgggccggctcggagttctccccctctttgtgctaatccacaagcaaccaacatcacggagtcaaatctctcgtctccaatttcttcctttttccattgagccaaattgcaacactcaaacaccaaatcgtacagtagcaagccacacacaagcatagctgctgctgccccccatcgaaccgttgtagagtgctcaggcaccactggctagagtgctcaggcaccgttggcggcagcttagccgtggtatctggacgcggcgcacctagcaagaggtctcgcccgacgaccacggcccccggcggttgggactctctcgcccccgtgcttgccatcttgagccgtgggcgcatcacctgtgagacgccgtggtgggagatagaggaagagctaaaggaagaagagaggaagaggaaaagaaaggaggggcaatttggtcacttcgtgtaaaattttgagccctctattgactcgtcaacacgaatacactattttaatggacgaatactctattgactctggcaaataaccacgtttagatagtatttttttcccccaaaagtaaatttgtgcggtgtcctacagctaaaaccacaagtcgcgatgtcttgtagcaaaatttgccaaagccaaattaacacggttagtcctgtcgatgttattggcttacggctccatgcacctactgacacaaagggtttattgaagtttctgatagctattagaagcgatcatgtaaacattctaaattttcattttatttttttttaaaaaaatatagttgtagaattaaaaaataattaaaagtcggaagctaattataaactactatgagtttcttcatattctaataagaatcttaagttcttaaacaaggacaagaaagctagtgtaacttgtttgccctttcatgtaactaaccgaccctatgcttgctgccgttgaactgtcaccgactgcacgtgtctgattactattcttgcctatattttgaaacagcttatccaaacttagtagcttacgtggcagaatcttgaagctttcacaacacacaacgcagctctcaccagacaccagccatgccttggtcgatcagctgtactagggagtatatccttcaacaaacactgttgttgatggttgttcttgaaaaaatcgaacacaccggtctaggagatctgcttagctcctgtgcaggtttaaagattaatgagatgcgggcgtaccagttagtttaatcctacaactgacaagatttacaaataatagatcaaacagccgatcggctgacaagccgatagagtagttccagccgatagtcgataatagccgatgccgataccagccgatagcgataggtttaagcaatcggctatatgtccaatgtagataatgatataaagacaatcggctgatgataatataatatagcaatataatccagtagaaaccaatcggctaacaatatgaaatagtagaacaaatattgatccgaaggttaaagcacgcatcggctggaggtccgatgtcataagatccacaagattatattaaacagtgaaacctttgttgccatcagctaaatccaacttatatgtatatacaatccctacaagccgatgcaacgtccagataacttatcggctagcaccccgataaaatattagcatgaacctatcggcttaacaagacttatattatcaactacaatctagtagatcgaacctaaccgatgcagcacgagattgtatatgataatctaatactcgatgagccgatagatctgtctaatgtgatggatataacaaatctatttagaacaacattatgattgtagagatatatcggctaagataggggatcagacctaaccgagatagtcccaactaaaccgatgcgtctctaaacacaatgcaattagagatagatttgagatatcagataggcaaatatatcaaccaaaccagagtgatccaagagatcgaatcgatgcagccttgaacaacaccaacatagccgacagattcaccagggcccaacagaacgtaggacttaccccttcgttggagatcgaaagtcgatgcagccctgcgtcaggtgcccaagttccgccggaagataagtgaaaacctcagggaagagggtggcgatgtgccgagagtattattgatcgatagattgatagattacaatgaccccgggtgtacatatttatacccatagggagatactagtccttgtcggacaagaaagaaactaaaaaggaaaagataaagttcttatcggacactaaacacactttcctaaagataaaaggaaactaacaaactatacctaattaatagataataagcttcctttaattgatccgactccaccaagaacacgacatcgtggcgacttgactcccatcggctgattctagaactttgaagccgatactgactctaaaccgatggtaactttgggcttaccaaatttcactgttaacaatggtatccgacatggaatactattattagagcaaatttaatagtatagtcaactactaactccaaattatctagagctaatgtaatagtcaatttatacaatagttgcttactatactattaatacccgattccacctgtcatacactcgttacgttgtgaagtctgtgctgcagttggctacatatctgtagtccgctgctcttctctctctttatttgtctatttaaaatatatttatagctggcttatagcccgctattatacatgctcttatcatattaagagtggcttcgcagaagctgcggaaaacaacaaaagcggatctctatgattgcgaaacgtaactatgaccgttcgtgcgggaaagagtgttgtctttgtacagggccccacccccacgggacacgcaccagctgacagtccaatgacggtgagggctatgggccttgggccgcacgcatggcatggcccaattgctggccgcggccggacaacgaagccgtgagccgtggcccattaacaacaagtgggccgaactaagttgttgggccgtagccaagttacagggaagagagacaaacaaaaactaacggaaaacggaacacgtaaaattgcacaccatcagcaacatgatctgacatctcccagatatatgggcatgcatttacctcgaattatccattcacgtcaactatatgtactactattatataatatataatataataatcgcttactattaatatacggtacctacatatatattttctccgtctcaaagtgtagccatgagcattatgcgtgaatttacacgagccagtgatttctttctttccttgttttttaccgtccatcactccatcaggtgaggtaagtagcaaattatcgaaaaagtagtgcacgagtattcgccattagttgatccggcgaatcggtcgacggaaggagaaatcggataaacgtcattttcttccgttttcaattttctttttccttctttttacgagattcttctgtaatatgttgcaagtatcaagcatttctgttttttttttcacttctatttatttctcagattttttttgttatatatagtttttgggatttgctataaaaaaatttctagtttttttatctttttaacggaaattttctatataaaaagttttcgtgaaaacttcctatatatgtagggagattttttatacatatatatatatagactttgtatatgtaaactttatatagaaattacatcatacttacaaagtttagtgcagaaataacaaaatgctaaaggaatgttttttaaatgaataatatccttagaaaatttctataaatagactttttatatagaaagaatatatgtaaactttatgtatatggactttgactacgtacacttcatatgggccgaagaagttgtagggtcgtatccacgtagtagtaaagtatatttgtacaagaaaaagtacaccggaggtccctcaacttgtcatcgagtttcaaaattgtcccctaaccacgatacgagatatccggcgtcccccaacttacgaaaccagtgcaacctaggtcctcggcggttttgagtccggttttgtccgatgtggcagctgactcagcgtgggacccacgtgggccccacgcgtcagcctcttcttcccctcccctcacctctcttcctctctcctcttcacggcgccggcggagggagaagccacgcgcgggcagcaggcgatggagtggcgcgtgggcggacggtgggcggagggcggacagcggagcggcgctcaggcggacacaaggcagaagggaagggcggtggcggcgggagcacgggggagatcgaagaggacgacctcaagcacggcggcaagcatagtggggcgacgacgaggcgaagcggagcggcggcgcggcagtgaggcggcggcgggcagagaaggcaggtggaatggggcgagggcggcggagcaaccaggcggagtgggacgacgggtactggagctcgcagatggccggcggcacaagactgcggcgacaacggtgaacggcgccgcgacggcgag

SEQ ID NO: 2319 - DNA, 1640 bp, Oryza sativa
ggcctgtcaatttggctcgatagaaacaattactggattattttcttttccggtggaggacagaaggaaaaacatgcaccttttgggttcaacacaccccgcatagtgtagtacacatttttgagttttcgtacaagaactcgcatataggaggaagatataaattgtgcttcgtatgattctaatcaaccaggttacagcataacactgttgtcaccagaaaccaagtagttctgatactctgttgcttgtatctgtggtctgtacacaaaaagaaaagaaaaatcacaaagcaaaagattctgctttcttctatatttacaggtacagccgatacacatgcaaatttgcatttcacatgttcctggcgtgatggacataatccggccaagagtaatctacaagagaaaaacacggatttaatgattgcgcagattactaagatgcccgtgcctcttcgttttcatcgagcaatggcctgaggtttgatctctcgacggcagggacatcatgctcactctgttcgttgaaacgatcaacgctacggacaaatatgcctgcaagacaacatctcaactcagtgcaaacagagaaatattacatccacaccacaacgcactactagtcttctatccgcatcgatgacaaccgacagaaaccgcctgaaatgtttctatgctaaatttcattttagtaatataccagcaaaaatatctgtacgttattacataatttaaagaaacatattggcttaattttagaattaattagcagtttttggtttcaatattgtgtgttccaaagtctatacgtgacttctactgttctatattatgtttggtttggagtggcatgccagaattttgggtatgtttggtttggagtggtatgtcagaattttggggagctggtggtggggtgattataaattcaccactcaccaccagcacaccctttcaaaggaatatagatattattttagataatggattaaaatctggcctctacatccaaaatacagccaaacaactaacagaagtacttacactcacacccttacaaacatgtttgacacaacaaacaactcaccacgagcacttaggcttcccaaattagcttggttctgtcttttttctgtttggatgtggttaaaggagtatagatatggcatgtgatagtggcagatttacaattgttacagggaataatagacaacagaaaagaaattgggcctgcggggttgtaaacctgtaacaagacgttataattgttgtgctaagagaacgtaccaataaaccaaaatatagctgcaatgaagaggatagatgtcaaggtaagagctgtcgatctccagttatggattttgtcctgcattcaacaagttcaagcagtaaaaccatgagctttgaacacgatgaatacccaaattaactgtcatctaggaggtattggatgcaattcagtgtcataacgcatcgcacatagcaagaatctatgtactacaaagatttgtgcaacataatatgtgcactacaagggccagtctcatctaaaatgaacaaatggatttattcatgggaaattcggcaattagacaattattcaatattcaaaattacaaatttagtgtgaacaaacac

SEQ ID NO: 2320 - DNA, 5566 bp, Oryza sativa
tcattcctcgtaccttctctagccaaacaggcagtgggagtttgaagaacggagttgatggtgggattggtcatagaagttatatttttagtccccatccgttgtttggtttcacatcgaatttccttcaaagtctcacgaatcaacaggcatccctcatatgagagattggtggaaattggatctcttaattctctatcccaaaccctctcgaattttaaagtcttccaaccaaactacaaacttaaactctcgtaaactctcgtccccatcaccaactccctccaaccaaacaatcaagaaaagccctaggctggtgtcattaaagattttaaagttgatcaaaataattaattagaacggcccctatagctcagtggtagagcgtcagtcttgtaaagtgaaggtctgcatgggggcattttattacattttgttttttttccaaattagttagttctcagtttactctctccatcccatccgaaaaaatacgtcccatctaaccaaaacagggcatattcttgttttttttccaaattagttagctctcaatttactatttccatcccatccgaaaatataaggatgtgccccatctaactaaaacatggcatattctcagtttccctgctagtctctctatccgaaaatataaggatgcgtcccatctaaccaaaatattttattactttagggtgctttgttttttttccaaactagttctcagtttacctgttactctctccatccgaaaatgcagggatgcgtcccatctaactaaaactcattatatttattgttttagctttcttttgtttttatggtccaaactagttttcagtttacctgttactccctccgttcaaaaatataaggatgtgtcccatctaatcaaaactagtgctcggttgttaacttgcaattattattttagctataatcttgttcttttttttttgtttggtgttccaaacaaattctcagtttacctattagtactatataagattactcagttgttaactgcatatatatttattttagcataatgggataaatattccaggcactttgggcgatccttcttcccaaaatgggagactgcgggcttacatgcaggtgaacaagaccaactgcagattacacagaaaaaaaaaaaggaatcgcacgtgaacaaggtcatttgcagattacacataaaaccaggattttggggtaaaaacgcaaaaaataggcagacgaaatgcggtgagcgtggatcgaacacgcgaccttcagatcttcagtctgacgctctcccagctgagctatccccgcttttaccatccattttaactaatttgaactgacactcaattttcatggttcaccctccatcgacacgtacactggagactggagtaacagtaaccccatgagtagcatactcttgaatgccaaatattctgcactttacagtgacagcaacagttcaagaattctgcgagcattgcatagtgagtaaaccatatcggtgtgcagaagaatgcatgtaaacatggtcctaactcctaaggtagggcgcctttacagcccaaatggcctacagcttgactcgaattatggccagaggaacagcctgaacctttctcaggggcaaagtggcagcggccgtgacagagcagggcagggacgctgcagcttttgccccagtgcagagataaaagcaattcactgaaattttgtgaagatcttgttcatggagatagtaacagcatatggatcatatcgaggagaggataaaagccccccgcgtcgtgatcattggtttgcaggaaagtgcagtctgggatgaaatagtgcaaccattggacgtttcatcattgtttggcagttgggtcagcagctgtgcctttcttctcaaaacatcaagagagcaaactgcgcttaaacgctttccactctccatgacttgcaatgcaaatcacaatttcacaacatcaggctagtcacacaggaataacataccaccaccgtgttagaccactaatagaccagttgccatagcaacagtgacatgacaatattgctaaaaggttgtgtactgattactgaaccaaacaccatcgtcatgtcacagatgacagaaccatggcaacggcacacacacacactgctagaaaggacagacaattaatcgcaatttcacaaacccaagaatccaaaagacttggtatctacaattgctgcctctgatgatctatctgatcacattcttgattcttcaccagctacttactagtattctccggcctaaaatcaagcaaattcacacaaaattcacccatggaaacaccagcggaaatgggaaattaagtacggcaagccatacacacaagacaaagcaagactagctccaagtacaaatcaaccccgcgcgcgcatgcaatcacgtcgcaaattgagctgcatagctgcggcgcgcgatcaccgggactcctcctgtgctggccgtctcgtggcggcgccggagagcgcggagagtaggttgaggtggtggacctgcgccaccgacgacgcgtacgcctgcgcctcctgcgacggcgagacgagggcaccccacgacgacacggcgggccgcggctgttgctgcagcgcctcccagaacgtcggcgcctcgtggtcctcctggcgcgggcgcttgccgaggaggaaggaggaggaggcggtggagggggcggacgagcaggagaagacggccggggtggtgccggagccggtggcggcgaggatggacggctcggcctgccggagcagccactcgatggtctggccgtcggacttgagccccagctcgcgggtgagctggaacacgcgcgccgcgcagacgatcggcatgcgcacgcgccggccgcgcccgttcaccttgctgtgccggtccttgccgccctgcgtcgccgccgcctttcggggagctgggagcacggcgtccacgagcgccgccgtgaacggcattgtgatctgctgggacgacggtggcagcgccgccggcgttggcattgccatgggccggtagacctggaaggtggcggcgtcgcgggaggccatggctttccgtgcgaattgaacactgaacaggtagctagggtcttgttctctaggccccttcccccttggggttatatatttataaatggactttgaatattaagttgcattttaattcttctaagtgtgtaaaaaatgttctgctggtagtttgtatggtttcactagttatatttatggccccataattgctacacgacgatagcattttttccccccgaaggaatgtaatccgataagcatattctgtaatcgactgatgtctcgagttttgtagtattattattattattattattattattattattattattattattattattattattattattattattattattattattattattatgtctcgagtagtaaaaagaatgtagacagataaaaaatgtatttatgaaaataatagtaagaattgtatactcaaatataattctatttttgaaatctagttccacgcaaaattaaaaattatgctaattttaatcattacatctagtctctgcacatatccaaatgaaaattattaatcaatcagtctagatagtaaaaaggtctggcaactataaaaaaaagggggggggggttaaatagtttgtttgcccgtatactacacttgggagcctacgagtttctttacctctggatttactttgaagaacaaaatactggaattttttgtgcctctttatttattccagcttgacacacaatctgaatgatgaataacccagccttccggtcttccagagattcttgcaattattgggaaggaaatactcctagatgcagatgattaactttagattttttttttcctctagagtatacccaggacagcagcagcattgcagggacaggcatgcagttctgtactgtagcagtagtgcagcactgtgagcataggggggcagggcacatggggagctttcactttgatggagcccgtggcctgtaggttttcactttgctggagctgtaggctcatgagcagtgcttccatctttcagtcgttcaccgctacccccctacaagacttgcaagagggctcttctggatcgagcgatttccatatgaattgaaaatggaggatcttttcctttagaggttacttggattgtaggatttgaagttgaacatttcctcggaatacattcctaagcctcaatttcataggaatttaaacatgaggtctaacctcatgggtttttttttccttttagaattctcatgcattctctttctttctctctatactcttactcaatataagtacgtagtaatatatatttttcttgtgagccatccaaacacatgttttgagtacttcgtgtgtttttgtttcttgtgcgattaaacatgttatggcacttcaatcctacgtttatttattcatgtatttttagattcttgcgtttcaaatgagcttaaaagaagagctgtaacaaaattatggtattagtattcaatgggatagataggtaatccatgggtacaaaaaacataaagttcttgggacgatgaggttgagaagcaaggatcaaggaacgtagtacgctatttgctagaggcttttacaagttcctgttttcctaggacggggatgatgttcccgcgtagaggaacgctgtctttgacctgttttcctgtgactgcataatattactccgtatgattttatgtttttaaacttttgatgcatatgagtgcagcacctgttgactctcgtagtctttgttggtcttcttcttcctcttttctttttttctatataacagtgctttacaaaatagaaacgtcgtactcctcatttgtgtataaaagtttatttattttagagcggaggaagcaacatgtagcatgacataagaattaactgtccttttttttatcaacttttcctagccatttgagttgtgttttcttttaaaatgatgtatgcccagtgaaacaaaataactgcacctgcatttccccgcctcccattttcaccgtttgcgttggttcagaggtcagttgagttcaggactagataggataggctctgatgtactaatgcaacaaccatgaacaaggattgcatggatgccatggatgctactccagtctccagctaagcttgtagacggcgaccaagctacaggcacgtcattttcgctcaaaaagccagaactgatacacagcgcgatcgagactcgagagcgtttgttaaagtcgttttcaagcaaaaggccacgctaagcatgcagcaaacggtgagatacctgtcccccccagaggttagctttgcggatgctgaattgctgatatgtgtagcagagtgaacctgtgattgtgtacgttgtacgtactctagatggggtagtatgtcaagtaagcaacttgatcattgttgggtcccggaagaagaagaagaagaagagggagaggaaaaaaaaaaggatcaccgggaggattgacg

SEQ ID NO: 2321 - DNA, 2509 bp, Oryza sativa
tcaaaggcaacaacatagttctccgagctaatgctatttggaacagtcgtcagaccctgacccttaccgtgtaaagccttgaaattattttaatattttgtcctacatatcagaaatatcatgcaaaacagaagaatatcatcatgccattactcaagcctgttgcacgctgaatttaatttagagaaagtatagcagaaccaaactcagttaccactcatgctcagcgagctaacaacaagaattgaggaagaaggaacagttagggggtttcaagtttcaaccatgaagcaacggacaagaatcaaatgcacaagggacaagctggcctttatcaactaaccttaataaaagagcctccaatcaaaccaactccaattaataaaactaactgaatcaaatcacttggcaagcattagctctacaggctgagtggttactgtgtcacatccgccatgcgcttgccgcacgcgcactactcagaaaccacttatcttcaagctgaatgtagggaatcaattcttcaactcctcaattagttcttaggagttgtcagcatcatgcagtacaatcaactatgagaggttagtccaacacggcaacatggaataaacccataaagatattaacctcaatgcattgcgcaacctaatattagtctaccgagagatgcacgataacatctgaaacacaatgtttgataatgaagttcatcaatatccttttcttcatccaactcttgttgaagaaaagaacggggcctatgaggttatcatctgggccatttaggattatttttaattcaagtgttgcaagatctcatgtcttatctagcaacatccaacagttagggtaaactgaattgaggtgtgggtgctattcttctttgtaataatttttatgttagcaattataaatgtatgtcactggctaaccttttataatctataatacaagagccattaagaaaaaaaaataaccaagcagtcacctatgttttagcgcttatgaggcatatgtgactgcttgtgccacttaagcagtcgaaggttgcaccagttccttgtatacagccacatagaccttgtgtttacaacagtgtacagaagaacataattcatgagatgtccgtatcatattatagatgaatcaggaatcatatgccccaaacttgtctcttaagtttgagtaatgaagatatattgttcagaagcttctgtgcatgttcctcagtatcctcactctcaatacattactgtctttcgacatagattaacagtcaagactagcaaaactcacaagtaaatcatattacagatacagaggacaaccaacttgcctgtaaacgctgcgtacagcaaactatatctgccaggatccccttctcttgtaattgagcttcaaaattatcctattatacaaaccactacaaatgtcagctatgaactattcatacaagaatactgctgtgtttaggtgtgaactcgctcagatgaactcagcaatgagagactgaaaggtttccttttgctctgccacgtctcacaagcatcattgacaatagatgcaggtgtagaaagtgtgtgctcattaacatgacagactagacaatctaaccatcgagcccccgtactgggctttcaatataagtcggacctctggcctttttctaaaaaaaaaaaaaatctaaccatcgagaggattaagctagtgtgaattatcctaccaatccctatgtaccgaccaatttgaacatcatcccacttgcctgtatcaactcaaccatcacaatagagattgcaaacctttttcgtgttccaatcaacaaagagaagtatcggatttctgcttctgagtatcatgctgatttggaacaaactgacaatcaggaacaaaggagcagataacagactgtggcataagaaaatgccaaaaaaaaactaatgctaacttatgcttcacaaaacagttgcaaaatcaaacaatgttggcttaactcagataatagcatacacactaatgctaacttatgcttcctttacaaggtatatcaagtcaccaaacggtttagggtttaacgggcgaatacgctgtgaattaggattatggcgcgcgatctaatcttctctaatgccaatccaccgtgctctcatttagagtcactaacaaagcagcagagttcctagagctggtgcagtccaccacgagtccacgatgcaaggtacctgatgatgcggcgatgagggggagaaccagcagcgctccagcctccaggtgatggaagaacccagctgcgtgcggtggaagagggcggcctacaggaggcgggcacccgccaccacccggagtaagcgcaaagccggccgtgagtcgggtaacaccgtccgcgcggctgcctgggggagggggctgctcggcggcggcggatggggaacgggcgcgcagcagcggtttggacctggaagtctcgggcctgtttggcaagacaaggaaagaggaatggcggcct

SEQ ID NO: 2322 - DNA, 3313 bp, Oryza sativa
cttgcttgcttgcgcgcgtgcgtcgccgctttgattgctaaccaccgttgctgctccaccgaatattcattcccccgcgattttatccgttcccccgttggttttctccgttgttgcgggagggaattgtgttgttctgttgtagtagtagtagtaatagcccatgagatattttggatcctggtgcggcgctggttctggttctggttcagcgtggtggtttaaaccgagaagaagtcaaattggcgcatagtttttattatatgggcggatcggaagaagtggcccaaggctccgacggcgcgcgagttgctgtggtggttgtgggagcccccgtcggcgacgactccgccgctcctccgcccgcggctgcagctggagcagccccggcggtgacccccggcgaggaggcggctaagcgggagtccttgttggcggcggcggcggcggcggcggctgctgagtgcaagcaggaggcagcggcggcggcgacggggttgcaggccatggcggtcaccgtggcgcgggacgtcgaggcgggcggcctggacgccagcaccagcggggccgcggacgagaagccctcgtggttcacccctaagaggtaaggtgcttagcgcgattgggctcgggatcattgattttgcgggtggaggtgggtttgaattgcttggttgcacggggtttgcgcacctcgtggactgtttgatccgaatttgggcgatttgattgttttgcttggggagttcgagttatcgtgagctcgattgctcaaacctgccgcactggtgcagatgattgcgggatatcgagtagctgatatgcgtctatatgaattggagcttttggcgatgccaatttgtagtgtgaatgtaaataggagcaggccagcggaggttgccatttagttgcttgatagcaaatcatctctgatgcgtattggctgttccattcgtgacctggagttttagaatttgtatgtttctcctcgttagttttcttttgtgtaaaatggatctgcgttaggtacaagtttggtgttggcttgatgcaattcgaggtgcatttttttggttttcagacggcatttttgtgggataagctaagttaattttcatggcattggaattggaaaggagattggtctggcctcgcgtgttgtattttggtgccgactgagctgtgcacttcaatgttggagagataagcttgagagttcatgaaatctgctacatggccccagctgatcctgtttgtacatcttctgctttcctgtgcttattatccctctggattttagctctagatctctctcatctgcgtttggacaagatggagtaggaatgatagtgtttcactgcaataattccgaactctgaagtcgaacctcgtgtaggtatcgagttcagatgaagattgtggtttcaatgcagattgctcagtacatcctgtgctcgttatgcctctgaattttactttctatttgaatttagccaatattttcatgttatgtggtattgtcttcagaacagctgtttgtgtagtcagtggacatctggtgtttgtgtatttgatagttatgttttctttattgtaattgagaactctatctatttatcccttctttgggttgattagtttatattgctgcagattacttgtgatgttctgcctcatcaacatgctaaactatgttgaccggggtgcaatagcaagtaatggtgtgaatggtagccgccaaagttgtactggtggcacatgcacatcaggttctggaattcagtaagtcccagtggaaattccatacagttttttttttagattgctgtatgtcagactcattgtatctcatggaatgagagaacagatcaggacaaacactctcattctttttaacctttttatgttgttatatatattcacactgaatttcttttttgcaataaattcattataagtcatcactgatttatcaatttttgagtttactcctgaatgcccttaccatgctgatacaggggtgatttcaatctgaacaattttgaagatggtgtgctatcatcagcatttatggttgggttgttgattgcttcgcccatatttgcatcattggcaaaaatgttagtttcctattaattccaattttcgatatgtggtacattatcctgttattggtgctcaatccacaagaagaaaatattaaagatgggcaactgcttttcaaagaacaatatatgctaatgctacagattgtcagattaaggaatatagaaacattcatacttcacgttctgctggaggctaacataggtttctgaaacatcaaaccttttatagtgtaatgttctgacgcatgatagtttgttccccttctttcagacacaatcctttcaggcttattggtgttggattattagtctggactattgcaacagctggttgtgggtgctcatttgatttctggtcaattactatatgccgcatgtaagtaccttgtcattgtgaataatcaattcatgtttcagatctgttacttaaaataaatcttactctgataatgacacgaacaattctccaattattgttacttaggttagttggtgttgtgaagcatcatttataagtcttgcagctccattcattgatgataatgctccagcagcacaggttctgtcattcttagaatgcctttacaatctttctctgcactgagctgatatattatgttcaaacaaatcttatttttacacagtattgtttctgtgctcaatatacgcttatattcttctgggaaacaatctacatcttcaggcatacaagtacaatatctatcagttaagatatatatgtttactatgtagtcaaggatacacatgattttactccagatcattgtatatttataccagatgaaccaattatcacacctgtgtaatctaggcttaatttcgaagggtcccttccagatatcctttgttaaaatgacctgtacggcacataggtatcatcagactgtgagctacaacggagcactgtaatatagcatttgtctggctagcagttctgagaactctttactggttgctaatagatgttgaatcagcattaaattgctcttgaatacatccagctagctatgcatattacttggaggttctgtttttaattgtacttgttttcatgtctagtctctagtgtcaaccaggaacttacttgctactcctatgttaccagaaaacagcatggcttgctatgttctacatgtgtatacccactggaatagcggttggctatgtttatggtggtttggtaa

SEQ ID NO: 2323 - DNA, 697 bp, Oryza sativa
ttcctgcacccctaatcttggcatgcctccattacagtgtcgtatgattttgcaggaagctcaagcccttggttgcaagccctcatgtacatctcataggcaagcctgggtttaccatcttgtacaagagcttcaatcaacatctgatatgtaatttcatttggctcaatgttctgcactttcatcctatggaaccattcaaaagcagagccacccttattgtttctcacgcatgcgctgattatcgcattgaacgtaacaacagttggttctatctttgctgacagcataccacgaagaacagaatctaccatagcatggttccccttgccaatgtaaattgatactaagattgtatatgcatgtaggttcggcttaacgcctaccttgcacatgtgttcccaaactcggagtgcctcatcatacagctttcccttctcaagcgcactcagcagcgctccgtaagaaactacatccggtgtcaacccttgatctatcattctcttaaatatatccactgcagcagatgtttcagctgctctagaacacgcaagaaggacggcattccactctctgcttccaggcttcaagcccttctgttgcatcttatcaagcagccttacaccccacctccaaatgccccttctctttgcagcattgagtagaatattgaaatgtgacatgatgagctcatacg

SEQ ID NO: 2324 - DNA, 8163 bp, Oryza sativa
cgcttggacaaagagcgccccagggatgtggcccctagcgaagaggatcggccccaccgaaaggtgcagcggcccgtctactttgttagtgaggccctccgggacgccaagacccgataccctcaggcccagaagatgttttacgctattctgatagcttcgaggaaactgcgccattatttccaggcgcatcgggtcacggtggttacgtcttaccccctcggccaaatcttgcataatcgagagggtactagacgggtggtgaaatgggcaatcgaactttctgagtttgatttgcactttgaaccacgccacgctatcaagagccaggccctcgccgattttgtggcagagtggaccccagctcccgagcccgtctcagtccccgaggccagctcgggcccctcgcagccgcctcacactgcccactgggtgatgcagttcgacggctccctgtctcttcagggcgccggtgcgggggtcacgttgacctcgccgagcggagacgtcctcagatatttggttcgccttgactttcaggcgaccaataatatggcagagtacgagggactccttgcgggactcagggtggcagctggactggggatccgccgcctcctggtgttaggcgactcccagctggtcgttaaccaggtctgtaaggagtaccggtgctctgacccgcagatggacgcttacgtgcgccaagtacggtgtatggagcaccattttgacgggatagagcttcggcacgtgcccagacgggataacacggttgccgacgaactctcacggctcgcttcctcgcgagccgagaccccaccgggcgcctttgaagaaaggcttgcccagccgtcggcgcgacccgaccccttaggggagacggacgcgcctgacaggcccccgaggcccgtcggagtccaggcctcgggacccgaggggagcgctcccagctcccttagattgattgcttggatcgctgagatccaagcatacctcacagataagactctacccgaggaccgcgaagggagtgaacgcgtccagcgcatctccaaacgctacgtgctggtagaagggaccctctatcggcgcgcggctaacggaatcctcctgaagtgcattcctcgggaacaaggcgtcgagcttcttgccaatatccatgaaggcgaatgcggagcccactccgcctcgcgcaccttggttggcaaagcctttcgacaaggtttctattggccgacagctctcaatgatgcggtcgacctggtccggcgatgcagagcgtgtcaattccacgccaagcaaatccatcagccggcccaggccctgcagatcataccactttcatggtcatttgctgtctgggggctcgatatcctgggaccgtttaggcgggccccgggcgggtttgagtatctatatgtcgcgatcgacaagttcactaagtggcccgaggcttatccggtcgtcaagatcgataagcactccgcacttaaattcattaagggcatcacagcccggtttggagtgcctaaccgtattattacggataacggcacccaattcactagtgaacttttcggcgattactgcgaagacatgggcatcaagctctgcttcgcctcacctgcccaccccagaagcaacggccaagtggagcgcgccaatgcggaaatcctcagaggccttaaaaccaagaccttcaacatcctcaagaagcacggcgattcgtggatcgaggagttgccagctgtgctctgggcgaaccaaaccacgccaagccgagcaaccggggaaacgcctttcttcctcgtctacggcgcggaagcggttctcccatccgagctcaccctgaggtcccctcgggccaccatatactgtgaggctgatcaagatcagcttcgcagagatgacctcgactacttggaagagcgaaggcggcgcgcggccctccgagccgcgcgctaccagcagagcctgcggcgctaccatcagcgccacgtccgggcccgatcactctgcgtcgacgacctcgtcctacgccgcgtccaaacgcgtgctggattgagcaagctctcaccaatgtgggagggtccatatcgagtgatcggcgtcccccggccgggctccgttcggatggccacgggcgacggcacagagctgcctaacccgtggaacatcgaacaccttcgtcgcttctacccctaaagggggatcgggtgtcaggtttcgggctcgggccaaccccgcacccccctcgggcgtgcagggttggccgggggctaccacatatgaatattcttatttctcttatatctgtatttcaataaaagcattttcgatttcctaaaggctgtatctgtgctgttgtttccttttgaaggatcttgacttgaaataggtcactcgtgttcaatcctgccctcgggggctcgggtcggctaaaatcgccaaacggggcccagaaccgagccgtgccccggggcatagtgaactccgggggggaatcggcaaaaacccacactcgggtcacccataaccctcggtcaccacgctcccggcctggccagtctcgacatgtggatctccctaggcactagccccgacccgagccatttgaggactaggacctgggcacgagcccttgttcaagccaagacacaaaaggaccgcggcacagacatcctcgtctcatacacacaacaaatagaattgacaaaaaatttcctctttatttgattgcagattaaattagtctatacaagaagggggcccgaaggcctcggaagaagaaaggaagaaactatttaaagattggcgggggcctgggggctcactccgatgcacccgggtcgccagcctcgtcgccactgtcgcccacaccgccgtcatcgccctcctcgtcggagttgagggcgaacgcgagccgaggggccgaaccctcgaagctgtggacgatatggtcggcggcatcccggacctacgcgcgcgcgccatcctcggtcccgggagggaactcgtccagcgccgtccatggggagaagtcggggtccctggcctggtaactcgccagtacgagctccaccgctcctcgggcgaggtccctcgaggatgacttaatcgtcccctcgagctcctcggggagccgctggagagtcccggccatctccgagaggcgctgggcgaggcctccctggttggcggcgtacttcacagtccgcccgccccagagacccgcctgccgcccggcgcggtctaaacgggacacggcgtcgcgaagcatgctgggccctatctcgcctgctaggcgaagggcctcgacctccccggtggacgaatccagcgcgccctgcagatccgcgatggtgtgttcggcagctgcgaggcgggcggctaagtcgctgtcgcccgtggccgccccgccgctacgcgcccttgcatccagctcccttgcctgcgcctcgagttcagcggcccgctggttcagtgcggcctctcggcgcgggcactttccagattgcgacgcgcttgttcctcttgcgcagcctcgcggagggacaggctgtccgccagccgttgcgccgcggcctcggcttcctcgagagctcgctcccgctcggtgagcgcgtcctcgcggaggcggagcgcggactcttcttcggcacaggcggcttcgtgcaccgccagtgtgacctcccgaatagcaacggcggcctcgcgatccgccaagtccctctccacggcgcaggcacgctcttccagcgccatggcacgggcctcaagggcttcttcgcgccgccgggatgccacctcggtctccgccgcccgccgttctcgggcagcggcagcgtcaaggaccatccgggcggcgtcgagctttttccctagctccgcctcccagctcctgtattgaaggcggagggtgtcctgcgcctcgttcatcacggtggtggcgatgagggcagccccccgctcctcctccacctccttggcgatctcccccagcaccttccgacgggcttcgagctctgagacgtgccggcggtgtgccttgcggcccacctccaccatggcctccaccgagcgtcgcccctcttcgacacgcgcccatgcggcgtcaagctccgcccgctctgcttgcagggcctccacctgggcacttaacccgtccaacaccgtggtgtttgcgacggccaaggcctgcagaaggggttctgcgctcagtggagcaacggaaggcgtggggaagagccgcctcggtgaggatgccgcgcggctcggcccaccgatggacgtgccggactcagggatgtcccccggacctggcttgtcctgagcgtcgcccgagggagtgggcccaagcgatgcgcccgcggcctcgtcgcgagctgcctcggaagtcgtcgctgtcacgcccggaaattcactagtaaattaatgaacatttaatataaattctgataataatttattaaataatttataaatcctgaaacgaaaatcagggtgtgacaaatctaccccccttacaaagaatctcgtcccgagattcggaacggctagaaagaaaagggcataggtaaactgcagtctatcttattccataactccgataattattctaaggctttaaagaaaactactgctgctttgaaactggtagctgagctgtaacacttgaagacgcaactcttgaagacgcaactggcactgcattggctcctgtgacgacaatgttgttgacttgcggctgctgatgcttcggcttcggacactctcttacaaagtgacctggcttataacaattgaaacacacccgctgctcccttccattactgttatcttctcgagactgatcctgctgaaatgacactgattgagtagcttgctcatcattgtcttcattgcttgcattagtctctgagttgatctcaccattcatgcccaactgttgtgactgttcttgacctgcagaaaaagattcaccaatttggagtggcttgatacgctgcctctggctactatcctgtgcctcctggaatacaattattttccttttacggttatccatcctgttcttcttgtcttcaagtcgaattgctttgtcaaccagctgctgaaaatcaacatagtcatgggagatcaacgtaactgacagttcatccttcaagccttccaagaacttctcctacctttcctcgtcagtacacacatcttctggagcataacgtgccagacgattgaactcatgaagatactctgccacggtatgatccttttgcttcaatgctctgaactcacgcttcttcaaagcaacaactcctacaggtacgtgtgtcttcttgaatccttcggtaaactcttcccaagtgattggttgtcgttctgctctgttcatccggaaatgatcccaccattctgatgcagattagaaaaggtagaaggagaggggttacactaaagacaagaccttaaccaggttaacactgatctgatgtgtgtagactattatattgttcaagttgattaagcaagcaacctagtatagttacacactcatcaatgaactactccaataatgggaatgcaaccatacctacacacaaagcaaacaacaagcgttctactctactaactattcttcaaagacactttggcggcataggttctaaggtaggatccaaacttcattccatcttgaccacttggcacctcggttcttcctcgatcccctttacttaacctccataagtagtcctcattggcgtcttcaagtttcaatgtcttagaactactcaagttgaaagagagagggaagtagacaatgaaacaattttcaaagaattctagataaggaagaaaggagaaattttcacaaatcatttttgtcagaaaaattcgtccttaaagtttgaccatttggcttatcctacagtcgagatggctctgataccaacttgtcacgcccggaaattcactagtaaattaatgaacatttaatataaattctgataataatttattaaataatttataaatcctgaaacgaaaatcagggtgtgacagtcgccgcctcggcctggcgaagtctggcctcctcccgagcggcttcttcagcttggcgagctcggacggccacctgggcggcctcctcggcttcccgtaggcgatccgcggcttctcgccggtcagattcccgcctccgagcctctgtggtcgccgggtcctcggccttagactggccggacttggaatggcgggagggacgcgacgggatctcgctgaaacagaagaaagaccagaagacaaacaagatggatgagtgaaaactcgcgttgagagaatgaatacggccacgatgggagtgggacgaacctgcgagggggtcggttaaacgaccaccttggaggggaaatgaggtttccccgggatggttctgtcccccccatcttgcggagccgtttcttcttccgctccccctcgggctgcgacgtcggcgtggccacctccgggcgcctgctgctggcacgcgccgccccgccccctcggggaggagatgggggaggggttccttcctgcttcctcttcccccgggtgtcggcagggcggccgctccccgggcccccgtcgcggggcccagaagcacgaccccctcccggggtagattgttcccccctgcggctcccgcccgctccatcgtggcctcgaggagcccgctcctccgacgccccgaccgcctgcatgatggtcaggatggaggcgcggtctggatcgctgcagagggggaggactccttgaggaatgagggatgtctccatggaactgagattcagcacccgttggaccactatcttgaagtcctcaggagcccagtcccatctgaccccctggtgggtcctcatacagtcctcggacccggtgtactcctaggcgccccgggcgcgccgctggagtggcgcgatccggcgacgaagatagtcgccgaacaccatggcccctgtgagcccctgggatcgcaggcccgccaggcggtcgaggacggcgtcatagccatctcccagatctaccggcacccgccagctgtaggcctgcgctagaggctggctcggaagtcggaggcgcgcttcgtcggcgaggggggtgtagaaccagtcgctcttccaatcatcccacttcttgcggaggacgcagggaatgtagcggttcagcaccggcccccgcagctggaagtagcaaccaccaaccaccgacggcggcgacaccggctgtaccccgatgaacatctcgcacaggtgcgcgaagatggccaatgtcattaccgcgttgggggtgaggtgcgccatctggagatcgtaaaactccagaacatccatgaagaaaaaagaaaatggcggaaccagccatgccatagcaaaagggaggaagaagacggaccgccccgggtagtgtggcgccgggcatccctcgcccagcgagactatctcccggccggtggcagattccggcatgaagcggcgcggcagcccggcctgtctctcgctcacgatgcgggaaggcggcagcacgctaccgtcaagcggagcggagccccgtgccatgatgccggaagaagagatgtttgagagcgagcgcgtgtggcgaaggtagggcacaggaaacaaggagttagggcgcaagcggcgaagacaaggggaataatggcgagaggaaggaagcaaatctcttcctcggcgactttatacccttgccaacgctgtgcccggctcctcgtttctcgcgcccactatcttgccccctcgtttctcgcgcccacgcttccactaatcccattcgcccgtttgcggtgcatgaggtggatatgcggctgtggcagtcgagatggaacatctcgtgcgcgcgttaattacgctcgccgaccgaagcgccatcaccatatctccaggaaaaacgaaccggcttgtcccgatttttagaccggccccacctgtcaccaggccttaggaagtggcgtcacgcccgaccgcttccctcgaggagggcgatcgccctggcataacgccgggggctactgtcggtgacatgggaccgggagtatcatgacttagagacttgaggcagacacgatcacccacgtggcctaaccccctcggggggggggggggg

SEQ ID NO: 2325 - DNA, 666 bp, Oryza sativa
attcctgcagcccatatcgatttcagagataggcatggctagtcccctacggtgcctacggatactgtcaggagagatagagcggtgtctctgatctcgccggatgcggattcgaggaggaaggctaccctgttgtcgactacgagtcagtactacagaccgccaagtcgacaacagttagataggctggtgtgttctccgtctcttttacctaagtctcacatatatcctagtaccaacgatccccatactatacaaataccggaatcgcgacatcaaacgtcgatagtttctccagtagtagattacgaatctgattctatgggagtcaaaatggtcgattcacctacacgttcggctgattgcaatagtgaaagtggccactacttcgccatttgatcaatttttcgtcctttatttttattaatatatccgttcttttaattttttaatttagaaacagtacaaataaggtttacgtataagttttacgtgtacacataagaacattccaataatttacatatcatacacactagctgctcgttttcatagaaaatgtaataactagtgagctagcactagcagtatcaactaatttactcctcgtcgtcgtcgatctcgacggtcttgttcatcttcttcctgctcccgccgccgccgccg

SEQ ID NO: 2326 - DNA, 1687 bp, Oryza sativa
atcctatgcaaaatggtgcaggtttcctttcgacggaaaaaagtaccaactcaaattcgcaaattaatcaatgtttgagaatctgcctggtccacttccccagccttatgaggtagcactttcttgtttgtcttccacaattgttgtacagccttgttgtcataaaactcccttacataaagcctcttaaagtacagcaacttgtggtagagtatcacaatgttatattatgttgaaacagattagcaagcgaggcagcattaacatgtagaaatccagaatttaactgagttttactatgacaagaggtgccaatatcttatgccaagttatatattgttttcttcaaatcatttttgctgtttatttagggtaatcattgttaagtttttttattcaaatgcttattttacagttttacttcatttatagctgatagttaccttttgtttttgtctgactgactccagaactcaatttgctccgttgcttggtagttctggtgttgtcgaaacaagatttcggcaatataaagggggtagcgcacgagacgtaagagtggatggatgcggagacaatgatttagacaggttcaggcactctcgatgagaggtaataccctactcctgtttggggatttgaatccgccgggtgtagtattgatctgacgatccagtcgtgaatcctctaccctagaggacctcctacccaccttatataggatggggggggggcaggattacaagatagaaatcttaaccaaaacggtatcggtttcctaaatctactttacaatattatcaaatcaggactttagaccgttccgtaatatacaaggaaacataatactcaagtcatgatctgtacaaattccatagatataagttatcccctataactagtcggataaccatgtcgtgtgggtatggggtacccataatcttcacaggtgtggtgccagtttggtggatcctcgtggagaactttgctcgttcatatgatatttaggtgatgtgcccattccccttcaggacttttttttaatgaactagcacggacggaggtgtgtcaatttcattgaatatagtgaatttccttcaggattcgctctgcaggtcccaattttctcattgccggattttctttttgacagagttgccagatatattctcttcaggtttgtattcaacttttgttttccagaagcctgacccagatgcgatgccaacaattctgacgcccaatttgcctgaccctgagaatgctcaggaagtggtctgttctgcatttagcactgtcgattttttactttatgtgatgtgtgttaactgtagcgaaatagcagggatgcctccggaggcagcaggcatcagtggacgatggaaagggctcagagcctcagatgctgatcgatatgattcccatggaatggtcagaagggtatctctggtcgtccccgggcctgctgatatcagtggacatagaaggggctcagatgctgattgtaattcccatggatcgtgcgaagagcatccttggtcctcggcctgcagatgtgaggctttagagtttactgatgaatacttaggcataggcgcatggctgaacttggagttggctatgtgcatcctttgcatatatgccgggtatttagggtatataatcatcttccttatctctactacta

SEQ ID NO: 2327 - DNA, 11207 bp, Oryza sativa
gtcacgcggttagcgtttggaggcccatcagacgttcagacgatcattgcatgcgcgggctcctctacgccgagggttttggatgtctttggtggtgtagaatcggcgagttgcactgatgcgtttctgctacgtactggttttctgatgctcaaaagcaccgctgcggcaaatgtgatttttgcattataatcagagaaaggagagatgtatgtacgcttcggtttcactggttggatgatacatgcggctgaggtttttttttttttgaacgtacggtatgtggctgagttgctcttccttttctttttccaacacgtccgtacgaacgtttaccaaatctttttttttacggtttttcctcccggttgattctcggattttcatcatccatcaccttgttatccttgttctcaactccgatatcgacatcaacatcaacttgctccatgtttataatggcatggttccaattttctcttactatcccacactcccactccgcgcacgagctgttgccccagtggcctcgaacaacgtaccagctacaatgatttcacggggccaattgacattgattacgtgctacatgctttatcgtcttctctggctgcagtaccatattgctcgtgaacatgaagttgagagaggtggtactctcgtcgtattataaaaacaaatctaatataaattgtgatatattctaatattgtaaatctgaatatatttttactcatatttataatattagaatatataatatttcggttgtagggagtatttggcatggttgtagcgttggtgacctgagtcattgtctgagcgacataaatcatattgcctactttctccgtaaaaaaaaacccaacctaattagagatgtgacattacctagtccaatctggacataggtaatatcctatccctaattagattgggcttttttcttttgtttgaatggagggagtacgcagtataacataccagaccacatgcagtaaaagaaaaatccatcagccatctctttccgtcgcctctgcgttcacccgcaacgaaaggtatgacactgtaaaaaataattagacttcttgttgccttcacctattttaacacatgtgtactttttaagtaattgaaacattgaattagtgagatgtagcaatgggaatatagaccctgtttagatttcttggcaaaattttataccctatcacatcgaatgtatggacacatacattgagtattaaatatagatgaaaaaaataactaattacatagattgcgtgtaaattatgagacaatcttttaagcctaattgcgccatgatttaataatgtggtgctacagtaaatatttgctaatgatagattaattagacttaataaatttatctcgtggtttaagacaaattctgtaatttattttgttattagactatatttaatactttaaatatgtgtctatatatccgatatgacacgccgaaactttacacacatggatctatcacgaagtcatatatgtattcgatacattaggaaagattattggcaggtaacttgtctcatcagtcgttttgatttgggaaagataatatatcttgctactttgtcttcttccaaccgatccatacgcaaaatctatcgtccttgcccaacagcgccaccttggtagtctgctactagctgcgccatgtcttcctcctccgtgcaaacctctccctcgccctcgcatgaagtcgacgccgaaactgacgaggaactctacaagcagttcaccgactcggtgtcctcctggccgagctcagaacccatgcccttcctcccgctctaccgccacgacaaaggctggtacagtagcctcatgcctatggtcggtgcgatggtcgccgacgcgcggttcgccgcgcgcccctccgacatcatcgtcgccaccttgcccaagtccggcacgacgtggatcaaggcgctcctctacgccacggtgcaccggagggagcaccccgccgacgccgccgccgaccaccctttcaactccctcggcccccacgagtgcgtcaacttcctcgagtaccagctctacaccaacaacagagtcccggacctgggcaggctgccggacccgaggctgttcgcgacgcacgtcccgttcacgtcgctgccgagcgccgccgcggcgtcgggctgcaaggtcgtgtacgtgtgccgcgaccccaaggacaacctgatctcgatgtgggacttcgccaacaagttcagggcccgtgaggggcaggagcccatgtcgccggaggccatcgccgagctgttctgcctcggcgtgtcgccgtccgggccgtactgggaccacgtcctcggctactggggcgcgcacgtggcgcgccccgagcaggtcctcttcttcaggtacgaggagatgaagctcgacgccgcggcgcacgtccggaggctggcggagttcgtcggcctgccgttcagcgcggaggaggaggaaggtggcgtggtggacgccatcgtcaggctgtgctcgttcgatcacatgatcggcctggaggcgaccaagagcggcaagacggagctcgtggtcggcacggcggcgaatagctcattcttccgtcgcgggcaggtcggggactgggcgaaccatctttcgccggagattgcacagcggatcgacgccataaccgaggccaggttcaatggttccggtctcaggccaagtggcactaaatgatatatacctgatacctcccgttgaagtgggctaaggtgaaatgcaaccttcaagcttagcgtcagtacgtacttctataatctatttactcccttcgtttctttacctgtacccttacaaattaagcattgactgattccctttgccaataaatctgtaaaaatttactatctctttcatattataaattatttgattttttttattagtcaaagttataagcttatagaaaaaatatactactccctccatctctaaatatttgacgccgttgactttttaaaatatgtttaaccattcgtcttattcaaaaaatttaagcaattattaattctttttctaccaattaattcattgttaaatatactttcatgtatacatatagttttacatatttcacaaaagtttttgaataagacgaacgatcaaacatatttaaaaaagtcaacgacgtcaaatatttagggaatgagggagtactacctttgtcccaaaaatataaatatttttgggtttcgacacggtcttcaaaatacaacgttgtaacaaatataattacgaatgtacaataactatttttagtttggcaaattttgctacaggacatcacaattgtgtggttttagctcaaggacaccgcaaaaacaaatttttagggaaagacactccataaccgtggatatttgccaatggaaaccgcaccgtctaaatgaaacttgtcttgttgacgtggcggtcgggagcccttttttgatgtggtcggaccgaaatacccctgtgccttatctcccttgggggagtagccggtcatggtgaagaacccctcgctggagtagaagatggggcagttcgggcgcatcgcgtcggagatgacgaacgtctgctgcaggctggacagcgcgtccttgagctcctgcaacacccgcggcggcgagtcttacaacgcgcggtggccgctgccgccgtccaccgacgacttgccgctccccatccccgccgtgcctccgctgtcgcgccccgccgccgccaccggatgctatgcctgctgctgttgggcgctgcttccgctagggccctcctcggcgatgatctccaagccggcggcggtggaggtggggaacgccatccacttctctctcgacgtgttgagtgcggctcgacgaatacagcaacggcgcggctcgcagtggctgtgtagcctgatgcgggcagccggcgacgcagcacagcgcaatcgtgcaagagcaacggccggcacgaaggcagacggcttgcagttggcggacgactaggcctgattagcggagaggaccaggggctgcgcgccatgatgagcgacggcgacggttggcgttgacgagtgccgcaatgtgcggcgaggacggcgctgtgattgacgactagccgcgcgtagtgagggacgatagggctgatggtttggacggggttcccgccaccggtgcacatggatgcgtcatgcgtgtggatgaggcaagaacgatgttcctggatctggagttgcttggtgttgctgctgcttggagaagattggaagacggagaggacggctggctacttgactacttcttgttgcttgttggatttggtgaattggatgtgctcgttgttgcttgttgcttgatgcttgaacgcttgaagagcctgccctacaactcgacgatgctatggacgggttggcgatggagacggagcccggggacaccacgaggaggcggcggtggcgattgtctacggcgtcgtcgtctacggtggcggtggtcgtcttctgttgcagccgcgagccgcgctgccgcaccaccaccgtgccggctgcggctccgttttcgcggggcggctgctccaccttcgcgccggccgctgttcctgcacgagtgcgctgcgctacgtcgccggccggccgcccgcatcaggccacacaaccgccgcgagttctcgtaccagcaagttctttcgtcgatggtggtggcgaattgagccaaaacagctccatacgaagagataaggtgcaggggcatttcggtccgaccacgttaaaaaaggctcccgactgccacatcagcacggcaagtttcatttagactccgtgatgtctatcggtaaatatccacaattatggagtgtctttccccaaaagtctgtttttgcagtgtccttgatctaaaaccacacaattgcgatgtcctgtagcaaaatttgccttttagtttttgttgtaactaatagaagtcgaatttggcattgtatatttgtggagtgatatatttcatatattatgttgttaatatttttttaaaaaaaataataaccacttagatgagcaacgaagaacatccccaaagatgaaaatccatatcccgcacaattcgttcattccatttggacttaacaagtccggctgggccagacagccagaggcagtcctgctcacttgctcagtgctcacgagttatcacgactaacagacatgacacgaccatgagaacagaaccacggagcaatacctgctagcctcttcacacattattcaaccagcacatgcgcacgcacgcacgcaccctactacctatacacgctacagaggcaccaccgcaccacgcaacgcatgagtgaccccccccccctcccctcccctcgtttactctggtgggcttggcctggccttcttgaagaccacgacgtgaggcggctggctcgcgcccagccacgcccgcgcgccgtcccttgacacgcccaggtcctggcacgagtccctgcacgacaccagcttgtacccaccgccgtacttctccacgcggaacgcgttctcccgcccgctcgggctcggcccgatcaacggccccgtcaccacgcgccgcgcccccgtgagcggctcgtcgccgacatgccactcggtggactgcacgcagatcgtcgcggcgttgaagcggatgcggacgtcggtcgagacgcggatggtcctgtcctccggcgccgcggcgccgccccacggggtgaagcgcacggggaaccccttgcggcgctcgtccgtctcctgcgccacgaggagcgggcaggggagcacgcggggcgccatcgtgaggccccctccgtggccggggctagccgggaggacgtagtagctcccgtcggcgctcagctcgtggccctccgtgtcgtacaccggcggcggcgcggcgctgcatgagaaggagatggccaggagggagaggagtatgagggggaggcggaggctaaccatggctgaaacccttcgtctcctgctccggctcgtgcacgacgaaacgaggggagtgtgcgagctggtggctcagggctggtatatttgtactgacctgtagtagagtcgctgtttttctcgacttctggatttgcacgtgcgtttggctggtggttagtggtactactcaccactgcgcatgcggtgcctgtctgtaaacaagtagtagtagtacaagctgatttggaaacagcaatgcgaaacgacgatatcacgtacggttcccaatcgtttcgatactagatgggtatcccgcacgttgcttcgggagaattgtgtgataatatagtagatataagttctaaaattttctttattatctattgtatgattttttttcatgtatttatataatttttacctttatcaattatccatagattataaataaatgtctgggttgtatagtgtgcttttttaggggtgtcggtgacatgggaccgggagtatcatgacttagagacttgaggcagacacgatcacccacgtggcctaacccactcggggggaggtcgggcccgagggtgatacggccgcccttctctttgtctccccgaggggtcggaccgctcccgtctcggccccgagggccgaggcgccccgaccccttgtgggttttgcgccgcgtatatggggtaggtgagcatagcggggctcacctaaccacatttattgcggtttggacgagcgcgtcacgccgcatgtaacgcagtgcagcgcgctcgtttatccggtcagtgaccagtcacagaccgatcagatcgtgggttaggtggcgacaggcggtctgacgcacgcctcgccccatcccgtcaggatgagagcctccaagcactcgtccctagccggagccggcgtgttagctcctggagatggcacgttggtcccggtcagatatataccaggcttcatcctaaccattacaagcaagacattgtatgaagaggggagaacatgcagattgataaactgacgcgtggtggacaagaatgaccgatttgtgaccggtctgacactggtcatgtcgtcagcagacagccatgttcccacgtcgcgcctgcttccggcggaagtggaggtaggtatgggccgtcccatcagaaggtcattcggacggcaaccatacaagtctccgtctgtttatgaaaagataggataagtccccacaaaaaagagagagatggtgcatgtggtatccccttgaggtataaaaggaggaccttgcccacttagatgggggatttatttttttcggatccagaacgaccagagagggagagagtaagagctctctggttctccagcttttttgtagcttcttcatacatagatccacaaaaacacaggagtagggtattacgcttctcagcggcccgaacctgtatacatcgcccgtgtcttgtgtgtttcctttctcgcgaaccttccacacacagactaggagcttagaatctcacccagggcccccggccgaaccggcaaaggggggcctgcgcggtctcccggtgaggagccccacgctccgtcatctggcgcgccaggtagggggttctgcgtgtgttcttctaagctctcgcactctttcgtgtgcgccaagcttttcctgttcaacccaatggctgaacaagcaaaggcacacaacctctctccgagtgttagcggtgacgacggggagccaaacccacgccgtcgagctcgtactccaccgccccctccacgccaaagtcctaggcgggaggaggcgctcgaaagggtcgaaggatccgcgacttcgacatccacgggtgatggggaagggcggcgagatggggagcgtcgcctcctcgtctacggcgacggcagcacgccccagggcgcgctcctacgtcacccgcccattgtccctgacccggagtctccagcccaacgttggctggacgacgtggccaacttggtcatgacggcacggcagcgcctaggtgctggtgggcggtcctccgccaccaagacctctggcgctgctaccaccggctccgtatcgtcaaggcggagggcgcggcgagcggcggctgttgctcgccattcggccgccactccttcgtcagcgcctccgacccaggaagatctgcgtggggggccggatgcccgcatcagtatcgagcgccagcgtaatggccgacgtgctgcccacgcaacggagggcgcctcctcgtccggagtgtcacatcaacacggacgcggggatcagccctccgtgcccccggttggtggtgtcggctgtagagcctttgtggcgagccttcggaacgtccgttggcccccaaggttccggcccaccatcgccgaaaaatatgacgggagcgtcaaccccgccgagtttctccaggtctacacgaccgggatcgaggccgccgggggtgacgacagggtcatggcgaatttctttcccatggccctgaagggacaggcacggggttggctaatgaacttgccacccgcgtccgtccactcttgggaggatttgtgccaacagttcaccatgaactttcaaggcacatatccgcacccaggtgaagaagcggacttacatgcagtccagcgaagggatgatgagtcacttcgctcatacattcagcggttctgtcaagtccgcaacaccataccatgcatccctgcacacgcggtgatctacgcgttcacggggggtgtgcggcacaaccgcatgctcgaaaagatcgcctccaaagagccccagactaccgcggagctttttcagctcgcggaccgagtggctcgtaaggaagaggcatggacctggaacccctccggttccggtgtggcagcttcggccgcccccggatccgctgctcggacagggcggcgtgacaggaggaagaagaagaggtcagcccattccgacgacgagggtcatgtcctcgccgtcgagggcgcttcgcgggccacccgaaaggggaggcctgcgaccgacaaaaagaaggaggccggcgctcccagtagggagcgcccaaccggcaagtggtgcatcgtccacaacacctcccttcacgacctcacggactgccgcgcagtcaaaagtttggctgagcggacgaggaagtgggaggaggagaggaggcaggagcgccgagagggcaagtccccggcggttccttccggcaatcggcgaagtgaggccaagcagaaggcccccgccgaggacatcgatgacggcgatgatgacctaggtttccaagagcctggggccaccattgccactgtcgatgggggagcgtgtgctcacgtttctcgccggagcctcaaggccatgaagcgagagcttctggccgcggcccctactcatgaggcgacgcgccgggcgcggtggtcggaggttgccctcaccttcgaccagaccgaccacccaccgtgcgttgcccggggaggacagatcgcaatggtggtttcccccactgtttgcaatgtgaagctggggcgtgtcctcattgatgggggagcagccctcaacatcctttcccccgcagcctttgacgctatcaaggccccggggatggtgctccggccgtcccagccgattatcggtgtgacgccgggtcacacttggccgccaggtcatatcgacctcccggtcaccttcggtggatccgccaacttccgcacggaacgggtgaactttgatgtcgcggacctcagtctgccctacaacgcggtcctagggaggcccgcgttggtgaagttcatggcggcagtccattacgcctacctccagatgaagatgccgggccccggtggccccatctctgtccatggcgacctcaaagtcgcgctcgcttgtatggagcagcgcgcggaccacctcgccgctgcgtccaagcccgagggtggcgacgagaggcttggcacctccgtccccgccgccccgaggcagcggatagtcacgtgcgacgaggtcccggtcaaggaggttgccctgggcgacggcccgtccaagaccacacgaatcggtggtcttctggatggcaaataggaagacgcgctcgtctctttcctgcgggcaaacgctgacgtcttcgcatggagaccggcggatatgcccggggtccccagggaggtgattgagcaccgtctcgccgtgcggtcgggcgcaaggccggtccggcagaaagtacgacggcaggccccggaacgtcaagccttcatccgcgaggaggtggcgcgacttctggaggccggattcatccgcgaggtcatccatccggagtggctggcgaacccggtggtcgttcccaaggcgaacggcaagcttcggatgtgcatcgactacaccgaccttaacaaggcatgtcctaaggacccttaccccctgcctcgcatagatcagattgtcgactccacagcggggtgcgaccttttgtgttttctagatgcatactctggttaccatcagattcgcatggctagggaggatgaggaaaaaactgcattcattacccccataggaacttattgttatacgacaatgcccttcgggttaaagaatgcaggtcctacttttcaacgtactactcgaatttctttgggtagccaaataggacgtaatgttgaggcttatgtcgatgacttggttgtaaagacgcgcaaccaagagaccttactctcggatctagcggaaacttttgagagtctccgctccgcccgcataaaactgaaccccgataagtgcgtgttcggtgtacctgcgggcaagcttctcgggtttttggtctctgcccgaggcatcgaggccaaccccgagaagatacgagctatagagcggatgcgcccccccagcaagcttagggatgtgcaatgcatcaccggttgcatggccgccctaagtcggttcatatcgaggctgggagagaaggcgctacccttatttaagctcctcaaacgctccgggccgtttacttggacggaggaagctgaacgtgccctcactcagttgaaggcgtatctcagctctcccccagttctggtcgccctggagccaaatgaacccttgctactctacttagcggcgaccccgcaagtggttagtgcggctttggttgtggagcgcgatgaggacaatcctcattccgcgcacccccaccctgtgctggcttggcccgggagagagcaaggaggagaggccccc

SEQ ID NO: 2328 - DNA, 680 bp, Oryza sativa
atttttttaacgactcggacgagatggtgcgaagttctattaatatagcatgaaaaaattataagattacaaccctgtaaggtcataaccagtaaaaaggaaaaaaaatacaaccacccacacattgacagcgccaacacacaggtccggaagaaggctagcaccggaccgaccgctgctagaccaaccaagctccaccaccgctcaacctctgtcgacatgtgggaccactgtgtaccggcgccccccgccggcaagccttcgtgcgccgtagaccgtgccacaccaatcggcagctcctcctcgcaccgtggtcgcctcctccaccgccggccgcgcctctcgcgccacgccggcctcctccaccgggtgcgcctctcgcgccagtccggcctcccgccatcggctgtgcctctcgcgcgaagccagcctccatcttcgccggccacgcctctagcgtcgtaccggcctccactaccatcggccacgcctctcagcgccaagccggtctccgacctctcctcaaaacactgctgcgcgggccagatgcagccgtttgccacgccctcggctagccgtccgagaccgccatgcctcctccacccgcagccacggtcgcccacggtagctatagcagctgccatcgtctagctacctgctgtccaccgggggctgcagga

SEQ ID NO: 2329 - DNA, 677 bp, Oryza sativa
agatggtgcattctccagagtggtgattgaagaaatgaaacactacagttttactgatcaaattcataaaaggaaaggctacaatcaatgtgggccaaacctgaaatgatttactgaaaatctttattcttgatgtactttccctgatagcatactctccttctgatgaccaaacaaactccaatgcagatccaaatgacctattcctccaagccaatgcagtataaattatgaattcaccatctccacaaactacgacaaatcttccattggggttatgctttaagctctgaccaaacaaaaagatgacacatagtaagattgaatactattcaagatatgacaaacaactaacattacctagtagaaagaaaagaaatgttgtagccatctcagtctaatatcacatcaaggaatcacaaggaacacaaaatagaggtagtggttgtgtgaaaactatcaatcaaagcaattaacactaattggacaatgtcacctattgaactacaagttccatatgttctttcactaagcttattagcataaccatttacaagtcatcacaattcacaagctgcaggcatggatgataaccactatatatgctgatgtgagattaatggatgctatttatgcagaagttcaaacacataggttactgcagcagctgcaggaat

SEQ ID NO: 2330 - DNA, 586 bp, Oryza sativa
aaatgagcaacactgccatatgaaaagtaatgggaggagtaagaaaccatcaaaacacaacaggacaaaatgcactgctaggaaattttttatgattttgttatttggcacttccattaatcagtactcctttacacgactacaatgaagatagagtagaaacaatatatgtatttttgtttcaaaaaactagatgccaatactcctaacagttgaatctattttaggtgtgatgtgctacataacagtcattcaataaggcacatcatgatagctattgaaatgtaattgtaatttagcatataaatgtattttcacgcttccatctatcattgttttgttacttttaaaaaaggaacaaaattattaagaaaccaaatcaacaggttcaaagagaaacaggtaccaaaataaaagaaactcattgttttggatcaaaagtcagcaactaacttattatattgcgcctttggtatggatggtaaaatatcatttgcacgttcaatatccccacgcatcacaagtgtcttgtactcaatcaaactaagaagtaatgtgtaccccatgacactgcaacaagaaaaat

SEQ ID NO: 2331 - DNA, 534 bp, Oryza sativa
aagagtaaagagagttttatcaactgcccccatttcaaaaccattttgaagcaaaaaggttttcaatctttcataccaggctctgggagcttgttttaaaccataaagagctttatcaagtttgaacacatgatttggaaattttggattttcaaaaccaggaggttgtttgacatagacctcttcctcaataactccattcagaaaagcacttttcacatccatttgaaaaagcttgaaaccttttgaagcagcaaaagccaaaagaattcgaatagcttctaatctagcaactggtgcaaaggtttcttcaaaatccaagccctcaacttgggtgaaaccctgtgcaaccagtctggctttgtttcgaacaattgaaccatcttcacctagtttgtttttgaaaacccattttgttccaatcacattaaaacccaagggtggttctaccaaagaccaaactttgtttctttcaaaattttctaactcttcatgcatggcattaacccaattctcatcagataaagcatgaca

SEQ ID NO: 2332 - DNA, 946 bp, Oryza sativa
cccgctcagtctcctctccctctccgggaaaacctagcgccattgctcccccaaatccgccccgaatccaaccgttctttccaaattaattggggggttttaatccccattgaatcctcttcaattccccccaatttcccccttgaatggcgcccccaatcgtcgggaacggccgcgcttttcccggccaccaaccatggccgccggccgccattcccgtcgccgttccgccctctcccgtgcttggctcgcttccctccgctataaaatgcaaccccctcgttccgttctatcgttttagccccctcccgagcctccccgtggtccctagccatcttcccgccgtcctcctctctctcctgtgccgccggccgcctccagccgcctctacctcctcgccggagcgccgtccggtcgcgccgtcgcctcctacagcatcgcagccgcctcctcttccacggtctaccctccgtttcccgcggagacccccggagctacgttcccgccgtcgcccttctctttccttcgcgccggccggctacagccgcctctccctcctcgcccgagcgccgcccggccgcgccgtcttctccctcggcctcgcagccgcctcctctccctcggtcagccctccgtttcgcggggaaaccaccggaggcgcgtccccgccggcaaccggtggcattgccgccacccactccctccagccggctgctgttcctcgtcggaacgccgatcgacgtcgccgtctacttcgtcgacgccgtggcatcgtctccttcctcgtccacccctcggtttcgcccggaagccccgcacatcgccgcgaacctctccatccgcctcgccggagttgttcggccgcccgtccctcctcacccgtgcaccggtcgaccgcacctccaccaccttcggcatcgcagccgcgacgtcgtcctcggcatcg

SEQ ID NO: 2333 - DNA, 1128 bp, Oryza sativa
ccagcacaagggagtgcggcactttcttccgaacattgcctcattcggcgacatctgaatgctggcctgataactgttgttgtatgagaactccgcgtacggtaaacaacgatcccaagtgccttcgaaatccaaggcacacgctcgtagcatgtcttctaggatttggtttaccctttctgtctgaccatcggtctgcggatggtaggccgtactaaaattcagatcagttccgagggcttcatgcaactgcttccagaaccttgaggtgaactgagtgcctcggtctgacacaattttcttgggacagccaaatctacatacgacatgggtcatgtagagttctgctagtttctttccatcaaaggtggtttttactggcacgaaatgagctgatttcatgagtcggtccacgattacccaaatggagtcgtacccgctgggggttcttggcaaaccggtgatgaaatccattccgatctcttcccatttccactcgggaatcggtaggggttgcagcagaccagctggcctctgatgctctgccttgactctttggcaaatgtcacacaaggctacgtattctgcgacatctcgcttcattccagcccaccagaagtatgccttgatatcttggtacatcttcgtacttctggatgaatggagtaagcggactcatgagcttcctttaggatgagatctcttaactcctttttggccggtacacagatgcgtggaccgcaccaaactgtgccttgatcgtctatggagaaattggtgtctttcttatcctgattcttttattaactcttttatcccttcgtcatctttttgagcctcccggatttgcgattctagggtaggcttgtactgtcaagctggcagggactcctgactgtaccacggtcagtcttaacttctccaattctctgcacagatgatcttggtcaggccgtatttgagctacattgcaataggccttgcgacttagcgcatcagcgaccacgttggctttaccaggatgatagtggattccaagatcgtaatccttgattagttccaaccatcttctctgtctcatatttaactcggtctgtgtgaaaatatacttaagacttttgtgatcgg

SEQ ID NO: 2334 - DNA, 559 bp, Oryza sativa
gtgttcatgcaagcaacttgagtggcctgatcatggcattgtcttcgtgatccaagatctgcacatcaaatcacattagaacatataaattcgattagaaaaaaaattaacccagtaagatagacacgtggcatttaacgtggcgcttacgtggcaatggtagacgtatcccggctcggcggtggtgtcgaaggggtaggtctggttggtgtcgacgagcttgaaggcgatgaccaccgaggtgacgaagcccgggggcaccttgatgacgttcttccacgtcttctcgtggtccggcaccggcacgacggggccgacggcgtgctggtcgacgttgcacttgaccgcgtcgttgaccgacgtcatgcagtcggtgaaggcctgcaggttgacgagctgctgcatcttcaccgcctggaacattcccaagtggatgtgcagcgggtggttgtcgccggtgaggttgatcacctgccacagcttccgtcgtgccggacttgggcgtattcgtcaccgggtcctacaggcggagcccgttgatgtagaggtgcgtcgactg

SEQ ID NO: 2335 - DNA, 1215 bp, Oryza sativa
tgggtaccctattcatggttccactagtatgaatttaggtagatgcttcgctgattaaataggacaacattaggtggttttataactttagactttgggaattctcatatcatttggacattatggaattgttggattatggtggaattggacatacccctctcttcctctttcaaaacccctaaaacctgttttccagtggggtttgggtgcatgccagttgtgggaagtagcaccccggccactataaggattaagctcgggcctctgttgcaaagcactaccgtacttccacatgtctagtgggtaaggcttagtttgtggctcagtctggttataaacaaaagtacacggatggagatggacgaagtcgggggtcgatggacatctctaggacaaatgaaggctacacgagctgcggcccggtagtcgagatgtcatggcacagggctggtgtcctgctgctaggggctcaatcctgcctacctgtcctggaggttccggccgtaggtggggttgggtcggtactcttgtttatggctaggatgggttgggaactatgtcacgtctttcgtccgtataccgtggtggtatgtggcacgtggttacacgtgaggaagatgtgtcttgtgggtaaagatgtacacctctgatcagagtataatctattcgaatagccgcgccctcggttatgggcaagccgagcaatgtacccaagtcagtgttttaattcttaaaatctgcttaacaactaaaagaaggaatggttggcctgggttggcttgggacgagctgggacccagggtcgggttgccagttcggtctgaatcatcgtaggccttgggttaaggcaggttcgtgtgggttcacggccttgattaataatactgtgtagctctaggatcgtctttataaaatggctttgggcaactaagtgacttttaaatgctgtttactgcaaaacttaacccctatattattaccccttgtacccccttgcattaatcatgcatctgccggtgtggcttgctgagtactgtggttgtactcattcttgctcaatctttcccctcttcagtaagagaagctttggagaagttgtcttaggtggagtcctggcttataccccagttgagcgcctgtgaagatggagccgtaggcccgctagtccgctgctgtttatttttgattgccaggcctgaagcgcctttgtaa

SEQ ID NO: 2336 - DNA, 936 bp, Oryza sativa
actgggcggttgtccactcggcgcgcgcgcgggatactacgaacggcgtccgcgcgggcgcgcgcacgcgaacacggcgcgcgggaagcggctttgcgagcgggcagctcgcgcgaggggaggggcgctcggcgcgggcgactcccgcgcacgcgcgcgcggcgcacgggcggaacggaggggaagcggggatagaggcgctcgggccggctctcgcacgcgcgaacagcgcgcgggcgagtctgagcgggggggtaggtaaggagcgcgccggaggggagaagggagagagagagagagaaagggagagagagcgcgcccgggagagagggagagatgggccggggaaaagagggatgggccgagcgatattcggcccatcgacctcgggggaggcaaaatagacttttgcggaggaatttgatttggaaggaattggattcggaattgaactcgacgatagatcggggattgagatcttgagaaggcacagacactagacaacaatcaaagaaacaaatttcgcaattaggttttttcggagataattttcccgctaggcgccacgacggaatgggcgctacacaacatgactgtactcctactctataataaagaggcctctgttgctgtgatattctatcttcctgtgataccagcactgtttcctgggactggtatcgattaacaggttaatttggagcgtcacgggctaattccagtcgggactagctcggggcgtgacaaatatccacaagaaacagaggacaatctcgtccatctcctgaaggcgcagcattacaagacgttcatactgttgccgtacaacacagagttagtttaattttactgtcttcctacataccaaatttcattcccatacgaacttgctaagtgtttcatatgtaatgcatcccacgcacattgcagattcca

SEQ ID NO: 2337 - DNA, 2515 bp, Oryza sativa
gtaggtcgtgctgagtggcctgagcctccgaaagctcaaccatgcgagtcagcactggctgagactcgctgtacggacaagggtacctggcgtctgagtggccagaaggaaggcgtggaagctgccgaaaggcggagcctccgagacggtggctgtagtcatgggccaggcgacgaagcgcagtccaggagaggtcctggtacgcgatctgcagagtgggcctggccacggtgaagtggtgtgggcgaaggccagctccgtgtatacctccacgggggtaaaggtacacagagagctcacagtgagggggaacacggtccacggagtaccccgtgtactcgggacacgagaagccaaggaaacgggagaggtcacgaagctgggcgacgtggtgactctcaccaaacccgtgggaactgaagctggcgttcactgccatctacaattttgaaagagggagaaagatcagtaaccattttagaaacaaactattgaaaataaagaaaacaaaagaaaccttagcttttcgcaagtagttttgaacttagtatccttagggtcgtcctaagcgtcgggtttcgccctagggccaagcctgtgctctgataccatctcttgtcacgccccgaactagtcccgaccggaactagcccgtgacgctccaatttaacctgttaatcgataccagtcccaggaaacagtgctggtatcacagggagacagaatatcacagcaacggaggtctctttattatagagtagaagtacagtcatgttgggctgcggacagatcccgagctcacaactgcattacaaaaggaaagcggaagccaggacttggaccatacaatcacaggcgcgacttgggaactaggccgaaaccctaaaactcatcgtagccggcttgctcctggaagaactcctcatcagcaggatccgcttcatcttcttcagcaactggggggggttatttatatagagcaagggtgagtacgggagtactcagcaagccaggggaaataagtgtttaatgcaggcttcaaggaaaggctgttgtttttgcaattgattttatttgaactcttttctaaaagcaactaagtgagtgcttctcaaacgacacggatgagacagtgcgtctcgtccggtcggggtatgtgcaatgtatcagtctttagatcttgaaacagggctggcacccggccaacagcttttcaaacggccacccgggccaacaacttttcaaacggccacccgggcctagctgatcccgtcagctgctgattttccaaacatcgaacccagtttcacaacagcaatttcacaagcagtagtcaaacaaaactacgctaggaatcacctcacatccgccgatgaccgtgggcacggctgttcgaacagtttgttaacctctgcagagggggtacactttacccacacgacattactaacccggatcacccagcccgtggggatcagccacgtcgggagacctgcaagctttcatgacaaggcatttcgaaagccgatacaggtttaccatatgccgacgagaggggtcccagaccaacaacaggttaggtcccagaccatactgtgccaggaagcccaggggtcctccccgacaccaccccggcgaatccacatgtctctcggcatcaaggctcccctgataagctagttactcagccaggggtgtcccattccacccatgtggtcgtacttgtcttatgtttggatgaaattccaaggaatcggtccttaagtgcgagagcgggaaaccgtacactcggtgcgttccccggtccgcggttttggaaattcatttagttcgcaagcaccgacccaggtgtcgggttttccaagtcttttgtaaaactccagttttacccaagttgttactcagatttttaagtttgaaggcgaccgtcgatattcgcacagagtgcacgaatatcgaggcgcaactggtcggttacgaggggacgtagtgtaacaattaacaacggaaggatcaaatgcaacaagttaggtaagtccgccaatctgccttgcagacgggacaacagatttagtgtgatcctatcaatgcataatattttgcaagcaatataattaaatttcaaatataggctcaagatgttcaaaggtggcttgccttgctccagatctggagcttgatcctcgaaatcctcgcactgcgggtcttcgggctccgaaactacacgcgaaacgggataactcaacaaacggcgaaaataaagccctattaatgacctctaagcgtgccactagacagatctcgagatttgggaaattttggaagttgaacggagtcaaacggatttacggttgggaagatattgaatttctaggattattgaatttttgatctaaaggaaaaggatttaattaaatcctttttggaaaagaaaaggaagagggaggagaagtagacttttctcgggcggctagggcgctgcccaagggaaatggagcggaccggccgatctcaa

SEQ ID NO: 2338 - DNA, 2702 bp, Oryza sativa
tttttgattgccaggcctgaagcgcctttgtaataatgtaaatattatcgatataataaagaagtgtcttttatatcatgtttgtgtggtgtaccccggcttttcctgggacggggattaatacactagcgttcgggaaaagcaaattttctcggtcgcgacaaacgggtacttgttatttatagttacttcattcagggctctatagtcgattaccattctctcagagccatcctttttcttaaccagaagcactggggctccccaaggggatgagctaggtcgcacataacctttactctccaactcttcgatttgtcttttgacttctgctaactcattagctgccattcggtagggtctttttgcaattggagctgtgcctggtgccagttctatggcgaactcgatctctcggtctggtggcattcttgttaattcttccggaaatacgtcgggatattcacagactatgggcaccgactccaaggaggtgacttgtaaacaggttaggatagactgacttgcggtaggggtgttaggggtaaagcggacttgctttcctccaggtccttgcaaggtgatggacttttcggcacaatctatctgtcctttgtgcttagccaaccaatccatccctaggatgatgtccaagctttgcgagtctaggactatcggtttggctaggaagtcaacttcctcaattctaaggttaacttccgggcatatttgagttgcccttatattccttccaggggaatgtactatcattggtacacgcaaattttgggttttccaaccatttcttttcacaaaagcttgcgatatgaaagaatgggaagctcccgaatcaaacagaactattgcgggtacggagttgacagagaacatacccatcacaacgtctggagcatcctgggcggtttcagcttggatgtgattcacgcggcctcgaccaatgttgttggaagcacgtgaaccttgtccacttgcctgagagcttggacgagactgagctgccgctggagtaggagttttggcagtgctgccattagcatgtcctgagttggtgttggtaggattctgaggacactgtctaacatagtgacccatctggttgcaccggaaacactgaactgctgacggtccctgcggtgatttgaaagaggtaacactgttaggcgcagtattgccactaggggcatgcttctgtggctgaggtgccggacggtttatctgaggacgaggggcgtagcctggctggtggttagcctgagtgaccgactgatggtattgcatgggttgaccgtagcgagggcgaggtgcgcctcgggaagaatttccctgatggttagacttgcgcttcttgtattcttcggtggcctcttttctggcatcctcaagtagaagtgccttgttgatcatgtgttgaaaggtggggaagtcatgagcaatcaactggagtctcattccaactgcgattcctttcaagaatttcctgatcttcttcttgtctgtgtccacttcctcaggggcgtaccgagccaacttgttgaactgacttaggtactcattgacactgctgttgccttgcttaagtctgttgaattcttctttcttcatgtcaatagtgctttcaggcacgtgagctgcacggaaagccgtagcgaactcatcccaagcaatgttagtgggttcagggtgtgcattgcagtaattctccgaccaatctgcggcaggtcctcttagctggtgagaggcgtagagcgtcttctcaacaggagtacactgcactaagttgagttttctatcaacatctttcaaccaatcgtcagcctcgacgggctcgatggtctgagagaactctggcggacgagacctcagaaagtctgtcagcttggatctgttgttgcccatgtgagggtggccatttccatgcgcattatgctgaaaactggctatggctgtggttagtccttgcaagatttgtgtctgaactgccattaagtgttgcatgttggtttccacatgaggtggggaagggaggcgttcttctccagaattgtgactggcagtgcggtgagagcggtgagactgttccatctctgcatcacgggaaactgtgcgatgcgagcggttgctgcggcggggttgctcaacctctgcgttgcgggaaacagtacggtgcgaactattgctgtggtgtgactgttcattagccgactcatgattttcttctggctcaactctaccatcctcaaaaccaaagcgggctggtgcacgagctgcacggcggggacggctagccatctaaactcccagaagagggcggggtaagagtcagataagcacttaggagggcaaggagcaaagcaaatagcaactcagatagcacacactaggcataaactggatttttcaaatcataaaaacacctgatacaacgggtgtggacaagtcacagagctacgccgagcttgactgtgcgcacaccacctaggagaaccagactaccaaacaacacccacaacaaacacacgcacgcactacctcgccacgactccaaaagagttggcggcggaacaaaagggcctaacacacggacggctgctgaagactgcctcctctactcctcgtcggcctggctgcctcctgaagtcggctcctcagtcgaagaaacgtcgatcggctggcgcaaaggg

SEQ ID NO: 2339 - DNA, 10863 bp, Oryza sativa
ctattgttctcagagcaactctatgatatgggtgtcgcttcttgaatagtgatctaaatttgttctgtaaatttgatcaagattgacactgctttggagcaaggggtggatgctgtgagaactcttgtgttgaagggttttagtggaagtattgagagattcaatctggttcagaagtacaagttccacagtgtttgagaattattaagaggcttggatatacttgctgaggacgcataaatacgcatcatcaatatcattggaagtgtcggacgtggtactttgcacaatctacgtaagtgcactaagttgcttctgcagtatcctataattttgaggatgctaagaaacttgcagggtgtatataggtagagtacttttgcattctttccttagagcaattttcattagagaggtagttgtgacctctaattttgttcatatgtaagctacttattaagtataagaggtagcatatacaatacaccacctctacactagctttattacactaaccccaataatctaaaagtattttcattttatttgtttgtttaatctactcttctcttttcatatagagcttatgtagagattgccccttgagtgaggggtggctcctcctatccctcttctcttctctccctcacctcatcatgtgagccaacatgcaatcttggggcaagtgcttaggggtttattttaattgctcttaagaacacaaattgtttactcaaattggaagctaaatatgttattttgacaaagtctagaattacttgtcacttctgtaggttaatgacgaagacactttagtgatgtaaaagaggaaagagtctttccttctcctgcttcctaaatctctgattttatcatgcaaataaatgtagctgtctttgttggagtggatcatctgcctgcaaagtgatcgtataggtgtttttattactccggccgtacaactcattttcatcaacttgatgtggtaaagttgtttagtagtctggcatgttatatatagacttatagttatacatgtctatgccctgatgttatcttgtcattaagaaacttaaggagatccttagcaaatctttgataaggacttgatattgaatattgttttctattttcttgtgctgatatgtcagtctgaactcgtgagggtgagtatgggcagaaaattttctttgccatgtaaaagttatctcaacttctcgcatcagttaacctacagtactatctagaataagagtcaagctgatttaaccctctactgttcagggctaatctgtaacttttggtgattaaatgccacctgcagctctcttgcaacctattatctagcttagcttaataaaaaactaggtctagaacattgcgatatgtgataatttaaggaggcgacatctgttaggctttggttaatctattttcaagtgatgacaggatcctctgggtattagagtacatgaagatggtgattataattgtatcaccttctgctttcatgccttgtttccctattctcactttgtttctgcagtcatcctatacttatatctgtgcatgctaatatgctaccaaatgtgcacaaagccacaaaatatactgaaggcagttgtttacctcttaacatggggccatatattttttagtaccatgaaatgcaaacaataatctgatgcgaacatccataacactaaaatcgcatcatattgttttcctttttgtgttttttggtggctggtaccatgagcatgaaaaatatcatttgtttgtcagtttttataaattctatttttttttctgtggtatactttctaacaataagaaaggcagtgagggagcaatgggtgaggagagcatcatatagtagagactgaggatacatggagttgagcaagaaggctaatagtttttctttttttctaaggtggaatgccatgtgggctagctctgtccagcatgcgtgattgttatcatttgatgaggcatttaacacacttatcccacacacttgcagtaagtattttttctgccttaaatggttgcttgattaaatttatggttatgcattgcattgtctggcattgcaagtgtgtgaaagctaaagaaataagcatgcaccccttcaaaaataaaatgcaaaagctgttgggttcttcattcatattcggtgaagagatgcaaatcaaattttaaaaaaatcatcgatgttgagttactattatacattggtccaaaatacccgtgttttagtaacaatttgtaagctgctacttcctccttttaacatttctagatcatcacttaaaatatcttgtgaaagaaccatctagaggtgaatgtctcatgaagtggaaattctatcttatgatgatccaaatgtgttcgtttcttgctggcttaaaaacaaagtgtaacattaacttaatcagttctttttactagtacatcaaagtgaaaatggaaagaactagtccaagtgcagtactacctatgttccagaaaagctagagataacttgtggtgtgatattaccaataaggcaataaccaccaggtgatttgtctaatacatcacaaagatacgatatttgtcaaaggcttagttttgaccttggtttaaagaccaaaaagcattagtctaattacctcacttccactactttctgctaggaaaattccctccgcctaattcttttctaaccaccaagtggattccaaagttttaaagattatattatctaaagctctttcctccaccatcacgttacctaaactacttgctaatccttttcttaaagccatcacagaagtagggtatggagtaatcatacatctaatccatgtgcatccatctgttgatcactcgctcacagaggcgcattagatttaccaagtgtcgtgattgtagctgtatatattagcttaattcacgggctatgctggatccctgttttaaatattttctgctgtgacgattaatcctagtgcttggttaagctttggacattctagattataagattttgttctaggtgtttctttaatccctcattgcataattaagtatactggagaatcacttcacatgactttaagtgaaatccacccaatctcaagtacttatttttatggagtaggtaatgtcacttggcatactagaacatagtttatagtccttgctcacactgcctgggtttattaactagctttgaaacttattcttaaggaagatatcaaacccaattattaagccaaaccattctttaatcccccgtggtggcccaaaaagcacttgtggagaaaataaagagatatggttactaacttgagtgttatatatacacgcatttatatatatatatatttcctaggagcaaaatgggtgaggtcatccaggggattaaactatgtgctaaacttgtcatcatgagcccaaaagaaggattttcctttgagagcacaacttggtgcgggccccttatgggattcgggtgatcttaaatgttgccaactttgtgcttgcaatcaactaacaaaaatgttggggatgtgaccaggagcctttgttgaggcaacacaacaaacaacaaaaacatgggacctagtgtgtctagcttgtaatcaagcggcaagtgacatgcattgtatcttatcagcacccgtcaaggctactgagtggtgttttcctgctgctgtgattaaatgcttaaatgaatggttcacatgtgttaggtgctccatggagtaaggtgccgtgactgccgtctagggaagccttgtgcaagccatacaaggcagtggcaagctttcttatctcctttttatagccttgtttctgagcattattgcagtagctttgtagaagatatttggatcaaaactatattttttctgtttgtataattggatagtcaacttgatagattttattttctagttgcaaataaggctctgtattatattagagaagcaaatatgcataaccagctaagagtgccacaggagaactatacgagagccaagagtgcataatttgtgttttcttttccttgagggttagagaatgtgtagatgaggtgctcagtgcactgcaatgcaaggtggagaccactgtagcagaaaaagctattgacctatgcaacacccaaatgaagttgtcccttgttggataacctctaatctttaattggtgggacactcagatgattcaatgaccttatgcttgtttttggtcataaactaggaaatagtaagtggaacgacaaaaggaaacgggtacatgcattttattccctacattttagataggacataatcaaataaagggagataatattgacatgtacagagatacatgtaggaactcctcttattgtgttcctaaaaccaaacctgtctaaaaccctaaaagaacctgtctaaaaccaaacctggaggttcatgacaataacacaattgttaaactatataaaattatatccagagcttatgtttgaattcaatcctgagataatgctttctagcaccgttttcatattacaatgattacttacacttctgggatcaaatcttaataatttgagtaaagatgaatgtaactgtaatactattttattaactcaacttgcaaaatatgatcaagtgcatctgcatgttatgatcaagtggattttttagttaactatcttgccgagtcatcaaaaacctgaacctcatcatacaatgcatgtgcatttgctggtcgactagaatgcatattagattctttgcaagcataaacaattcatattagtgaaggagaacttgcatattaaaagaaaagaccatgtgctttgctgcaacctgcagtctgcaaggaaagcattttggatggcttgccttccaaccgtccaagcttctttcagacaattcctcctggaataaaacatgttagatattccgaaagtagttggtgtctttatggggtcctagaattgctcatcctataaggaagctcagagtatggaaggacacaggacaagtagatgaggacttttgaagttaaagaagccaaagtttctttatagaacgtagcaacttggctcctctacatttttgtattttgctagaatagtcactagcttgggggatgggttagaatcagtcctaacaagttaacttttactgctctcttcttgttcgatccatacatgggagatgaatatttttggctcaagttctgtcctatgagattggatggttgatcataatgaatatgtattttttttgttccactttaaattattagatacgttacagtcctttaaaatgatattatggtttgtggaactagctacatttcttcagattcatggaaaaagtagttactgtaacttgactaaaacggtgtttgtttggacaaatttattgataactgactattaaaaattagatggttggacaaatggacatatcattgagatcgaacctagctaatatgccttctatgtcaaggcaattggtattcatttcatgtcatctttcccagttgctccctgtagagtgaaggggtctcaaaatcagaagaaggtttgaaatgaaatatgactagatctgactgaaaggaacacttcaaccactctgttttgggtatctgacaggaaaattactgtagtagataagaacccaaacaggtttagtgttcctaataattcaaattggacctgtacaggagtaggatctatctcaattatagcatgcatggtggtcacatgtgtacaactttccttcctcacatcattgcttttctgaaatgtgcatcatattgtgtaatattgttgatgttttttatgctttccatgcattagcttacaggctagaaaacaatcttttctatttttcttctctgtttcaggacagtcatcttaggaattcacgtgaattggtacctcatttggcatattaattacactgttcttcgtaatctagaaacttgaaacgattgagctgctgggttacaagttaatagaattgtttactaggagatcctatacattgattgaattagataggtgattagtctagatcctccaattatttagaaacaaaaactccctcgtccatctgttcaaaaaactgtaatcacaatatgaactcgtgccgtgtaaaataattcacaaagaagcttgcttagtttttgtcggtaaacggtcttgagctcattgtaagccgataattatgcatgatgtgagtaattattggctcttacaggaatattcatgagctttggttattgaatgcttgtctagatatgtagcaccgtttacaaaatggatcaactggggagcaagggaagattcaatgcatgtgatgtttcttatgtagcgtctgctagtctgaattagaatctaggaactgttactagctatgtatatcaaaagtttatcatctatctattacatatatttgttggttagttttgtacagaatattagtttaggttacaggtgtcaatatcaaataaaaggcagctttgttgaaatgaaatgggctatcaggttaactgattcataagaacctatggacgcttattaaatgattctttgactctacatttgttgtggatggaggctgtttagaataaaaaagggtacggacatatatactttatggtcaccaatgcaatcaagtatttgatcaacttgtctaacctgaaacaattaaattaagctgaaggtccatgatctaagcataggtagaaactacagagtaaaaaacgaaatggatcagattaaagccaccttaggtgacagctatataaccaccactcctctatgtgaaactactgataatatattgaagatatcgtcatttctttaataacagcacttgctacctcaaagctcatgttttggtatttgaaagggatagaaagaaaggaactgaggggagctgagtttaggggacagggtgggccttgtttagaagttggagaaagactttagaaagagaggagataagtagggaatttgggagtgaaagatacatagaacctttcttggatggtggaggcgagattatgttagagaaaaaaagatgcagaattctagctttctctggggttagtaggatttggggagatttctttacaaccgggttgaagcaaaagtctaaccaaaaaggttgctgatttgaacttgagacgcaggagattctgggcttgatatacagcccccaattagtttagctgtgtgaaaacacgtactgtattaagataaaaggcaatctctgcgcactagttacaattgtgacttataaaggcttgcacacacacatgatctgatcctcctggatgctgcaaaagttgcaatgtgtatatagtgaatgcatggcaattccttcctccttttgattgtaagtcaaacatgatttcttctaacaaggtagttcaactttacaagtgccagtgacctctcaggagttgtcttttctctacaaatgacgcctatggcaagtacaaagacaagaaaacccaccgcatcagctgagcttttaagtacatgtttttcttgtaagacatgactgatccaatgttcaggtaaaagaattactaaagatgttagtaaagcaaacgtacaagaatatcagatgactgttcttgaagagttgtaggatgatctagcatagcctggtgcttaattactaacctgcaccagcattctactcaattacatcataatactgtggtagtgcataactgtgcaaattatgacatacaaaataagatcgtattctaattgacatggattccgcttcttattttactttatagatcaatttcttgaaattgccttttatatttcgatgatcccagcttccgttgctgattaattcccactcatagtagtacaccaagtggaactcttttcacttgagtagactagcaataattgaacaaatcttaatgcttcattacttaaattaataatgtgaaatgttggggaaaatataactagctaggttggcaaaatatattttccattttatcgtgcctcttttatttccccttttgcaaagtttttcttctgcattgtgttccttttttgtgattaagcttaaatttctgccagataaaaacagatacattccgaacactgggaacataattgcgtcaattcttgtccttgccacttttcctgcaacattgtttattattgtgatggaatatatgtttaatgcttgctgcaagaaaattccaagtgcgtctcaatgtgcgttcctagtgacataaaatgcggtgaggacgaagctgtgcctgcatgtgcgctcatgagctaatcagtgaatattcttatttggttgatcgtatctcaatggtttatagaaagcgattaacaagtttttcgagctgtggagtggtaaattgcatctagatgaaacgaagagaacaaaataacttttttgtgtacgtatatgaagtaaattgaacagataatccctactgtttagagcatgcaactgtgcaaatgcctgttgaaatcaagctagagaaatacagctacaaatctacaagttaagctaaagggttattatttcgaactactctggttgtcggtgatttgagctttgaagttgttgattgcttaccatccgttattaatttgtttgtgcttgttgatttgcttgatacaactatgaattgtaagttgatttaggtgctcgaggaagttgctcctgcggctttaatccgttgaatgacgttggatttcttagcacttgcgcttcttccaattttgtattttattaatcagtttcttggaagagcaataaatgttattctgtcgcctggtggaatcatatatagacccccacttagccgctaatagcgattgactatacaagccatttcatattggcagtattacactgggatctatattctactctgttttttatagccttaaaagaaaacatattgttcataccttttccgtacgcaaacacgaatatacatgcatgctagctagggctgattttatggctagaatatttttatgatgtaggagtacttcattttatttgtgaaagaaaatcatgttgaaagttttcttttcttgacgaatatctatatattgttctgcagagacataatattgattccagggatgggactcaaaggcgattctttgccgaggtcatccatcatcatgataggaattgaaagctatagcccacacaacggaacaaaacggagcaaatacgtacgtacatcagtacatgtacatttcctacgtacgtactactgctatactcttctgcatcatatacatttctacatggagaattttaaaaagcatatagtccaaccccaacacgcatgagcattgcaactttagtttgtactctacacgcgcagatcgaataagttgaacaatcgggtataatttagcttagctaagtggcacccacttaattaattagctctcctgcacatgcatggtccctcactgatctcttatctctttctacatacatcgatcgagccataatacaaggcaaattaagatatttaatacatagacacagttatatataagtacaaaagcgccgtaacaaccaggaacccttgaataaaattatattgtattccgttgcctctcctctacacaacaccgcgactctatcggtataaactatttgcattacgtacacaaaacaacataattgagcatccggctgcatgcatcggtcgatccagctttgattaagaaatgagccctagtacgtattagttggccacagacctaagctacatgcctacaaagatatacatatagtactcatatatatatttatttatatatctaaatatcctatcatgcgtgtgcctctagccccggtagtaattaacaaatcaacgaggaagacgagcacataaaatagtgcaacatggagccgagacaagcgcaatctagacctcgacctgtctcttgtgacctctgtgtgtgtgttgcttctcctgttcatcacaagtactccaactcatactactactaatctctctctctttcctactttgcatcgatcgtccctctccctctaaagtgcaagaggccgggatataatattgtgtacatgctgcatgtattcaaatcattcacctgcctagctatgagctccatgatatatccattctcgcctgtgcaaatcctgcagctccaggtcttatatatactgccccttctcacctgacacagctccaacccatgcacatccatccaacttaatttgacagcaactcactgcagcttagctctctttctctcttagttctcttcttctgtagcaagtaccaccagtgccaagcttctacagtgtgctgctcgctagctactcgtctttgcagccatgagcatgacgagccccaggctaaagctcttcggcttcgacgtctccgaggaggagacggcggagcacgaggagcagtactcggctgagccggagagcgcgccggtctgcgggggcaacggtggcggcggagccgtcggctcggactcgtcctcgtcgtctactacgaccaccacgacggccacggccggcggcgacgggcggaggtacgagtgccagtactgctgccgcgagttcgccaactcgcaggcgctcggcggccaccagaacgcgcacaagaaggagcggcagcagctcaagcgggcgcagctgcaggcggcggccgcggccgccggccgtgtcgcgggcggcgccgccgcgctctacccgcgcgccaacccgatggtctccgccttcgctccgaccccccacctcctcggcggcggcgaggcggggcccaccagctgggtctacttctccccgcgcg

SEQ ID NO: 2340 - DNA, 1026 bp, Oryza sativa
aggaggaaggaaggttatttttaggtttttctttttactaaactttgataattgtttttgttgcttaataattatttccggtgctctgaaaattcaagtaaaatttgagggctccttttaaaccaaggagaatttaacaaaaattctctgggccacattcgaatttttcttgtacgtattttagtgtttgccaatttcttttcgaattttaattaattctattattccttttagaaaataatttttattttgggatgaatttatcaggacgtgacaccgttgccacggattgacgatttattcgatcaacttaaaggagcaagagttttctcaaaaattgacttgaggtcaggttaccaccaattgaaaatcaggtctgaagatatcccgaagaccgctttctcaacgcgttatggtctatatgagttcacagttatgtccttcggactcaccaatgctccagcattcttcatgaacttaatgaacaaaatctttatggaatacctggaccagtttgtcgtggtgttcatcgatgacatcctgatatactccaagagcgaggaggaacatgctgaacacctgaggctgataatggaaaagctcagagatcatcaactattcgctaaattctcgaaatgcgaattctggttagaccgagtagcatttcttggacacgtaatctcctccaacggtgtcgaagtagatcccagcaaggttgaagctgtacttgcttggaacccgcccaagaatgtgtcagagattcgcagcttccttggcttagcgggatattatcgaagattcattgaaggattctctaagctagccagacctatgaccgagctgttaaggaaggaaaagaaatttcaatggtctgcagcctgtgaagacagctttcaagaaatgaagaaaaggttgaccactgccccagttcttaccttgccagatatccaaaagatttcgagatcttctgtgacgcatcaagacaaggcttaggatgtgtcctaatgcaagaacgaaaggttgtgg

SEQ ID NO: 2341 - DNA, 9941 bp, Oryza sativa
tgtagggcttggtatcggttccgtcatttggtccgcggcaactggagagaaagacttaggcggaggttcaaatttcctgtcagtacacatgctctacatttatatttctccgattcaaattaatacatacaagtgtatattaattagatctcacgccgttaatttgtcatttatttgtagtgcgcaaagcaaaagcagggaactaatttgtgcggctactacgtgtgcgagtattgccactgccttgcagaccaaatcatcaccacaagagagctcgatgtacgtacaaataaattcaaaatttcattacgtaacaatttcttgtttaattactaatcaatttcatacattcatatagtttattcgcatgagggataacctgaccacacacaaggaatttatcgcggcggttcaagaacaactcatgggattcatcaacgaagaaatccttgatcccaagggtaaattctactacgacggaaacacaattcaccggtccttaatcgtagctagctaggacatataatggattgtaattaatacatgactacatatgtttctatatgcatgtgtacacattttctataatgtaaatatattttggtcatatatatatacacacacacacacatatgcatttgcataacatatatatgtatatatacatatatattatgcatatacatatctactgaaccatatatacatataatataatatatatatatatatatatatatatatatatatatatgcatatatatgtattgaaacatatatatgcatggtttatatatatatataaaccacgcagcaacagggccatgaaaaaaaaaggtcagctcgatctttagggactaaagatggctcagccacgtggctgagccatctgttaccaaccgggattaaagatcgatctttagtcccggttattttacccgggactaaagatagcgatctttaatcccggattggtactcccggcttggaaatcgggactaaaggagggttactaaccgggactataaagggtttctccaccagtggtatagacatagttgagcggctgtatatgatcttacgacttgtttagcctctgaaatgtcgatggtttgcagcatgaatacacacatgaggttgttgcctttgttatgtttgcatatggacatatggttgtttcggcactaatcaaaactccgcgtgtatataataatattgtaccgttgattactgattactctgactaacgagtccgtgaccactgatttgcttgcacggcccactttgcttacttctctcgatctattattttgacattctcctcgtcagatcgaatcaacatgctcgccgggtagctggggtcgttcactttgaacctacgaaattaaattaacggtgtgtgtgtatgcctgtattcctacatgtagagagttcggtttgcttacctaacaatctactacaggcctctctctctgtggccaaagaataggcaggcatccatcgatcactggttaatttctacgtgcgaaactagggacgctgcacacagattcactgacaaatatcaactaattccaacatttcgaaccatccttctgaatttcacaaaatcaaattaaattagtaggataatgctggccataatggttacaggctcacagctgctccctgagaccatgaaggcaggaggtctttgcaatcctgccaaagcttgcttgctttgctaattatttaccctagcaaagggcccaaagtcgcaattgaggtgtacgtttcaatatgcaactattcctgtcacgagaggacaatggatcagctacagtagatagcttggtttggctgctatggttgcctactgatctactgctactcgcgccgccgtattcgcgtatggttgctttcagtatttcgcttgttcacgcgcatgcatatagcaggtataaccaaagacaaaaactgccatgcgttgtgttccgtcagaaaagaaaacaatgtctccaattcagatacagagatccatccacagataagaaaagagaagtcattttaatttgctgatgaactaatgttcttttgttctctaattcctcactatgaaatatatattatgcagttgatcagtttatcactgctaattctttatatatcccacttccatctgatgcttgtgtgcatctatgatgcagaggccagatgtgttatactcttccatttttctaaaaagtttgttaagcaaccgattgatctgctccctctttctgccttcctatggggtgtagccaacttattctaattaagctagtattctcaatggacaaattctattctatgtatgtgtatattgcactgtgagttgagtgctgattagtacctctgacctgagtccaatgatttgcaaagcgggtccttgttattgttttgtccctaattctgtacgattttactatttgttagtcaccatcaacagggtctatcgtgttccttgattttggtttttgcacttatttaattgcaccgcaaatggtgtgtacgtaaaccatctagtcctctgtctttctgaacttctctgaagataagagatttgtctttctctgaagacacgaaccacacgctatataggcaaaacataactgaaaaagtagtcgtccataggcatattcagttagtgaaagtgaaactaggaacattgcccacagattcaccaacaaccattgccaacttttggaagagctagcattcttacctgacgtgcaactcagattctttgacgacggataaccttattgttctaatttatttgaaattaacggtagctaactgatcaaatcatggatagatatgtacttgtttgtacaaatagtacatgcgtatatctgtgtatcttcgatcgctgcaaccaattccacgtttgtcgaacatttttgtggcaacttgcatgttacttgtatccaatgatatatatgccaaacagctaagaataattgaataatgtgaattggaacgccggatctgctacagattcgatccaattggcaacaaagtcgatggaaaaatgcagtagaatgtcaacgaatcctgcgttttcattggatcttaacagctttgatcaggctatacattgtacatgcctagattaagtttttttgcttttcaacaaaagaatcttcatcagaacacaccatgtcacaccatctatcacaccaagttgctagtggctagctagctagtagcacgctgtgcaagaacaattataattagtgcatgcctgttgtaaaatagtgagagtagttaggaggtaattgatcgatccttgacttcttaatgcatattattggtatgatagtggaaatgtgcagtcctttagtctcatgggttgatcagggggaggtgtaacgtgattgatgttaattagagcttactattggtagtaggtaccaatctggccagcttaataattgttatcaacattatgtttgatcatgtaccatgtagtatataatgtagtattatactatcaacgtgctcatagctgccacatgtgtagtgcacaaatgcagtacgatgtgtgactactgtaaatatgtaatgtttgctgaaacaacgccaagatcactggctcacgcatgttaattctccaagtagctactactagtagtactttaaagtttgaacaattcaacggttgttcttcggttgatgagacaggcatggttgattgatgtgtggacaaagctgacaaggaataggacaaagtaatcagtatcagtaactaagaaactgttcaaatggagatggaccagctggtgtacatatgtgttcaagtgttgaccatacatctcagagagcttaattagttgggtttgcatccggcatccctagctctgaatttaaaatggcctgtgtgtagaagctctcatgcagcttgctagaatgcacagcttatttttttcagtttgtttaattagtttaggttgggttggccgtctccaactaactattcagcttgttgcgtcgtcggtcgatcgatccatccatccatccatctcgctgtcctgcacgtttagacgtttacttactcagtctcatcctataaatacatgcccatctcagattgccaagatcatcatcagtcgtgtgtctctcgtgtgttagccacacgccactgtctaattgtctattatcctttgcatgcccctctccagctgcttcatctgttcgtccacaagcaactaaggtgagatatatacgtagtgattaaccagtaattaatcagctagcagtagtgcagtacattgattacatcagtttgctgcatgattacaaatgatttgattttgggtgcagatgatgggtgagaatcgagcgagggtcgtggcgttggtggtggctgtagtggtggtcgtcgttggtgtcgccggcaatgtcgcggcggcgcaggcggcggtgacggtggcggacctgcagagggtggccgggtcgctgcagatgtacgtggacgcgctgccgcagatggccaagatccgtggctatggattccagcgcggccaagccgtgcccatcaacctcaccatcggcatgtaccagaagacctgggtacgttaattagctgcacttaggagcactaattgcgtactcatatatgcaactcaacacttaatttgacctctggggattagcttcaaatcttcaaggagtactaattttgtagcagaaatgattggtagtacatttttggtcggcacaaatttggggcgaatgccttttttttctttttcgaaacagaagaaaacaaattagtactttgatcatgtcgtcggtggtgcctactagctcaaataattggttttagcccaaacagccaatccaggtcacatcaattcatgattagttagttagacttgagtgatgcaagtacagtattcccaaaatgcatgtgttaggctagcttcacacagtaggattattctaatcagggtcgatatgacaatacaattaatgcattgaatcaattaattgaacagtaaaataaataaaaaataataaaaaatgggatggttgcatgatgcatgcagaaattccaccgcgacctgccggcgacgccggtgttcgtgtacgggcagtgcccggactcggcgacgttcccggggccgacgatcatggcgcggcacgacgtgccgctgttcgtgaggtgggagaaccacctcccggcgtcgcacatccttccgtgggaccccaccgtccccaccgccatccccaagaacggcggcgtccccaccgtcgtccacctccacggcagcgcccacccgccgcagtccgacggcagcgccttcgcctggttcaccgccggcttcgccgagaagggacccgcctggacccaggccacctaccgctaccccaacgtccagcctccgggcaacctctggtaccacgaccacgccctcggcctcacccgcgccaacctcctcgccggcctcctcggcgcctacgtcatcgagaagcccgaggtggacacccccatggacctcccctgcgacgacgacgaccttcacctcgtcatcgccgaccggagcttcaacgtcgacggctcgctctacatgaactccaccggcgtcgcgcccaacatccacccgcaatgggcgccggagtacttcggcgaggccatcaccgtcaacggcaaggcgtggccgttcctcgtcgtccaccgccgccgctaccgcctccgcatcctcaacgccagcaacgcccgctacttcaacgtctccctctccaacggcctccccatccacgtcgtcggctccgacgcgtcctacctctccgcgccggtcaccgtctccaacctcctcctctccccggccgagatcttcgacgtcgtcgtcgacttctcccagtcgccgacggccgagatcgagctgctcaactcggcgccctacccgttccccaccggcgccgcccccggcccgctcaacggcaaggtgatgaagttcatcgtccagccgaacgggccgctcgacccgccggacaactcgacggtgccggaccacgaggtgccgtacgcgagcgtgacggcgctgccgccgacgacgatgacgaggtacatcgtgatgtacgagtacctgacgccgacggggcagtcgacgcacctctacatcaacgggctccgcctggaggacccggtgacggagacgcccaagtccggcacgacggagctgtggcaggtgatcaacctcaccggcgacaaccacccgctgcacatccacctggggatgttccaggcggtgaagatgcagcagctcgtcaacctgcaggccttcaccgactgcatgacggcggtcaacgacgcggtcaagtgcaacgtcgaccagcacgccgtcggccccgtcgtgccggtgccggaccacgagaagacgtggaagaacgtcatcaaggtgcccccgggcttcgtcacctcggtggtcatcgccttcaagctcgtcgacaccaaccagacctaccccttcgacaccaccgccgagccgggatacgtctaccattgccacgtaagcgccacgttaaatgccacgtgtctatcttactgggttaattttttttctaatcgaatttatatgttctaatgtgatttgatgtgcagatcttggatcacgaagacaatgccatgatcaggccactcaagttgcttgcatgaacacgataaaacacggtgctgacattgacgagatgatcaagatgcctcaccaggatcaataattcgaggatttccatttgcgtgggaaaagagatatatatatatatatatatatatatatatatatatatatatatatatatatattatgttatttaaatttatatttattcaattcattctgtgtgtgtcttatatggttcttatggcgtcgatgattgatcgaggggtacatgtttgtaatccgcttgattcttcgaagtgaaaagtataatatatacgtcattcatttttatctcactcggctgttcctgaattgaattctctctgttttccattatcgtatatatgcagtcaatgctgcctccttatgctcaatatgagatggattataagaaaatctagataggaagtagtagttcgaactccaaacttcaagtttctcgttttcttttagtaaatatttcaaactgttaaatagtatatttattgtaaattttttctatatagaaactgttttaaaatttcaaataaatctatttttaagtttataatagttaatatttaattaagcatatgctaataagtattttcgattcgcaatgcagtgtgattaaaaatcggttcatacgatcgtataatctccattgaactgttgcgtcgggatgtgtaaatgctcgatatcaacatgtaacgaacaaaataagctgatcggtcactgaattgttcagtcattacttcacaggcttgagtcgtcgcattgctcattactttcgtgtttcaccaaaatcttttaatgttctttctatatttcccatgttcttaagaaataactaattaatgaaggcatccgccgacattttataatcttgaaagcaacaactcattgaaatgatgagctaatacatatatgcctttttcagttttctctatgtatatgagctaaacggggttcagttaatcacatggctccaaaggcccatgtgattgtgtcagggcccaagtgctggaccgatatattgattgactgttgggcttggcccatacccgcaagagggaggcccacaagatttgctatagcacgcacgcgggccgccgcgcgtccattgctggcagagttcattacatgggctccagtggcccatttgattgtttcaaggcccaactgctgggaacgtactgttcagagtgcggcagcaagggtgcgagcgctaaatagggcccaatagccatctcgatcccgtgaagcctgtggacctgtgggccgttatggaagggcttggctgttccggatgacttcaagggcccatcagcccagacgcggcacaggagaaggcccaccaagtgtgctcgtcttggtcctccgttactgattgcattctaagtttgaatagacttcaaatgttgtaaacttttataacttgtacctttttgaaattttaggactataaacaagttaaattattttgtattgtgtactatagaaacaaggtttacctgtaactttcaaaagattcatctgcaaagaccgtgtcacaattgccacatgacagaatcggcaggtcggccggcggaggaaacctccggccaaattttattatagggaaagggatcacaaaggcaaacgtacaacaaaagcacaaagcataggctatcctatccgaatggagacacccatgcatggccaccaacatgtaacaaatacccccatacaaatgcacgggttgacaactatagtaaaataacttggataacgcgataattaactttcacccaaacagaaatgctcataatttttaatcctggtgaggcatcttgatctcctcatgcatcaaccaccacgtacagtgtgcagtcttgttcatggaagcagcgtgagtggcctgatcatggcgttgtcttcgtgatccaggatctgcaaattacattagaaaataatttcgattagactatagagccactggataacctagtacttactctcctccaaaataagttaatatcacatctcatagaaggttaacttattttgaaatggagtaagcagtagaatggcatgcacgaaagtagcatgatgtggcgcttacgtggcagtgatagacgtatcccggcgccgccgtggcgtcgaaggggtagggcatgttgttgtggacgagcctgaacgccaccaccaccgacgtgacgtacgccggcgggatcttcacgacgttcttccacgtcttctcctcctccggcaccggctgcagggccccgacggcgtgctggtcgaggttgcaggcgaaggtgtcgttgtgcttcagcatgcagctcttgaaggtgtccgggtcgacgagctgcagcatctggacggcctggaactcggcgaggtggaggtgcagcgggtggttgtcgggggtgaggttgatcacgtgccacagctccgtcgtccccgatatcggcgtctccgtcggcggatcctccagccggagcccgttgatgtagaggttcatcgtcttggcggtgttcgggtcgttgctcgtcatgttctcgtacaggacgatgtacctcgtcttcatcgtcggcggcagcgccgtcaccttcgcgaacggcacaccgatctccggcaccaccgtcgagttttccggctcctgcatcggcatgtcgtcgccgacctgccacttggcggagacattgaacgccatcaccttcccgtcgagtgtcgcgttcgccggagtgccggtggggaacgggtagggcgccgagttgagcaactcgatgtcggtggcgttggggttcaccacgagggagaagtcgacgatgacgtcgaagatctcggccggggaaaggaggaggttggagacggtgaccgggcggaagaggtacgtcgcgtcggaggcgatgacggtgaaggggagaccattggagaacctgatgttgaggtacctcgcgttgctggcgttgaggatgcgaaggcggtagcggcggcgctggacggcttggaacggccacgccttgccgttgacggtgatgacctcgccgaagtactccggctgccactgcgggtggacggatggcacggcgccgacggtgtccatgaagatggtgccgtcgacgttgaacttgcggtcggcgatgacgaggtggaggtcgaactcgccggagggaaggttgaagggcatctcgagctcggcccactcgacgatgtagacgacgagaaggccggcgaggaggctggcgcgggtgaggccaagggcgtggtcgtggtaccagatgttgccgg

SEQ ID NO: 2342 - DNA, 1243 bp, Oryza sativa
ttaggtagtccgccaatctgcctgcagacgggccaacagatttagtgtgatcctatcaatgcataatattttgcaagcaatataattaaatttcaaatataggctcaagatgttcaaaggtggcttgccttgctccagatctggagcttgatcctcgaaatcctcgcactgcgggtcttcgggctccgaaactacacgcgaaacgggacaactcaacaaacggcgaaaataaagccctattaatgacctctaatcgtgccactagacagatctcgagatttgggaaattttggaagttgaacggagtcaaacggatttacggttgggaagatattgaatttctaggattattgaatttttgatctaaaggaaaaggatttaattaaatcctttttggaaaagaaaaggaagagggaggagaagtagacttctctcgggcggctagggcgcggcccaagggaaatggagcggaccggccgatctcaacgggccggccggcccaagacggcccaagcgcgcgcgcgcgggagggaggagagagagtccggtggaccgggctcacctcgtgcggtcccgggtgggacccgcttgtcagcggctcggctcaccgtgcggagggagtttgcggcgtacgcgcgcgggcggggctgggacgcggtgcacgcgcgcggttcgcggaggaacggatgcggcgggcccacgcgcagcctcacggttcaccgcggaccatgcgcacgggggaaagacggagggagcggctggccgggtcggctgatccggtcgcggccaaggtggcaccgacgtggcgcctacgtggcagccacgcgggctggcgggaggtagacgacgacgccggccggaacggacggcggacgacagcggcgagcggcggagcgactcacggtgattcgggcaaaagcgagcacaccgggcggttgcacgggacgaggggagacgagccaacggctcggatttgccgggggttgctcgacggcggcggattgcggcggcggcaaccggcggcgggagaaggggaaaacggcgacgaagctacgaggggtcgattcccggcggtgagagcatctacgcggccacgggaactcgacgctagcgtcggattgggcggaactacgccgagcgaggccggcgacgagcgggtgctacggagctcgggcggcgacggcggcaagcacacggcgagcgacggcaacggtcggggcggcgccggctaactacggggagt

SEQ ID NO: 2343 - DNA, 632 bp, Oryza sativa
cccaatggccggccctactcctcctccgccggaggaggagccctcctccccttccctgcgcctgcgctgcgcggtgcagcactacgagtggggccgacgcggggaggcctccctcgtcgcccgcctctccgacgccaacgccgacgaccacggccccgaccccgcgcgcccctacgccgagctgtggatgggcacgcacccctccgcgccctcctccctcctcgccgacggcctcctcagggactggctcgcgcgccaccccgccgcgctcggccccgccgtcgccgctcgctggggaggcgacctcccattcctcttcaaggttaggcgctaccaccatttgcttccttccaatctggttttgccgcgtcaaacactcgctctcccgtacgactcggcgacgctgactttggcgtgccacgcgcccacacctcctcgtgcaggttctgtcggtggccaaggcgctgtcgatccaggcgcacccggacaaggacctcgccgaggtgctgcacgcgctgcgtccggccacctacaaggacggcaaccacaagcccgagatggccatagccgtcaccgagttccgcgtcctctgcggctttgccggtatccaggtgcctgttcaaactcccaaa

SEQ ID NO: 2344 - DNA, 2373 bp, Oryza sativa
aggggtttggataccattttcctaggcacacgaaacctaaataggtactaacgcatgattaattaaatattaaaaagatcaaataatatattaatatgatactttcaaatgaactttcatattcttcttaaaaaaaacacacaatttaacgatttgggaagcgtgtgcagaaaatcaaaaagtgaaaactaaagagtggaagaaaataacacaccctagtgagttggatttttcgtggcacagaaacgatgcaagtaattaccatatgattaattaaatatcaattataacaaataaaaatgggtctatttagttttttaaaaaataagaaagcgtatttgtttagctaacagaaaatgagtaataagttgccaccatagactcactagtaacctcgtaggcgtgttcgcaggactgagaaaaaaaatcatatggccttttagttttaacacgtttgaaatgcgtggatatttaaatctttcctgtgaaccaaagcagatacgttgattcgaaacgaaaatgggctcgaatgctgcgacggattagtggcctgcctcaaacttgaatattgggagtattgggctgggtccaagtccaacacgtacatcgggatcccatcgcatcccgacctagccgactagttctgggctggttcattcctcgctatccaggtcgggcccaactaaatctaggcctgctgttcgggcctcaacaatattccggtccaatttactctggggcgtcactctggcgcaggacaccaacaattggtcatataccacggagtactactagccttgttacaaaatataagaaactttttttctttttaaaaaagtacattaatatgatttttttaaagtaattttcgtatataaatattttttaagaatttgggaaacgtacacaggagagacgagaaagtgagttaggaactactaccttcatctaggatcttaggacaatatatttggacataaggtatatctagatatattgtctaaggatgtatctcatcccatcttaaattgctacattctagatgaaggaaacacttaaaaaaagaacacaactgccaatcgacggagaaatttcagtcccaaaatctttcctgcttagatgagaataaaactttttagtccctatcatatcggatgtttgaacactaattataaatattaaacgtagattattaataaaaacccattctataaccctgcactaattcgcgagacgaatctattgagcctaattaatccatgattaggctatgtgatgctacagtaaacatacgcaaattatgaattaattatgcttaaaagatttgtcacgtgaattagctctcatttatataattagttttataatatgtagtctacgtttaatacttcaaattcagtccgatataacttggatggattaaagtttagtttatgtttaattccttttgtgttctcgtcttctctcgttggaacttttgtgtctatgcaccgttgaattgaattcttccgatctaccacaaccacgcgcagtcacacacaccggcagtccggcacaacgtatctgaccaaccgatcgatcgatctctgcaattggcctgaccgactacaccctggcgactcgacttggcgagtcacatgctgggatccctgtttcgccgcgcagcgagcgagccagcggtacaggcacattttcccatcgatcatcggtatcatctcggcgatcgatcgacggattttttacggcagcgagggtagcatctgcgtagcgtgacgacgcacaggttaccatggaggctactgcaggtggcgacgtcgctgagatgacccgagagaagggacaggccctctggccaacgacgtgaccgcacccgcaccgcaccggatcggaccaaacgagacgggacgtgcgtatataaggacctccacagcgacagtgtactaggagaggtgttgcctttttttaacggatagagtactccatttgtctcattttaattgacgtcattagttttcatgtctaactgaatggttcgtcttatttatcatctaataacaacacaatactaatcataaaaaaatttcaaataaaacggacaatcaaatttggacaaaaaaaaaactcatagttacagtgcgcttaaaataaaacagagggagtatatcataaggtcaaaaaggtaatttttcattaatattttaatctattttccaagttctttaaaaaagtacttaataagtacacttattttgacagagttctagtaaaattagcatatgtaatgatttattaatatatgatgaattaagtactattaacttaaaaaacttaaaaataaattaatatctattatattattaaaggaatagaaaa

SEQ ID NO: 2345 - DNA, 682 bp, Oryza sativa
cttcgtctacaagaaccacctcctcctcgctgctggtggtggtggtggtggtgacggtttcctcgctgctctcggaggcgaacccgtcctcgagccgcctcacgccaccgctgctgccttgccggtacagatcgatgcgggggttgggcttgtagtgcagaaaccgaggcctcggcgacaggtagttcgtcctgggatcgtacggagccgcaccctggtccgcctccgcggaagcagcgtcgtcgaaggccgtggcgtggtggtggttcttgcacgggggattctccaccctccgctcctcctccccgccgaacgagtgcctggagccggccgccgcggtgaccggcgtggatgcggcgggtggggcagtattgggcgccccatcgaacgagagccggaggcgtcgcggggcgcccgcctcggacgccatgggcttgacgggggacgaggccacggggtagagctgctgctgctcgttgcgctccccgagcaccttcttccttggcgaggccttggacgccgcggagatggtcggcgccatgaagttcttcgcggcgccggccgcggggcgagcgggcttgggcgccgccgccgccctcgccgccgcgtcgcgctgcccgctgttctccttctccgcgcaccacgacgcccgcggcgacgcgttcctgcacaccacggagct

SEQ ID NO: 2346 - DNA, 596 bp, Oryza sativa
acctaacctttttgtgcttctccttgatgacctggcattatctttctgaaggtagcagacgtttctgaagcagtacggcaatatgctgatgccgtaatgttatcggcagagtcagctataggtgcatatccccagaaagctctagcagtcctccgtgctgctagtgagaggatggaatcatggagccgtgaggaaaacatgcagaaacttcttccacaacatcagcttgcaatagctttgcctgataggatctcagagcaaatttgcaccagtgctgcagaaatgggtatttttctaattttcttgtttatacatcctttccagatatccactacctttttctttcgataagcaaatatatattacctttttataatatcatctgatattcgctcatggttactctccctgcagcaaacaaccttgcggtggatgccatctttgtttacacaaagtatggtcacatggcgtcgcttctttcgcgcaaccggcccaaccctcccatttttgctttcactgataatgccaactcaagaaagagcatgaacctcttatggggagtaattccacttcagctaccactgtcaaataacatg

SEQ ID NO: 2347 - DNA, 500 bp, Oryza sativa
tgcaggcggaaacaccagtcggcggcggcgaaggcaagccggtcggtgaagatgtagacgcccaacaacggcggcataataggccagacgtgcaggcggaaacaccagtcggcggcggtcgaggcggccggtcggtgaagacgtagacgcccaacaacggcggcataaaggccagccgtgcaggcggaaacaccagtcggcggcggcgaaggcaagccggtcggtgaagatgtagacgcccaacaacggcggcataataggccagccgtgcaggcggaaacaccagtcggcggcggtcgaggcgagccggtggtgatgttctgactgatccattcctggagcgtaagagataagcttaaagccatgaatcccttttatgcatatctggatctggatcctgcagaacaaacatataggatgagtagtatctgatataaatataatactcgagaaaaaatcaagtattttaaaatatttataaatatgtatttctcctcttg

SEQ ID NO: 2348 - DNA, 667 bp, Oryza sativa
cttttgggctctacaaccctagttactttgccttgtatttggaggtgtaaagcatatatgaagacaaaagtttttgcttggcttatgtttttggacagaacaaatacaagggatctcgggatctcttagagagaaagcattgcaagcccccaaatgtaccctccttttgtgtcatgtgtaccttaggatcaagagagacaagagatcatttgttttttgaatgcccctttgctgcagcctgttggaatatgattgggttctcatgggatacttctcttgattttcatcaaatgattcaagtgcagaggtttggttttgtctcctttttgcttcatggaaatcttcttagtggctgcttggctcttgtggaggcagagaaatgatcttatattcaacaaagtatctccctctctcagtagatggaaagcaagcctgaaagaggagctagggctggtttggtttgtggtctaaattggccttaccaatttttgtcaatgtcaaattttggcaacttttggcatggctaattttggcaaaggaaaaattgtgtttggattgaagccaaaatagcctaaattaactgttgaaatggcctattttcttaggcatgccaaaatttggctccaaaccaaatagacaataaacactattgaaattgccaaatatt

SEQ ID NO: 2349 - DNA, 519 bp, Oryza sativa
tgtacccatttattgtttttattatgaagttatgaatgatgtctccttttagtattttgtttatttttaaattgtattcctacttaaatttttttttgatctggaacttaatttgatttttcttctaaattttaattaatctcgtgttatgttctagatggaatatttttgcaatatttctttttatattccgaatttcagttttttaaattttattcctacttaaaccctattttccttttggttaatcttagaatttacttcatttgaattttaattaatcttgtattaggttttatatgattgttattcgatatattcgttacttttaattctgaatttcagttatttataaattttattcatacttaaactctctttttctaatttcagaatttattttatttttattttgaatttagttaaactcgtgttgtgttctaatggatggtcatttcaatattccttattatttaatttcaaaattatattactactcgaagtcttgaactctctatt

SEQ ID NO: 2350 - DNA, 627 bp, Oryza sativa
catctaaaatcccttatattttgcgatggagggagtacatgcttgttctaaaatttaagcaaccttaaatatagagccatatacgtataagcatttggatttcaaatatattaattgaaggaatgaataacctgaaaattctttttcgcatcaatccatgctagatttgttccatcattcaaattgattcttaaatttcatcacatgttcaactttttactcacctgcctgagaagtgtgaatttctgctgccgtgaccttcactctatgtagggggtgaaaacggtacggaaatggacggaaaccatctttatcgttttcgttttcattttttttttcggaatcggaattggaaaccctggttacgaaaatggaatcgaatattatcgaaaccgaaaacggagcgaaaacgaactggcgcgaatacggtaacgaaaatttatcggaataaaaaacccctcaaactgataaatccaattgaataaattatctatgtttaaaagagtaaggttgttgataaatcctaatgcaggacaaaaaaatattcttatgtaattttagatttgcataacaaatatttttttaaaaaaaataatagccaaacacaatagtattcactatttagtg

SEQ ID NO: 2351 - DNA, 556 bp, Oryza sativa
tatgttctttcaactaacaaaattgtggagacttgtgaagtcacttttgatgaggctagcccaggagctagaccagaaatttcaggtgttctagatgaaagcatctttgtggatgaggattcagatgatgatgacgatgattccattcctccacctctagacagtacaccaccagtgcaagaaaccggttctccttcgactacatcaccttcaggagatgcaccaactacatcatcttcagcagctgaggagattgatggtggcacatcaggaccgacagctccccgacacatccagaaccgacatccgcctgactcgatgatcggaggcctgggtgaaagggtaactagaaatcggtcttatgatcttgtcaattcagcgtttgttgcctcttttgagcccaaaaatgtttgtcatgctttatctgatgagaattgggttaatgccatgcatgaagagttagaaaattttgaaagaaacaaagtttggtctttggtagaaccacccttgggttttaatgtgattggaacaaaatgggttttcaaaaacaaactag

SEQ ID NO: 2352 - DNA, 2049 bp, Oryza sativa
tcccacaacgtcgccgagtatgaggccctccttcatggactgcggatcgcaatttccctagggataaagcgtctaatagttcgaggcgattcacagctggttgtcaaccaagttatgaaagagtggtcctgccttgatgacaatatgatggcatatcgacaagaggtacgcaagttggaagacaagttcgatggactcgagctcagtcacgttcttcgaaacaacaatgaagccgccgacagacttgccaactttgggtccaagcgtgaggcggcaccttctgatgttttcgtcgaacacctttatacgccgacagtacctcacaaagatactactcaagttgcgggcactcatgacgcagctatggttgaagtagactggcgagagcccctcatacgatttttgacttctcaagaactcccccaagacaaagatgaagccgagcggatttcaagacggagcaaactttatgttatgcatgaagctgagttatacaagaaaagcccttcaggaattctgcaacgctgcgtatctttagaggaagggagacaattgctgcaggacatacattctgggatatgcggaaaccatgccgctgcacgcaccattgtcggcaaagcttaccggcagggttttttctggcctactgcagtgtccgacgccgacaagattgtgcgcacgtgcgaaggttgccaatttttcgccagacaaattcacttaccagctcaagagttgcaaactatcccgctgtcttggccgtttgcggtttgggggctcgacatggttggcccgtttaaaaaggcagtcggcggttacacgcatctctttgtggctattgataaattttccaagtggattgaagctaaaccggttgtcacaatcacagcagataatgctcgagacttcttcatcaacattgtgcatagatttggagtgcccaatcagataatcactgataatggcacacaattcactggcggagtttttaaagacttttgtgaggactttggaattaagatttgctacgcctcagtcgcacaccccatgagcaatggacaggtggagcgagctaatggcatgatacttcaagggattaaagcgcgtgtctttgaccggctaaaaccctatgccggcaaatgggtgcaacaactgccatcggtactttggtctttgcgaactacacccagtcgggccacaggccagtcaccttttttccttgtctatggggcagaggcaatgttgccgagtgaagtcgaatttgagtctttgcgctttcgtaatttccgtgaagaacgctacgaagaagaccgattggatgacttgcaccgattggaagaagcccgcgaagcagctttgattcggtcggctcgatatttacaagggttgcggcgctatcataatcgcaatgttcgatctcgtgcctttttagtcggtgacctggttttgaggaaaattcaaactacacgggatcggcacaagttatctcctttatgggaggggccatttatcatctctgaagtcacccgaccaggttcctaccgactcaagcgcgaagacggtactctcgtcgacaactcttggaacattgaacatcttcgtcgtttctatgcttaagcttatcattgtatttccctatcttgactgtcaacatcaagttttcttcttgccgttgtcagtcgggggctatcatcataataatggagtgtgattttttatcaatttaatttgcttacttggtttatcattgccttgtttgattttttctacttagtctgcgaggactgaaagtttttaatagcttctttgggttttaggctcaacaaagcttgataaaagcttttaagaaatcaaagacttggctagaactatcaagcacagcataaatacaccagtattgtacaaattaagcctccatttgctacatttacactcagtcagaatcagtcctttcatcatcagagttattattgctcggctgaaggtcgttgttgcggaattgctctacaacatcacttgcaatcttgtcagccgcactctgagcattactga

SEQ ID NO: 2353 - DNA, 1845 bp, Oryza sativa
atatcctcttcgccaagaccctggatgatatgcagatccctcgctccgagttaaaaccaagcaatgcgccttttcacggagtgattccaggattatccgcaactccactcggccagatcaccctcccggtcacttttggcacgcgggaaaactttcgcacagagaatatcagctttgaagtcgccgacttcgagacagcataccatgccatactcggacgcccggcgttagccaagttcatggccgtcccgcactacacttacatgatgatgaagatgcctggtccccgaggagtcctatccctacggagtgacatcaagcaagccgtcacatgcgacaaggagagttgcgacatggctcaaacccgcgagatgacgtctgcccgagaggatatccgactggctgcagccacggcgagcgaaggagaaatacctgctaccaagacttcaaaaagtggagaaagcgaagccaagactaagaagattcccctagatccctctgatcctactaaaactgctgtaataggcgccgagttagattgtaaataggaaagcgcgctcatcacctttcttcagaacaataaagatatctttgcatggaaaccatctgatatgcccggtattcctagagaggtgattgagcattccttacatgtcaaagaagatgccaagcctatcaaacaacgactccgccgatttgcacaagacaggaaagacgcgatcaaggaggaattaaccaagctgttagcagcaggcttcatcaaagaagtccttcatcccgactggctggcaaacccggttctagttcggaagaaaacagggcaatggcgcatgtgtgttgattatactgacctcaacaagtcctgtcctaaagatccttttgggttgcctcgcattgaccaggtagtcgactcgaccgccggctgtgagcttctcagtttattggattgctactcggggtatcatcagatccgactgaaggaatccgactgcttgaagacttcattcatcacgccttttggggcatactgctacgtcaccatgccgttcggactaaaaaacgcaggagcaacttatcaacgtatgatccaaagatgcttctcaacgcagatcgaccgcaacgttgaagcctatgtggatgatgtagtcgtcaagaccaagcaaaaggatgatttgatctcggatctagaagaaacctttgcgagcatccgtgctttcaggatgaaattgaatcctgaaaagtgcaccttcggagtaccgtcagggaagctgcttggctttatggtgtctcataggggcatccaagccaacccggagaaagttactgctatcctcaacatgaaaccgccaagtacccagaaagatgttcagaagctgactggatgcatggcggcgctcagccgatttgtttcacgacttggcgagcgggggatacccttctttaagctgctgaagaaaacagataacttccagtggggacccgaagcacagaaggccttcgaagattttaagaaactcctcaccgagccaccaatcttagcctcaccacacccgcaggagccgttgttgctgtatgtatcagccacctcccaggttgtgagcacagtcttggtcgttgaacgcgaggaagaaggccatgtccaaaaagtccaacgaccgatttattttgtcagcgaggtcctaaccgactccaaaacgaggtaccctcaggttcagaagctgttatatggtattctaattactaccaggaagctatctcactactttcaaggtcactcggtaacggtggtcacatctttgccactcggtgatatactgcacaaccgtgaagcaagggctgcaggaa

SEQ ID NO: 2354 - DNA, 2804 bp, Oryza sativa
cgtaaagacaataagaacactgaaattagtataactagttgataccccgtgctttgccgcgggatatgtaggtgaatacattttatatattatagaaatgtgtggagattatggatatcccatatctacacggcgatactatttgggctggacataggataccgaatatgtatagaatatcttatttgtatctcgggtttgtttcttaacttgtacaacaaggaaacaccttgagacttagttggttacgactgtattttgtctgtgtttgcatattccgttagggatatgtattctcttttgtaatacggactccttcccatatatataaggggggtctaggtgcctctaggggcaggggttgaattttctccaaatcatacaatcaataacacactcggcggattcatccccggacaggagtagggtattacttcttttataagaaggcctgaacctgtataaatcctttgtctccaaacccatacactttcctagcttgatagccacccccttttattattgtcgaaatctagtttcgacagttggcgcgccaggtaggggttgcgtcaagcttttcgccgatcagtgcaatgggttccgtctccggcatcgacgacctcgtcttccctcccgggcagacgtttcggttcggcagcctcgacttcatcaccaacaacttcggcaagatttctctcctcgactcggaatcagaccagtcgggagagaaccggatttcggtcccgtttggattcccgaacgcggctgaaagctacttcaagaccatctcaaccgagccggcttcaaaccactcggccgagatcgcatcttctccaacgacaccagatcaagatgatggggcttacccaccagtcctgatgaagctccccgacgatttagcggccgtctccaccatgacagcgtcttcatcccgtaggcctaggcggaagtcggcttcaacaccgatttcgcctagcttcagggaagtcggcgtcatcctccaaccactcggcacggtttcgacggatcagctggatgactacaacagctctcccaccgtcgactcacgtcctactgacattgtggagtacgacgaatttagttctcgctacaacgacttcgacgacttcgacgacttcgacggaagcctagatgacaactacacccctctctactttggcgttttcatggccaataatgagacggaggagcaacgccaagcccgggagaccgaagaacgtcgccgactggaggaggagcatcaagcacaagaacaagaacggctacggtgtgagcagcaggaccgtgagcggaccgcgaaggaggctgaggatcgacgtcagcgagctttggaagcagggcgccgagtgcgtgatctcatcggccagcaagatgtcgaagggacaccggtcttccgcacccctcaacagaatgcggttgccgcgatcacccttctcgacaccctcctcaaccaaaacgagctcaatcgatccgaccacgtcgtcaacatcttgaaccagactaagaccatgattgcggcttcggtcctagttaactccgaaagcgtccacacgccgactggcagccgagttccccacttccgatctcatgactaccgtcatccaagcctcagcatcaccgccgcaggatccaaccgcaggagcaggggtcacgacgagcggtctgttcactcacctcccgaccttcatagggagcgccgagtggaacggcctcgctcaccacctcgtcgccgccccatcgatcttcgcgacacaatcatacagcgccgagcagctcgaggctaccatcactcgccggaccgccacgacgacgaccttgacggagtagcagccttcaccgacgacctgcgtcgagtggattggccagccggcttcaagccgactggaatagagaagtacgacggtaccactaaccccgaatcgtggcttaccgtctacggtctcgcaatccgcgcagcaggaggagacagcaaagccatggcgaactatttaccagtggctttagcggattccgcccgatcttggctccatggattgccccgtggtacaattggatcttgggccgaactacgcgaccacttcatcgccaacttccaaggtaccttcgagcgtcccggcacacaatacgacctctacaacgttattcagaagtccggagaatcccttcgagattacatccggcgattttctgaacaacgtaacaagatctccgacatcaccgacgacgttatcatcgccgcgtttaccaaagggattcgccacgaagaattggtcggcaagttcgggcgtaagccccccaggacagtcaagcttatgtttgaaaaagccaacgagtacgccaaagctgaagacgccgtcaccgcatcaaagcagttgggtcccagttggaagcaaaacaagggtacgccggctacgggaggaggtggaagtaacaatcataaggaccgcaagcgtaagcctgcggaacttgttgcaaccgccagtcactcttctcgacagcgttcgcgcgtcaacacgttcgacaagatcatgaactcccaatgcccgcaccatcctaactccaaccacgtggccaaagattgtttcgtctacaagcaattcgcggatcaatacaccaagactgcacggaagaactctgacgaagaacaaagcacgtcgaggaagaaggacgacggcgacaccccggcaggttttcaagatcaccgcaaggagctcaatcatatcttcggcggccccctggcttacgagtctaaacggaagcagaagttgactgaacgggagggg

SEQ ID NO: 2355 - DNA, 9299 bp, Oryza sativa
tgggtaagtcgttggcgaagtcacaaggccctccacttttcattttaaaaccgataaacgagaaaaagatggattgttttgcgaaagaatctttggacccataaaaagcagattttgtgcttgtggaaattctcgagcgagcggagctgaaaacggagatgaaagattttgccaaaaatgcggaatagaatttgttgattctcggatacaaagatatcaaatgggatgcgtcaaactcacattagtttctaatgcaaccatttcatggatcatttacccaaaatatgtactccctctggttctatattaattgacgttttggacaagattgagattaaacttttataactttgaccatcaataactttaaaaatatttagtttaaagaaactagaaaaacatatatagatttgtctttcaaaacactataataaaaataaacatgtatttatttattgtatatattataatagaaaaataaggtcaaagatatatcttgtagagcgtgtcattatccaaagcgtcaattaaaatgaaaccggagggagtataaaatataaattattgaacactgttccaattccaattttcctaggcttgggctgggccaggaaaaaggcagtgggcctctggctggaaagcaaatttttttttaaaaaaaaaggatggatgggctgcttggcttgggaaaagattcagcccaagaagaagaacagggaatttagaactttacagaatttcagattggagattgatttggaatgtgcaattgaattcaatatttgatctgaggattgcgtttagaatcctatatttggactgtatatggagataaagatccagaagaacacacagaaaaaagattttttttaattacatattttgaatttaaagtttccgaaaaagacaaaactgtgttaaattgctcttccaattcgcgtctcctgcctcatatatgccctggcctctggtttggtgggtagggtcaaattcctctcgagaggtcacacttttgacatttcaataattcctgaaaagtcatcttctagcactgcaatgtgaaagctgttttacgtgctatccttttgctttgctttttgtttgttaaactacttagcattgaaggccacattttgacttattttagtctgtctacactcctttttttttccccttaaacgctactccttcgtccaaaaaaaaaaaaaaacccaaccttggtaaggatgggacgtaacctatgacaacgaatctgaacaaattcgttatcctaggtaatgtcccatcctcatcaagattggacggagggagtacaagtgagagccaaagtagcactgatggaaaatgttagtcaattctgtttcacataatatagcacatagaaactactatgggaagcacctgatgcctggtgccacgaatattacgcgcacacacgagtgcgttttgactagttatattccagtacagtacatggcatttgactagtttacatatgatgaaagaacaaaagaacaaaaaaaaaagaataatgcaaaatcgctattggctgtggcatttccatagatatagaaaaatgccaaattttcaccactgcggcatccatcagcccagcacaaacctctcatcttttcagataaggaagatcaaattacatctctggcctgtgcatcataacagcctctttctctatctagcataacaatttacaaatggaataagttggttgatacaaagttctttttttttcttttcatagcgatgatcgtgtagtcgtgtctgatgatgtggatgggtcagtggtggcaaaggatctcatcaggagagactgtggatcaattggtctctgctggctgctacctctcaggtctcccaggtcaccaacaacagagggcttggtgatcctttctgtgttgacatccttctctccggtcagcatctggacgatgttgatcatgttgggacggagtttcatcgcatcttgagtgcatagtagtccaaccttcaagaaccggcatgcctcctcgacatccacatcatcttctatatctgcatctatgatctcctctaaatgcccttgctcataacatgtccatgtctgcaagagcaccggcaaacctttacaggttagtctggagtccggacgtcaatgcataaacataataattgtcagtattctttagtatggtattatggtagagcttaccctctcaagcagaaattgttcttcataaggcaacctagaattatagttgcatctgccgctgacaatttccaagatcaaaacaccgaaactgtagatatctgacttcttagtcacttgtcctctgagtgctattcaggagctaggtaccctctgataaaataaaaggacagagtaagacaacatggggaatatctatgcaggaatttccaaaagaccccctaaacacagttaaacttacattgttcctgcaactcgggtgctcacatgagtcgcatttggtgggaggagcctggccaacccaaaatcagatattttgggggtcatatccttgtcgagaagaatattgcttgcctttatgtcccggtgtattatgtgaggacgaacttcttcgtgaagaaatgcaagcccacgggcaacacctacagtgattttgacacgagctctccaattgaattggatgttgctacggcctgaccctgcattgccatgtgagtgaggttactgttaaagagtgtcttgattaagcaaggacagactaggtagaccagtatgttacctagtagtgtatgttgaaggctgttgttctcaagataattgtatacaaggatcctatgagacccttcagcacagcagccgactaacgtaattaggttttcatgcatcacatcggaaattgctgtcagttcattaatgaactcacggacgccttgccttgaagtagcagagagcacctttactgcaactattgtcccatctctgagccttccctgatcaaccaaaatgaattttaagcaagtgaggtcgatgtaatatagaatggatattagacttagttgaagcgaccaaaggctttggtacattaccctgaacacagaaccgaagccgccctcaccaatcttgttcgccccactaaaatcatgtgtagctcttctcagctcattgtaagaaaaaatcctgaccgctttttctcctgaaaccgccagaaacaagttgcaagtcaacaaatgtatcagaatgaggagcattctgtatacagaagagactatagaactaaatgaagacatgcccaccttgttcaccttcactagtttgttttgtatcattcccaaacataaagcagcaagccatttttgcaaatcaaacagaggaagtgccttctgctgaatatctgcagaagaaagaggaacatcaaaacggttttttttttttttggtgatgaggaacaaccagtcagagactcagagttactgtaataagtagtctcatgtcacaaccattgttgtgtaaacaaatatatgtccgtttaccagtaccacttgaccatgaaaacaaattggttgaccacacaataagaaactggcatcagcattagtaatataaaattctttagttagtgagttctacactatctaatcaacttgctgcatcactagtttactgcattaaagtatgtccagtggagtacagggaaaaaaacataatggtgaaaccagtcaatgcaattcatcggcgcacccaaccgacatcacaccaccaagtgaagggtcagaccctcctccacaccctgcgtggcagccaaacaaagggagcaatttacaaatcaattccagcaattgccacagctggcaaaatttatatctatttcaaagtcaaaggggattggatccagttgacaggcacaaggtgggcactccttcagatccataccgaacaaatgtgtatatttctcatcaaagcacacgttgtactaatctgaatcttatcagacccatataccgaaaatacagagtgagcttttctgaaagttgcagtttctttctttttctcttaacattgcaagaagtactccattcatttcaggcaatcactcaatcagggggagaacaccgagttaaatggttcatacttcctgttacttatccattaataactctgtactaatctgaatcttatcagacccatgtactgaaaatacagagtgagtttttttttctgaaagttacagtttttttttccttaacattgcaagaattactcccattcgtttcaggcaattactcaatcagggggtaaacaccgagttaaatggttcatactgcatgctactaatccactaatcatgtttctaaggtgaaaaatcattttatacatccagcattccagctcctacgcaacttgagcgtttgcagaacaatcaccgaccaaaaattcagcaaaaatggcaaaacagcacacaataatgattcaagaatcaagattacttcaaaccctttttttccccctgaggccgacaaattctgcggagagaacccaagaaacgaaaccccgacgggaggcgaattcaatccgaatcacaaagccaggcagcctcaaacacagattctcgaacaaacagaggactgcatcagcatcaatggtggtcgtcagagatcatccccgcagcaacaaacagagagacccgcattcttccaccgagatgctatataaaaagattcgatctcgaaccaactaggtcgccccttttctcatcccactaactaaaaattcgcggatgccaagaaatagaaacccaaccacaccctctcaaatcaagaagaatcacctggcgtctccgtcggcgcgccgcccgccaccacccctctaatgccgacgctgcccgcgcggcgcacgcactggctgcctcagcggaggaggcaagaggaggaggaggaggaggaggtcggcgagagggcgtggcgacgttggtgagctccgcgagtcatccagctatagtggggtactggggtgtgggtgtgtaggcaatggttgacttttactcctctgccggtctcctcccctatgagtctctctctctctctctctctcttttggatagtgactttctctctctagcaaatgggagcccatcagcagttgtaatccgtagttcttttcgctcgtacaaattttatctccatctttgttagcgcgttttttaaattgcttagcgcccctttaaattaaagtattttatgtacgaattttataggattcagattttatagaaatttttgctatatggtcatttgattaaaagatttaagctttccgaatcatatgaaatttatcgatatcgtttccgtaaaattaatatgataataatatttttactgatggttacccttttaaaatttagtttttccaatttatgtctgcatggcattggtaaatatggaaatttcccaaccatttttgtctgttttaaaaaattataaaataatgataccgtttgtgaccatttccgaccgtttttaccctaaaaattcatatgaaatggctcattgtatatagattttagagaaaacttagtaaaagcttaaatctcttggaaaattttctttggatctatctctctcatacgcttccatgtgtgttttcctatgtttttacaattctctattttacacttggattcctattctgtgtttttttctattactccatttttccaatgctatgattcaaaggagctcttaatggtacggaaacattttagatagacgctacttcaaaaatattagataaactaatttttcaagtttaaaataattaaatttaattacttatgtactaatagttttctcgttttatgtactaatagttttctcgttttatgtgtctgtatttaatcctaatatttagtgtactcaaacgggcctaatactagtgataaaaaatggttggattagggtattttcgcgcgtggccgacgtgtaattatcacgtggccatagggcagatcacagatggttgctgcaaattaaaacaagaataatgacagttaagaaaatacgggtatgatgaatgggagcatatagtattataggcttcaggttgtttgtcttttgtggactgtgatcgatgataggagtagtattatactgtatcccatattgctgaacttttgtatgtgatccatgtagcacacaagggcaaataggagggtcgacagtaacgtggtctcatgacttcattccaagttgttttgtacttttgaagattttaatctcttcgaagttgcagaggccaaaacttgttgcatttttatatataattaacaccatttattttttttgctttacgcaagttgctgttaaaacctgtaataagtttggcctgtagaggctggagtgcttctttgatgcgatcttgtgtttcgaaaaaattggtttggggttacacatatcttataggtaaaaactaggttatctagctttttttggcaatactccctccgttttaggttataagacgttttgatttgatcaaagtcaagtttgaccacatttatagaaaaaaatagcaatattttcgacacaagattaatttattataaaaatatatctaattattaatttaataaaactaatttgataatgtaaatattactacatttgtctataaacttagttaaacttgaagtaatttgattttgactatcctgtaacctaaaacgaagagtgtatattataatacgtccatttgaagtatggacgattatttgagaggttctcaccgtattgcaagatttatatccacgaaataaacaactgtccaaaatccaagaagatatatggggacattgtgattctagaggactaggggcttctttggatcgaatggcttccgcgtgcaatcctagccttgtcattttctttttggcgattgtaagaatttgccaattttaacattcaaccaaaagacaattaatgaataatttggcaatgtcaatttttctttacaaaccaaacagatgtggcattatcaatcattttggcgtggctgagtttggttacaaaccaaacaagccctagaattaattatcttctttcatgtaaagactttctaaagatcactcatgtgtatatatatatacacagtatatttctactaggttctggcgtcctgccatctttctcatgaggtgatacattcacttattcaccaatagatcaatcattttatcatttccccctaatatagggaatgtgaaaataaatatgcacatgcatcaacagagcgtagtcatgttggggccctgatttccctcgtattgaattgtccaactgtcggagtcatagaagaagtcatataagaaaatgactgtagagaaaaagaaagtcttctctcctcacgtccaccctaggattttcttttgaacgcattataatttcttctgatttttttaaaaataaaactaattcatatgaaaatcccaatcgaattctataaagttattgcgtttgattgaaggcctaagatcatgtgagtacaattccagtcttgagattgggaatcacatcactggtgtagcagtggcaggggacgctggcatgcaccccaccagcttgggttcgacccttgtcgagcgcgctcaccaggggaaatatttacctctcttaaaatcattgactcaagttcttccttgggtccaaccttattttttttcacatcactagtgtacaaaactgggaatcacatacaagatctctccttgactcctttattggtccatagcaaaatttaactctgtttctttctatctcattttcttttccctctttttatgaaaattttagaagggagcattttatctttccttgtttaacgtttatgattgtacttcacttgtaatcatacacatgcgatgcacgttatggcaatatatgttatgaaatataaaaccgatgcaagatatttgaaaatcatatgcaaatccactacttattatccaaaagactttacaatacaagtcataatcgaaagacttacaaactaatacaaaccattggaaaatcatgctagaaatcatatacagtaacattaacattaaaatttacatgtagttccggcgacttgggataaattcggaaaccaatagaaacctagtactcccttcgtctagttttgatagtcatatttcatcttggcacgcagaccaaggataagtgattctacttatcatccttttaaacatgctactagtcattactcgtaaacatgcgattcattaatatttacatttctcgatgcccatgtagccaatcttgtgtggaagaaaggagagtcacacattaaatacaagaaagtcattaagatgataagttgttggattgaaatatgcctatcaaaaataaatttttcatatttggaaatatgactatcaaaagtagatggagggagtatcaattattgcctttcgttcttcattgcaagactaattgaggggttgatctgatgggcatgtgattacgcacatcgcgagcacgcggtgaaaaagacaaaacagtgtacgtgcgattgcaaattttctctcttgcttggaccttgagcagattcgtagtattagaatatatcacattcgtagtattagatttgtaggttagatttttatggaatggtgggaggatgttttctcctagtcggcatttgagcccacgaacagagtgcgggcaatcaaaagaattatagacatagactttatagataaaatatttatacataaaactttatacaccgatattttatacttgcatagagacttttatacgtataaactttgaatatactaaattcccgtgtataaatttgttagcagatattcggcaaaatgaaaatcaatactaaaatagttcttgaaccacacactgaaacactcctaaaaataattaattaccgtggagggaattggatataaaaaatgcagaggaatagataacaaaccttaaacatgctaagaataatttattcatgtatccatcgaacattgacggcacctttgtcagctaactcagttggtgagaatagtgccgcgaccacatcaccagctctaaagggtcttgatcatcatgacagcataaatctctactactaaaagacaacataaaaacattaaccgccacaataatttgacaatatgcctaattacaaagcttagtcctagatgggtctaagcttttgcgttgtcaattccaatgcctttgtcgtagcctagctagttactccctccgtttcataatataaatcattctagcattttccacatttatattga

SEQ ID NO: 2356 - DNA, 14296 bp, Oryza sativa
catttagcaggtcctttagcctgccaaagcagaccagtgcaagtgaaaggagtgctggatggcctaggaagaagcctggtagaccgagcgagccgagtaatactgatcacttgtccaactttagacaagacgctcctttgtgcgactgtgctcgaagagagctggacaggaagtaccgtattccagaccatccgaaattgggagatgacagggaccgtgagagtgccatggatatccctaacccatcttgacagtatcaaatttacatgtaagtaagatcacatcaagacgttcgatcaaatggggaaaaaatacaattctgatggaatttttgcttacgttgtttgacagtgttacatcgaggcataatgagacgagtttattcaagtggacacatcaacttgtgatggttagtatgtacctagctagacctacttcccagctactagtatgtgatctctgatcaactgctgactttgaccagctcttaatttagcaagcaactagctagcacaattggaatactaaacctgtctcgttctagctagtttatttaattgctgggttttcagctggaagaatgaactccccattgttttcaaggtaatttaatgtagctaattaattatgtagtggtagtttttttgtttagtctgatactgtgtcaacatctgttatctgcacaataatctccaatagtagcaactttaagacaagatatttgtcatgtcaagatctgcctactgttcatgcaagcatccgtacgtcgtctcaccctcaaaatatattttagcagtatcgaaagggaaagagaagttcatatatgtattattaccagtttattagttaattaattagcctttttttactaaccgattggaataatgcagatgtcagatgaaagcgatactccaatacatatccattattcccatataatctcatcctttcagagaatcatatacatgcagtacatgaattaagtatgtaaagcatcgaactcggtggaattgttccgacaacgactaggcatgcatgcagtgcacctaatcatcagaacccaacaaacaattgctgcatgcttttttcaccatcatcatgcatgcatatatacttgcacggctgcaatgatatctagctaactagtgagacaaagtacaattagtagtactagtaacaactagtcaaaccaagtaggattagtactagtaactaatttctaattagagtaaagtacatggctggtctttaaagttggagcgaggcgtcacttaggtatatgatcttgaaaaatcaacattaggatctgcgatcttatttaagtgactcattaagatccaaaggacctctgaccgggctaatcactggctccgatagtcgtctaacttagggaggactagtggacgaagaggtcctcgccgccgttgtccgaacccgttggtggcgtcaaaccccttcatcgtccccttcaccctctccgacaccatctcgcccttgccaccgcaagttgaaccctccaaaatcctagaagccgcccgccgccccactctgcaggccagccgccgccactacccttctcgcccttcccgctccccttcacctggggcgacctcgactcggccaactccgagtactcgaggtggcctgcccagcgcttgcaggtcctgctgcggccgccacaagcaacggcgagaagggctggccgccatcccttgcccttctccccctggtcgccgcccttcaccctctttgcgcatgctcgccaacccgccgctgtacccgcctccctcctcatcatcattgtcatcgtcactgccgccgtcgcgtctccactgcaacccaaattgcccgtgcaaccgcaaaccatagaaatcacaatgaaagaagagttggggaataagggttggatcggatgcagggggcaaaatgcaaatatgctaccactctggacggccacgtaagccagtcaacccggttagaggtcctttagacctcaatgagtcacttaaacaagatcacggatcctaatgtcgatttttcaagatcatgtgtgtcgaatatgtgtacgtagtcggttacagtttaggacttggagttgtactaggtataggactagagtaagagttggactctgtcctaggatctctcataaatagaggggcgtgcctgttgtaaccgcatggcgacatagcatagcgagagggagcggctgccggcggcgacctgccgtgagtcgttgtaactctgatacgttgtaatatgctggatcggggaggagcgcccgtaatcggtgccccagagatgtaggcctcggttgaactccgttatcaaatatcgtgcatcggtgtcgtcatcgtgtttggatcttctatggtgtttcttccacgtttggtttccgatatgatttcggggccggttttataacatcatgaacctaagtgacaactcgctccaactttaaggaccggtcgtgtactttactattccaattacctacattaactccttacaacctgatactacattagaattttgtgacctttctaaaatttcgccatttagcatgtatatggaaataattatatgtatgtgcgtaaatttttttttccaatatgcatgcatgagatttatgtgtcattcaatcaaacattgagctaatgtttggagtagatccaaatatatacgtgaatatatattcttttgtcttttagattacacgaaagacacatacgcacacaccacacccactagccttgatcccggccgtacccacgagtaaatccttaacacacactttaattatctgataattaagctcgagtagcaacaccgtaacaaggcctttatttccaatagtacatggttactcccctgtactaaaatataaatatttctacaactcataatttgtaccacaaagtatttttggcatttattttattaatgcatagaaattcatatatttttggacaatcaggtacttgggaatagaatctaagcaattcaaaattcgaccattgaggcgactgaaagagaggttttttttcttaatctttgtattttgctaaacaacaataaaaaagaaatacttatattttaggataaagagtagctataatccatcatttgctctacgactaacaagccatggaaaaaaatgtcgcaattaacaaaaaaaatatttagacaaaaaacttttatacatgtgttgttagcgaattaaaagttaatattgaaaaataaactataataaaaaaactctcaaaatcaactccaataataatttcctaaatttaaattttaactacgactaataagccaataagaaagctgtaggtaaaattaagatagcatctccatccatccatccatccatccatatcgatctgtcttgtcccatctcgtcgatgtctcacatctgctcatctcatcatctttcatctcatctcatctcatctcatgtgcaagtgcagccaataatgggagccaataagcactaggagttggtttcagataaaagacgaggcccctttcgtccagtatttaataatctcagcaccagcattgccggggccctcgacggcgaccggccgtcgatgtcccggccgtcggcggccgatcgggcggccacggcggcaacacgccgcccgccgggcacgtgacatgccacgtgaagagagggccggccggccggcggtcagtttccggccggtgtcgccgtcgccgtcgtcgtcgtttatcttgcgagataagatgagtacgtcgttgatcgatcgagtagtggtgatcaatgttgaagctaaagctttggaaaaaaagagttaattaaattaattaattaattaattaattaattaattaattaattaattatgtgcgtgattagacttctgtgagtgctgaccagctaataatgcatgattcctgctgatctctcttttattggcatatgtatgttaggacagaagtggtaattaattagatggcttaatcacacatactcccaaaaggtctccaaacgaggctgcaccagagagagagcagagacgatcctccttgcagatggatcccataaccatcgagatcggcgaaagcaaaaatcgaaaaccctagcattccgctccttccaaagctgctaggacattagaaggaccaacgagtcaaaacccttgcgaagatgcgcaggcatgcaggcaaactttagctgtcggccaccagacctaaatagaatcgccacgggtgagggagataggatgcaatgccagacttggcaaacgaacaaacagtcgagcaggatatagctcgctgtttcaagctcctgagtgcagaaggggcaagccaagtggttgtcaatgccgcgtttatgcagaagatctgtcatccagcaacactgctggaacgcaagccaaaggaaaatcttgcacttgacaggacccttagcctaccaaagcagatcgacacaagggaaaaagtgatgccccacgaagaaggtgtggtaaggtgaggcgggggagtaacgctagttgcttgtccagcgccagacaagacaatcctcagtgctcggagtgagatggacgagttgcaccgcatcccatactaacagaaattgggagatgacggggactgtgagggggccacagatgtgacccacccaagagttgtcaacaagagcggaggctaccgtgtgcgtcgcctagaggcgagggggtagctaggatgagatccagagccagggatatcacagagcggccctgaatccactggtccaaccataagagggtcgactcgccatcactcagcatgaggaaggtggaagccacaaacatgtcaaagacggtccgctcaaggggtgacttgaggtcggctcagtaggggtggatagagcgcagaagccagagccagcgcatgcggagagcgaaaaccgccgtccgcaagtccgagatgcccaggctaccgacgactttagggcggctgacattcgtccaagacacaaggcaacgctcaccctgaaccgaatctgtccccgactacaggaaagcacagcgcttcttatcaaaggccttgatgacccaggttggtagtccgattgccatggagacatggatcggaatagaacaaagcatggactgtataagcacataacggctggctaagttggtgagctgacccttccatgaagggaggcgatgggagaacttgtccaccagaggttgcatgtctatattacaccaattcatgagaatatttgcacatggaacacgcgttttatgatagttgtcatgctcttttttaaaaaaaaagaataaatgatacttttatatatttttttagatttttacatgattcttggtatttttattaattgactgtcaataaccaacttttgacttagtggagcggcaaagggacaaggatgcaaatagtgtaacggagagagagagaatgacatttctcgagtgtctgaaaagggatatatatcaacaagttccacaccaaccatagaaaattttctgccatttcatttggcgacaaatttgactataacaatttattacttgtttgtcgacatgctccatatatatataacgacctatttaattaagaccagaaaattgtgccaccaatttaaattaatatccacctcaataaatgtggtacgtgcggtataaattcagctctatcaataatgcacaacatgcatgtctttttcccctatcttttgcactactatgacgtccaaattaacctctgccgcaaacatttttgctgctaaaaattattgatgatatatatatcgttcccatcgaatttccgatggatatgatatatcgatatcgagcagttgggccgagttgatctgatggcatgataaagagagaggcttgcagcgaactgaactgaactgaatactgatatgatccgagagagacgacgacgattaaataccgtattccggacggcacggcacggcacgctccccaaacaagcgtatactacacatgtacgcatacatacgcattgcgtatgggtgtgtttagttcacgctaaaattgaaagtttggttgaatttagaacgatgtgacggaaaagattttggaactaaactcggcctatatatacaaagtaacatttagacatatatatgtttaatcatttgttttatttaaagttttgtgctaataaaaaatgcacaagtcataaaagtgtctttataatatagtaaaacggaccacaacaaaataaataataattatgtaatttttttagtgagatgaatggtcaaatgtatgtgtaaaaatcaacgacgtatagtttattaaaaacagatggtgtatgtaatagtttacaacattgtacatatgaataattaattaattagtacgcatgcatatcaatctgcatctgcgtgccgcaggattttcagtacaaatttgctatatacatataagtatctatatgtagatcccaattgcagcttaactagttgaatttatatattcatgtacatatacaaccacctcaaatttagttcagttgattaattgtagttaaccccttgctgtgccaaggcagctattttagttggtctatactaggctggttggatgagagtatacagcttcttgaatcattcaattgtctctcgtaggctggttctcatgtactaattatattgttctctcctataggttaatgaaagctctggaattctcctaaaagaaaatttaaggtgtgactgagtaatatccatactatttcaatttcaacttttaattaggtggttttacgatcggtgaagatgcatgcatctccacgtacgcataaggctccatctgtttgatctggccaacactacctaattttgacaagaacaggtatagcgcagtttacttcattcctagctggtgactttatcttcttttgttacttctctttatttcttactatatttagtattcaccagcactttctgtcatttgcttttcagcttgtaagtcgcggccaaaatctaaatattaaaactaattttttgagttgattttggaatcttttttagcttagtttatttttaagcattgacttttaaattacataaaataaatataaaatttttgttcacaaattatttttttagcttatatataacatttttttggcttatcagctagaaacaaaacgatcatgcgaggaaccgaaatatattaattggtatgtatgtgaggaattgaaatatgttgttttttcatcttgattattaatatagtaaaaataatataattgtgtaaattaataaataatcatgtagaaaaaaaataagaacttggtagttcatttattagaataaaaaaagaagacataggcgtccaaagtcgtcaagtacaagtgtactcaaacttgtgcgtggacacgtgaggataatgtacaattcaactcccctcgagcttgaaaggtcataatgtgaataaaatatatatcttcatttttttacgagaatatatattcatttcgaaggatgatttagaacaattaattgttccttatcagaatatttgaaattttatactatatagattgactagctctttattaattatggccagctccatcgatcacacaccccttcagctaaccgatctatgcttactattcttccacccaaatctaatcttaatgtagctataggccatagcttgaccaatctatatgcatgcatgtgttgcggccctcacgcattagtagccaaaattgtaatgataatatggaatcttgtactctctgtctgttctaaaatatactctctccacgccgaaatataagaatctagaattggagagaacatattctaatactgtaaatttagactagacagacttcttagcaagattcgtacatatacttgtatatacgtgtcccatctgatatatatattttaggatggaggtagtagtaaattttaatctttgacaccaatagtaagaagagtagtaaaacaaattggttgccttgttgggatgagtgaggtatagatccagattaattagggctataatataaccatgcggtagtgtgggtagtttaatagtacaagttttttaataatggaatttattttgatctttgctttaccttttgcaagtattaactaaggtgttattttagaacaaattttgaattttaaattgttgttatatttttagggcagatgaattatatatctttagagaaaaagaggaaaatatgtactacctccgtcctaaaatataagtattagagttagacacggttactaagaaagtatgtaaaaagaaattgtggaagattatcattggttgagaagtggagattggtgaggaaattgaatggtggagggttgtgattggttgagaatagaatgttggtggagaaattgttatattttgaaacaaattctaaaggctaaagttgttatattttaggacggagggagtactatatcatagtcattaatgattaggacatattattaagagagaatccactcagtgccattgagttttcactacttctacaatataccactgactttgtcaagttgaataatatgccatcgtgttttcccgaacgtctactgcgtgccatcacagtccagaagctgttagttgggcatctgttagagctgtaaaaagacctatttgcccctaactcattgtacatgtttttttttttgccgagggacatatgtattatatgaatacatatagagaaactgattgaatcatataacagcctatgattgctagcttcacgcgttggtagagacgtagtgaactagtgatctgttgactttgaaatgggacatatcggaaaaaaataaatgtacataatgaaaaaaaaaatcaaccccatacagttagatataaaacaagtttgaacatggtgcatggcactgagctcatatagatatagaaatgaataccaaaatattttactaaaacaggtgctagggtttattagtcatgggcattttagtcattaagaaaaaattcaatacaccaaacggatgcaccctaacggcttgtggacggcgatggcacgcagtagacgtttgggaaaactcgatggcatattattcaatttgacaaagtcagtggtatattgtagaagtggtagaaactcagtggcactgagtggattctctctattattaattaccatcatgtaaaatataaaaatggattgtgacatacgcacattccattctgacctgactgagctatagctactaattaacagctccagctcatgcaatgcaatgcaatgcaaccctgaaacaacaagcaatatatattgaaaaccatttagaccggtttatatattcagcaacagaatcgtactagtagcatataattagctcacatccaaatccttaatccgtaagcacactcccaaattaaacccggcaagttgcatattatccatgaaaaacccatcagttgctattgctatatactagcctctagctctagttgaccggcgagagtagtattaataccgctaccacgcgtagccgccgagctcgccattagcttgctattctctcttcttcttcttcttcttcttcttcttcttcttcttcttcttggtgtgattgaggtggaggaggagatgagtttcataggcatggtggaggcgagaatgccgccggggttcaggttccacccgagggacgacgagctggtgctggactacctcctgcacaagctcgccgccggcggccggggaggaggggtgtacggcggcggcggcggcgtcgccatcgtcgacgtcgacctcaacaagtgcgagccatgggaccttccaggtttgtatatgcttatatgcgttttgatcgatcgattgattattgattttcttggagaaagaaagagggggggaaggaatattttcttgtgttgggatgttgttggttgattcgtttcgagaaagaagatttaaattccattattggtattgttgattggtccctgttcttaggtttttgggggtaattattggtggtgtttgtttggttcgtgttgtttatctagcttctttctgggaaatggaatcttttccttcacatgacatttgtcattttgaagaaaaaaaagagatggactctttccgaagaaaaagatggcaaaaaattgtaagatttggttttttatcttcaaaagttggaaataaagaagaatttccatcaaagtgaagcagagtggcttctcacaggttttgaagaaaatgatgaaaaaggtaacacaaaagtggcctctcacagattttgatgaaaaaagatgataaaattgtaacagaaaagaatttctcatgtattttaaattgaagagaagagataaaaaattgaaaatgatgaataaaatcatatattttgaattgaagatacgagataaaagaaaaatgaaatgatgaataaaatcatatattttgaattgaagagaagagataaattaaaaatgaaaatgatgaataaaacataaacacagattcagattttgatgaaaaagatggaacaaaacataagaagagataaattaaaaatgaaaatgatgaataaaacataaacacagattcagattttgatgaaaaagatggaataaaacataacacgaagatttatacttcaatgaaacaaaaaataaaatggcgtcgcccggactcgaaccggagaccttcagtgtgttagactgacgtgataaccaactacaccacgacaccgagctgttcaatcatctcctcttcccaattcgatcttcgtctgatgagttcatgatcatcttctcttgtcttttccaatcgatctttcaattctctgccgccattgtttgcagacgcggcgtgcgtgggaggcaaggagtggtacttcttcagcctccgcgaccgcaagtacgccaccggccaccgcaccaaccgcgccacccgctccggctactggaaggccaccggcaaggaccgctccatcacccgccgctcctccatctcctccggcgagccctcctcctccgccgccgccgccgccgtcggcatgcgcaagacgctcgtcttctaccgcggccgcgcccccaagggccgcaagaccgagtgggtcatgcacgagttccggctcgaaccgcagcctctccacctcaaggtgaagacagattctgaatttcttcttctctcttcttctgtttttcttttttttttgttgttgttcttcgttcggattgcgtggatccgacaagatcagagcacgccgttttcgtgttcatgttcggaggaagaagattgatgctgagttttcttttttttttctgaagaaaaaaagatgatgctgagttttattaaaatgataggggcgaaatgaaaagattggttgctgtttgctacagttagaatacctgtcaaagaactcactgtcagattatacatgttcagaaagctctgttacaaataggggggaaaaatcagcttttagggaaaaaaaatgatgctgagtttcttttctttttctgttttgttttcacacactatcatgaattttattaaaagatagggggaaatgaaaagattgattggttgctgtagatgtttctgtttgctacagtgagaatgcctgtcaaagaattcactgtcagattatacatgttcagaaagctctgttacaaatagaaaaaaaaacagcttttaggggaaaaaagatgatgctgagtttcttttcttttttctgttttgttttcacaaactgtcatgaactttattaaaagatagggggaaatgaaaagattgattggttgctgtagatgtttctgtttgctacagtgagaatacctgtctcactgtcagattatacatgtttagaaagctctgttacaaatagaaaaaaaaatcagcttttaggggaaaaaattagactttttttattgtcatgttgctacctccagtgagctcatcatcatctgttgtgtcatcatatgcgtgttgccgtcacctaccatggcaattggcaaagcctgaattttgtaacaatatggtctctaactgttcgttttcaggctaactcgatgcttctctcaacattctttcctgataaactagctgcaagttgccagggctctagttttagttggatgaccctacaaaaagtttagtcttcttttgatccagtccatagttgttcagctggctccatcagattactgagctagattaatgtcataaacattccctccaaaaggatttgactgtcttatcgtggttgtttactccaagttgacacttaaaacattcaggcttccatgattgctaactcatcaagcaactatataacttgccaacaatgatttcctcatgcaacttgctgcagagtctgttatgttggttgcatcagcattatccatcgtgctaataagttaatgaaatttgaagtcttcttgtccttaaccactacatatgacctgaaaatgatttgattctctacagaataatgttcagttacagttattacttattacaattttaacctttcatagatcatttgcacttaataccatgttaaacatgaacatcacctaattacacgaaaacaaaatacaggaggactgggtgctatgcagggtgttctacaagaccagacaaacaattccaagcccatcatctgaagaggccgtcacactgcccaatgagctagacctgcctgccacgccttcgctcccgcccctcatcgatgcctacatcgccttcgatagcgcaccgacgacgacgccatcgatggtcgggagctacgagcaagtgtcctgcttctccggcctgccggcattgccaatgaagggctccatcagctttggggacctgctggccatggacacctctgcagagaagaaggccatcagggtactgcacaacagcaacactgcaaagctggagctctccccagattggggacaggagagtggcctgtcacagatgtggaacccccaataatgatcttgatcttgatattgatattgatattgatattgatattgatattgatgatgtttgtgttgctacttgctagatagcgattactactgaatgcagtgtggcaaataacttgtaaagaggtgacatattctttcctctgctggagtagtagctgtgcatacattttgtatttgattggaaaatttgattaggggtgtgacatacacagtagagtagtgaaaatggcttggtgtagaatctgtacataggattgcagaaaagggttatccctttctctttactctctagatgtatttgtcattgcagatgaataaagatttcagagacaggcattgtgtggataaaccattcaacaccatttgacttccatttactgttccatttccattttttgtgggcttgaccatttgttgtgggcctttagtgcaaacaagctaataataatgtatggtctgtttggctggggaaaagatttggcctaggaaaaagaacagggaatttataattttactgaatttcagattagagattggtgtgggatgtataattgaactttatatttgttttgaggattgggattagaattttagatttgaactggactaagattaagatccatgtaacaccaaaagaatcacttttttaaaattacatactccgattttaattcaggttcattgcaacagcacactaactctgcagccacaaaattatggtgcaccatgtgcctgcagaaggtttatgtttgacaaccttcaagtcatcgattcaagctgtgtgttcttgggagtgttcttgagtgctcatcatctgttttgtcaacctgcacatttcagtgacccaccatgacgatttgcaagcctgaatttgatttctaactgttcctgttgcctgaaatgatcttcaggctaacgatgcttctctgaacattctttcctgataaactacctgcaagttgccagggctctctagttgcatgacctagaaaaaatactcttgttttgatccataccagagtttttgatccattctagagttgttcagatggctccatcagattactgaagtagtagattaatgtcgtaaacattccctcgaaaaggatgtgattgtccaagagtatttgtttactccaagttgccacttaaacattcaggtttctatgattgccaacttttcaagttgttgagttgtgatccaaatttatttacacttaataaaggccagcttctgccgtagcggagcgaaggctgaagttggcccattgggctgtgcgcctggggatgcccgggggtgc

SEQ ID NO: 2357 - DNA, 4448 bp, Oryza sativa
ttcaaattgtcagctggcagtaccttcaacctccttcaaggctgagtccctttccgcagccagttctaccttgtctcttttcaaggcttcaatttgtttctccatctgagccattctggtggcttgcactgtttgaaatccaaatgtttgaggatacagttatgacagcataaatcaatggaatagatctggaaggttaccttttgatgaaccacttagctcgaagtttgaatcctggagctgggcaattcggtcccttaactccttctctgtctttttagcatactccttggcctcatgcagctggtccctaacttcttcaagagttcccaaatgaggaaccagcttttccaaagttgtagtcttggcctcattgcgaagatggattctctgcatgatggatcatggttcagttctgctaaagagagaacaaagttattaaagacagtcacccggaagatttacattcacaatgcgagtggcttctccaagtgctttcttcagctggcacacttcctcatcttctttttgacgatttataacgatgccggcaacttgcgagttctcgtcccaccatttgagcaagataggaggacgggagtcatcagccgcctttatgcgaggaattgtttcttcgtcatcgcctagtgttcctgatgtatttccaagacattagacgagtaagctgaagttatttaaatcggcatcacttgagaagatgtgttacctgaggatgttcctggctgaacatgaggtggtccttgttctttatttagagacccaatcattgagtctttaccagcctctggtccttgggaagttgtcgtttgcgcttcaacttcagggatttcttcatcgggacctacatccgactggtttccagtcgggggctctctggttgttgcagtttcagttgttgccgactggtttccagtcggcggctggtccctcggattggccttgtcatccgaagcatgggcgccagtcggctgactttcggcagtcgactggctttcagcagtcggctcagcatccttggatatatttggttctgtcacagctggatcaggatctttcccggttggatctatgtcggatggtttcctgcaaagtgttctctcgatattcagcgtaatctctatgagagaagcatgtcaaagggagatggcaccgagaagtttttacctggaggatgttctaatctttggcatttgacggccagccagtttcttcttgggcatgctacgctttgggagtttgtgaggcgagcccttgtccccagatttgtcgccgtcgtcaccttcgtcgtcatttagcaccagttttctcttgcgagaacctgtctgcccagtcggttgggaagtttgaggttgcggatctggtctgatcgctggccctccacctccctggacggtgtgctggcgaggcgatcggcgctgagtgactggggggtcagacttcatcaaagtatattcctaaatgagatgcttccacagttatccaactcaacatggagatgaaattatgttttgaccttgggttgaagattttcagatacatacctgcggaggcggattgaatgcattatatggcacaactggcagctggtgtgagtagctaacgacaatggcattttagaagattttatacattctctccttcatgattttgaaatccagagagtctggttcttcacggttgggatcatgcttgccgtcgaactcgaatgctgtacgagatctttctttgattggcgccagtcggcatttaatgaaatgccgagtaatctgctctccttgcaagccttgttctttgagttttaacatgcggtccatcaactccaaggcttggactgcttcatctccgattggaagagagttccaggtatcttggtacatcggaggaagacaagagtactcgggaagagcaggctcaggattctgaacatagaaccagtttgcatgccaccctttgtttgaagtcttgaagggcatggaaaaatacttttggctcagagttcccctcagctggaatcctgcctccccgactacgcacggtttgctcttgttcggttggggtttgaggaagaagatccggcgaaacagggcaaagtgaggcttgattcccaaaaaggcttcacaaacatggacgaaattggcgatatgcactatggaatttgggtttaggtgatgcaagctgattccatagaagttcaagatcccgcggaaaaatttcgaggtcggaagagcgaagccgccgtagaaaaaatgcgagaagaccacaatctcatgtgtatcgggggtcggaaaaatctcaccgcacgctggccgccacccgatgatctccttagcagggagaacgccgtgcgccaccatttccttcaggttctcttccgttacgtcggacggcgcccattggccttcaaagctttctttctcctccgccatcgattttacccgaatgcgttgatttgattcgagggatggccggggagaagtgagggattgaggcggtggatcacgggaaggattttgatgcacttttcgaaggtgaatttgagtggagtggtgaaccctagttcgccggcgcggttctgcactgtagcaaggagtggggaaaatggcgagagttccggcggggaagacgaagcgtcgcttggatctcgggatttcttgttaagggtatcggaggtgcaaatgggcctaggcctgaacagtacttcagcccaatacttttaacagcgtggcccattgtgttccttagggacttaggcatattttgctttggcaatattatgcgcacaatagtgttgcccaatgctgataaaatcctttttatgcggtcatataattctttggaattattgcaatgcaaattaaaaggtgcccgacagaaaggtgttatactgctttttgttagctttattaggctacaaaagctgtctgggttaatttggaatgacttgtttttatcatagtcgcttccttggtatgttatatacctattttcattatggtaaatagtcatagcctaggctattagacttactcattaccataatttttataatacttggtgggtaatctttagagttttatattcggatgcctgtccagtgtgttcattcgtgaaccttttagagtgtaaaccactcggatttcttttattatggctaaaaagcagtcggctagaatgcctctttaggcgccgcgtgtgcttttgtcatatgatgcatgattgtgctattatattgttctcaactatatgtttagtttgttaactaatcacatagttgggggctacacctaattaggtgcgtctattcaatgcaccatactctttatcttttcgccctttacagtcttcgtcttcgctactcggcaggccttggcatgaataatttgaagcactcggattgctatctttgagaaggctatggtggttgactgcaaaggtctcgggggctactgtggagattatggatatcccatatctacacggcgatactatttgggctggacataggataccgaatatgtatagaatatcttatttgtatctcgggtttgtttcttaacttgtacaacaaggaaacaccttgagacttagttggttacgactgtattttgtctgtgtttgcatattccgttagggatatgtattctcttttgtaatacggactccttcccatatatataaggggggtctaggtgcctctaggggcaggggttgaattttctccaaatcatacaatcaataacacactcggcggattcatccccggacaggagtagggtattacttcttttataagaaggcctgaacctgtataaatcctttgtctccaaacccatacactttcctagcttgatagccacccccttttattattgtcgaaatctagtttcgacaaaatggtatgtgtatatgttaaaataatgtaaaaatgatatggagataatgatttagcattacttgcatattatttacatgatatttaatatattctagataataattgctagtgggtggtgatgtggtacacttatatgtgatttaaaatactctaaataataattgctagtgggtgatgatgtggcatacttgcatattgagctttaggagttagtggacaccaactttatagtaagataggatgtgtacagatccaaacacagtaccaaatccaagggtgaattttgtgaggtacctttcaggatgatacaactgttataggtataacagaggggtaaaaagtttgtaaacattaccataagataatcgtaggcccctttggtttatgctttttgaaatttttaaaacatcatggaaagttaactaatatctctgaaaatcctactgtcggtgacatgggaccgggagtatcgtgactagaggcttgggcagccgcgctcacccacgtggcctgatcccctcggggggggagg

SEQ ID NO: 2358 - DNA, 743 bp, Oryza sativa
attcctgcaccccaaatttatctcttcacagcccatagaaaaaaatataagagcccatgacgatttatctttgtgaaacaggcccagacttgcaaggagagaaagcaagaaaaaaaaagcccatatacacgtgttttgtccaaaaaaaaataccaggaaaaagaaagacacacagatcacgcctaccgtctgccagcatcacccaccatcatcacccatccaccaccttgcgatccaagaaagaaaaaaaaagaggaggtcagctcaatcgggaaagagagaatagtgtgtgcaaagaaaaaaatctgcatgcatgcatcgtttttttttttttggaaaccccacggggtagttgtattatagtagagggaaacactgtataatagccatgcaggctaggagactacaaagaaaaagagaaaaaaaaagaaagcggtaacggagggtgtaaccacaaaaaggaggtgtacgggttgttggttatgttgatctacacgctgtcatttgcacttccatagttgttcgccgtcaggcactggatgccctttgcccctcccgcgcaccatagccagatctcgtcggtcactttatcaatgattctgtgcggcggagtctctaggtttccgaaaaccctgctgtttctctccttccaaatctcccaggagagtaggattagaatcgatttgacccccttccttttctccttagccgttgcctgaactgtttggacccaccagtcctcc

SEQ ID NO: 2359 - DNA, 2092 bp, Oryza sativa
  unsure (1)..(2092): unsure at all n locations
gttgaaggttggctggacttcaaattcgtcaaactatatgggggtttgtcattcgggttgagctcagacttcttgtgcaaccttggtcgacaggcttgttgttatagctccttacatttaatgatgaactccgtgaaaatcctgtgctgagtccggcgaatcaaattgtacggctcagcaaaaatcctctgtattgtgccgtttccgtggtggcagccgaagaatattaccatcctgtcaagcggagtgcacgcccaatgagacccaaggaagcagtcgtcgcggtaatgccggaactccctatcaacttgcttctttctatactgctcggatatatcaaaaaagatgctcctttagttcagttaatcctccttttaaaaggatagctctttgctttcagcttctgtcttctggcaatgtactgggtttattaatttattccatataatctctgttcttgcttaatgaagtgattgtgtgatctcaagaacacaaaaaatcctcccaaaaaatggttccaatgacgagtgggcccagaagacttggtagtcgtagataacgaaacccttggtccgtgagcgtgacacgcagcagttgaaggctgagaccggagacggagacggagagagacgacccgagcagagcagagcagagcttcccctcgactcgatcctcttcctccctagggtttccgctcctcctcgatcccgtctcgccgccgaagtgcccctccccttcctccccccacccccacccccacccccgccgtnaatgcgtggcggcggtttcggtacgtcctcgcgatcttcaatcgcccgccgatgcatttatcgcctctctcgcctcgtcttcttttttttatgggacagtcagtcgaaacattcttgcttgcgtggactcgcgcattggaggagatttgggcattggaacctcaagcgttaggttcttgatccgaggcctctcctgtgctgtgcaaatcccgtagaatttcactctttttaacatcatgttcaggtttggatcctgcaagttgcaggctgacggggggtgctattattgccatgtctacgtcatccttatctgataaatccgtaactctaatcctgttgttgtaatgattaatccgtagaccggatcccattttccgcgtttataatagctctggttgtgttttgcttggtgcggatgccacatccatcgcttagtaattcaaatgtttaatagcttgatgttctcagttcatttataatgcgtcccatgattttaagcctgcatttttcataagcagttcattaaaaatatgatttttatcgtgcatcctcttttgcagttaacgaaatgaggcatactggcaaacgccttcagcaacacagggaccatgacagagaagaaaggagggaccaaaagaggaggccagtgccacgtgcccaggaaaactctggtaatgatgaattggttgtttaccgcatactctgtccggacagagtaataggtaatgtaattggcaagaacggcaaggtgataaactctatccgacaacagacgagtgctaaagtcaaggttgtcgaccctcaccctggtgcagacaagagggttattttggtatattgttttgtcaagcatagaaacctagatgttaatgacgacgatgacagggagcctgtttgcacagcacaagatgcattactcaaggtacatgatgcaattgttgatgctctgtccatcactagggactctgatgatgaagaagcaaatatccttgtaccagctagtcaatctgcaagtgtcataggaaagtctggtgctgtcatcaagaggcttcggtcaacttcgaaagcatttattaaagtgagcccaaaagatccaaatgaagttacacattcatgtgctatgagctttgataattttgttcaggtaatttctcacatcttttacttttcttaatttaaatcatttgccaacataataggagattaacaattattgaacagtttgaggatattgagcagcatatttgcagtaatttccttgactttcatacgacttgtaataatatcatcatatatattctttgtttgtgagtgaccatgca

SEQ ID NO: 2360 - DNA, 602 bp, Oryza sativa
acatcatataatcttacataagagttcaaaagagtacatgtagacatcatataagcagcagaaggaatattgagatatcgtatgtctaaaaacgtgaagcaaataatccgtggtaataatacggtgaataaagttgtaaagaacagaacggttggctgtaggcaatgtaacgacacgtctgaaattcagaggccgccatcatattcagatataagtatccggaaggactttaaggtgtacatacctatatcagatgcagagtaatatcacatgtgcttggaaggaccaatttgttagcaatttagcatgaaccgtgcagctcgaattcatgctggttcacatgagtagccaaaatttttttgtacattagtgacttctacctcaattttgaatgtattgtacagcagaaaactctctctccccctccctctctttcaatttctttcatggtttcacatctccatggcgtcctgcgccatattctgcaaatcctcttcggttaagagagtcttgttgccgccgctccccgtcttatcgtaaggctgcgccatcctccgtaggaactgttatacaagatggtaataccagatgttagaatatat

SEQ ID NO: 2361 - DNA, 10233 bp, Oryza sativa
tgggggttagttttaacatgtttggtaacaaatatgttcttatgcaaaaaaagaactacgataacaaggaggcagtaaatattggtgtcaaactaaaggaaagatcatttgcctgcaaaaatcttgaagtggtgaatattagatgctctaaagatgatggaagagtccatatgttagcagaactctttggtgctaatgggttacctcttgagaagatttttgttcgccgaacaggcagcacctgtgagtaattctttctgatgtccttatgttcctttttacccatgtatttgcagtctttatgttactcgattacagtcttctagatctaagatattatgttccttacaagctaaaaagaaaatggccttgtttcgatgttgtaattatgcttaaattggtagatacaagcaagaacttaaatctcaaaattttctttgctctaataaatgtgctatgtgtgttgaaaaaagaaataaataaatgtgctatgttattccatctctatatatctgttccttgttgtgacaatctaaaacataagccgttggcttttacatgtttcttgcagaccttcgtaacatgaaaaaaatgagaaaaattgccagggatgagctgcgaaaagctaggtggttccagctgttaaatctataaacactacgtaagcaacaaaattacttgtcttttactttttgttaaaatgctttctgatgactgcaaaacatttttcttaatagattctaaggacctgatggccaacaaagttagacttcaagcacactgattactcgtccaaagttgtgatcgagcttacctcggcccaagaaatgttacaaaataactatgcgattatttaggtaaattttagtttctttcctcgatctgcacatttcttccacttgggcatcaacctttgatgggcatgtgttgtgctgtgtgctgatgcttgaacaaagtttgttttagtcagaagtttctcatgctcctctgggcatgatgaaaccgtgactgccaattgtaagcagctagcttcaggcagtgctacagaatggttggttttacttgtgtgtcatgcttgagcttgcattgtttgcgtaacatccctagattggtttcacctgaaatgagcttcatcatgtactgtatggcatctgctgatgagcaggtccgaaacacggatgttacagtgttagttggtaggctattattaaagttttctttgtttctagtttcactctgtcaacaagtatagattggaaaagtctgttcttctttgctctgattgtttttcttgtgtatatttgttaatgaaactgggcagtatattatagctgaggggagggggaaagagattaggtttataactgaggttattattattagattgtttgtacggagtgcctaactagggagttctttatgcaactttcagtttttacttataccaaatggataatgttcgagatagcgatttcatcaattaattgagctcgtcatcttttccaactaaaaattataggaacggtaagcaatcacaatattcattcaatctccctgatgaacattcttaaatatatctaaatagtagcacaatataaacttcagctctcaatcaagctagcctatcccgaagaaagctttctgagaacattgctgaagagatggccctcttgaatgttgatagcacatactccgctaattcatcacctcctgttcttcttgatcacaaccacttagtttttttttcccaatatcctgtttctatcaagttctctttctaaataaatagatgtggggaccttttattatgtattcccctgaactatgcagaaccatcaaattatatagcatttacaatgaatgaagtgtcaagctggtgatcatagccatggagtaaatattagatggctcttgctaagattgtgttgggagtttggccaccagagctgaacaaagatcacaaagctagttcatgcactatcggtccaccaccaagcatctgctgcaacagaatcacatgtcctactttgttatctccagttgaacggtaaaagaaaacctgctctattttggccagcctaaattgaacatgaattcccattgcctgtcattcctactgatttttttttactgcctagttagatcatggttccttacactgtctttcatttgcttccatgatcctgcattctatatatcatgggtgagcgatggccgatgggtacgtgcaatgtatggtatgtcgtcaaaaatgtgaagtagcacaccaaccatctgaaagggtttggaggtagagtaaagtcacttgtaaaatgtaattcaatacttactataacaacattgtatttatagccataaataaccagatggttcatgatatttctgacagatccaagtaaaggtagttcagagtgatttctggacaaactaagagaaactagttagtggttggtggtaaaatccagactctaaacagaaaattgtgatacaaacttccagttatttttcttcctttcttcactttgttgttccaatcctaataagagataattgcaaaatttatttttttttgttggtagcagttgcctaaccaccagctaagcaggagcacaccacacacttgtacatccaaatatgtgatctaagtcaatgatgaatactcctggttaactgtttcagctctatttcgtcatcttcgcatatagtcatatactcctgtgtcatgagtctgtcatgtttgatttaatcttgcacaaattatatggttacacctgaatcacgattctttgcggtgtatgcacccaactataattgtttgaatccccgcaaaaacaaaaagccacaattgtttgaagacattaatctttcaaataaaattccagcttcagatgagcatcatgcatgttggattgttgggtgcaccttttttgcatcctggaaagagtgaataccggatagtaagaaaacaaaatagaaagtgaaattaatatatgaacctaattaccttgcgtttaatcaagttttcacattgcgggctactggatttttcacaatttggtcattttgaaaaacttattttgcaaatagacctctgaaaaaacttatccgagaaatggtcctttttggggcgccagagtagctggcgtcgtcccgtggcggccagatactgacgtggtaagaggagcgcgccagagagggtggtgcccccctccccctggtcccgagttctccctcccctctcctcaaattcactcgagattatatcggtaagagacttcatgttcttcgttgttttttttcctatattgttttttttcctatagtccaaaaaaaccaaaaaaaaatagtacattgctttttttttttacatcctataaaaaaataagggtttgttgagtttttttcttttacattcgagtgtccttaaaacaggtataactttctcatacggactcggaatcaggcaaattatatatccacggatatgtacagaaaaagttacatccgatccccccccccccccccccccgcttcgtcgggttcggagaaattagaacctctaaattccgcttgcaagattgtacctctaaattccgcttgcaagattgtattttcaagagctttggaaaattttacaggtcacatatttcatccatttgagtttaacttttctatggttggtccttatgggctcctaagtatgaaaaaatatcaaaaaaaaaataaaaatataaaaaaggttgtacatctctcctctacactagagaggagaggaaaaaaaatggcttctgattttgggagaagctggagcagctagaagcttccctaaaccagcccatagtctaggcccaaagccccatccaccccaaggaggtaaacacatcttagaataatggaataagttcatccgaggtccctgaacttgtcaacgaatccgattttcatccttgaaccccaaaaccagatacaataggtccctcaactatcaaaaccagtgtagataaggtcccttagcggtttatatggcggttttggctgacgtggcgcctacgtggctattttgactcagtctttatcagacgtggcgcttacgtggcaattcgatctagaaaaataataaatccgtgggacccacgtgtcagttacaaaaaaataattaaaaaatggtgaggcccacgtgggccccatgtcatcctcaccctacccttcttcctcccctctctctcttcatctctctcccctctcctctctctccaggcgccatgggacgggaaggtttggcggccggcggcacagcggcggcggcggcggcggcgcaagagaaggggagggcgcaagagaaggggcggccggccgggttcctcaagggcggcgacgacctggacgacgacgacaacgactgcggcagcaaggaggcggcggcgggagcgctgggtgaaggggtcgctcgtccatcccctcgggcgagggcgcggggagacgccgcgggattagggttctgtggtgttgtttttggttttttgctttcggattggatttcggggcggcgggggctcctccggccagccttccctcgcatctaaccgcaggtaacgattgattgattgatggattggatgtcccccatgatttgatctggggacaagcggcctccgccggtgcatgtcctcgtccccgcaccacggcctcagcaccatggtgatttatcgacctgttctcttatgttggattacaaattagaacaatgtgaaaaaagcgtcttttgatgtattggttttggtgattgcatgcatttcttgaatgagcagatccgtccgccgctgccgccgtcaccgccgcgtcgccagccgccgtcgccggccgccgaacttccccgtcccgtggcgcctggagagagaggagaagggatgaagaagggtagggagaggatgacatgtggggcccacgtgggcccaccattttctaattattattttgtgtaactgacatgtgggtcccacgggttttattatttttcttggatgaattgccacgtaagcgccacgtcagtgccacatccgatgaagaccgagtaaaaatagccacgtaggcgccacgtcagttaaaaccgccatctaaaccgccgagggaccttatgtgcaccggttttaatagttgagagacccattatatctggttttggggttaaaggatgaaaattggattcgttgacaagttcagggacctcggatgaacttattcctagaataatatatctatatggagaacattggataagatataatgataatctcccatgactaatcatgatcctcatcaacatgcaaagacgaagaagagaatttacctaaaaggacatttccatgataattttacggtagaaagggttatagacaaattatgaatctttgatgaccaactgtgatcttcaaaatctttgtcaaatagagctgattgacggatttttacctaattacaagggacggtctattacccatctataagataagacccccaaaatcatacaaatactggaccgttgaatcactttgagattcgtgcgccaccccatcttcctccgttccctttccttgtctagtccaatgcatgtcccccgcgctgccccccagccacatcagggaggtccactagacatcccccttccccctccccacctctccttctcctcaagctagcagcggtgaggtgctcctgcccccacggtcttgcccccctctccggtagctcctcgccatcagatccgccagcatcggccattgcatcctatcctctcactttgctttgccccgttgtcgaccatgcggctccaacgctgccgccttgccacccattcattcctccgcccaccagaagtgaataaagatccatcacaaagctagtaagttgaaggactaccactctaggaaaaacatccgcaccgatgcaattatttggatctccggtaaaaaaaataacatttctaccttgctgggctacgttaggtgtttggtatcgtcaaaataaactagcctggtgagctagaaaatcgtcgtccagggaggagagatgaattggctcgccttcaatggaaagatcgctgcgcgcgtgaagccatgaactgggtggacatgagttcatgaaaaaacaggattgtgtgccaaactaaaatattgcctcgccaaagtaaattagccaaacagctagcgtgctaaagaaagcatggcaatgcccctgtgggctgggctagttgggctagcttagcaccttagcaactagcctagctcaggagaggaaccaaatgaggtggtgtttggatgcagggacttaactttagtccctgtatttagacactaatttagagtattaaatatagactacttacaaaactaattacataaatgaaagctaattcgcgtgataatttttttaagcctaattaatctataattagagaatgtttactgtagcatcacataggctaatcatggattaattagactcaatagattcgtctcgtgaattagtccaagattatagatgggttttattaatagtctacgtttaatatttataattaattttcaaacatccgatgtgatagggacttaaaagttttagtcccatctaaacagggtctgaatctgtcatatcgtgctattgctagctgaatgatgaaagaaagcctgctatattttggccggtctaaactgaacatgaattcccattgcccgtcattcctactgatcgacctttttactgtctagtgagagcacccttgcttccattgtctttcatttgcttccatcttcttggcttacaagtatgatgccatgatcctgccgatctatttatcatgggtgagcgctcaacacgtgcaattgtatgtaaaagtagcataccgcaaccatctggaagctatggagttagagtcaagtcattctagcatttctcacatttatattgatgttaatgaatctggataaatatttgtctagattcattaacatcaatataaatgtaggaaataaatgacttacattgtgaaacggaggaagtaattcagtattgactatacaacaacactgtttttatagccataaataaccagccttgtgatgtttcaacacatccaagtagcatgtaggtgctgaaagaaatttctacggacaaagtaagagaagctagtgaggttgggggtaaaatccatagacactcttagacagaaaattgtcatacaaacttccatttatttttcatcctttctttcttcacttcattgttccagtcctaatcaccgcgatggggatagttgcaacatatcattttttgttagggcctgtttagttggtgaaataaaaatttttaggtgttacatcggacgtttgaccagatgtcggaaggggttttcgggcacgaatgaaaaaactaatttcataactcacttggaaaccgcgagacgaatcttttgagcctaattaagccatcattagcacatgtgggttactttagcacttatggctaatcatggcctaattaggctcaaaagattcgtctcgcgatttacatgcaaactgtgtaattagtttttctttttatatatatttaatgctccatatatgtgtctaaagattcgatatgatgtttttgggaaaaagtttttgggaactaaacaaggccttaggagcaggtgcctaacagcgaataagtagcataattatacatgcaaatatgtgatcaagtaaatggtgagcattcctggttaattaattatttcaagctctattgcatcaactttgcatagtcctattatttagttactcgctaacagaagacaatcagtcggaaaacaatggatgtagatctcagctgaatcaaatgatcctgaacaactgaatgaatctaactaaaaaaaccacccctttctaaatgggcagtttgtctttgtggaatgcggctaagtttttttttagcgattttgtccacaatgttctcctcaaagattgatggttctatgcttgatggttctgtgcaatgctctagctagcatgaaaccgttggccatgaagcttcaagaactagttgatcttcatcctctgaccaaaacatttgagaaaatccagattgttatgcatcatccatatccttccctgatgcctccctttccctgttggctctggtggctcagaacgtctctcatgctcctttgggtacgatgaaaccgtgaatacctttcggaatattatgatattgccgctagactgcatataattacaagcagctttcagttagtgctacagaatgattgatcttgcagttgatatagaggattcatctttccttttcctttcccgttttatcgaccaagtgttgatactcttcttcgattttctttctgtcctcctttggtcgcagcctccttttttttttgtttctagttttggtcttgtctggataactggatccctgtttctatgaagttttctttctcaataaaaagatgcatttacgtagtcctataataaaaaaaatctttgtcaccaactattttatagtgggtatggtgtgtcatgcgctttatgtcaaaaaagaaaaaaaaagcaaaggagtgccatgcgatcatagccataaatggctttggctgagattgcatctgaagctttcccaccatatcgagaagaacaaggatacattactgtaaaatcaaagtgcgtttgattcttattctgtgatgaacaattggcatatgagattattggttttgatatttggagattattggcgaagtgtttttagagatgattggatttgtaggtgatgaacaggaactgctgttttgtcgggtccggttagactgggcaggtgttgccggttagaccggtgtgtatcgtgcggtcagactggccagcccgcggtctgaccagacgacattgtgttggtttcgggttgtttcggccgacacttctagatggatatactatgcgtatgtaatactgttgtttgctaacaatgagtcaaattggagatagcttgatctcggaatatggtttctttgtttgattcatgtgtaggtgtcttgatgcctcgggagagtattgctgatgatggatcgagagtcaacttggagataaggtggcgttcggacggtcagatatcatgcgggatacttaggctaaagatcaatgcacgtggttggtgaagattccatatggcatacgatggagatattgtgtgtgtatgggatgcggagtcgaatttggagggagtccaaatttagtacaattggagtttgtaaagttggtttcttatacgggaaggtttactaggtgtattaggacttcttgtatgagtttggttcgtggctttaggctgcatacctcatgtatagatagagagggagggtgaggcctcccggtatcgtttaagagagcattgagttgagagaatagtaagagtttcgagtttagtcgagattttcatgaggagtgctgttgttgcactttgtaaacacaaaaagaaataaaaagttgtcatctactttgagagtttttcgatcatgtttgttcgggttcggcggtctaaccggtgagacaccaacgatcagatcggcagcaacgcagcggtcagactggcgggacaatggcggtcagaccggcgacggcttcaggtgactacagcttcttcgggcagttagaccggatgatctactccggttagaccgacgacttccaggcggtcggaccggccgatcatcttcggttagaccgtagatcatcgatttgagggtaacttttaattccgctaaaagttttggtttttggatactacaaccattcaccctccccctaccctctggttgcgttggcttatttgttattgttcgaccctacaagcacaaagctagctcttcagcttcatcggaaagcatctggtgtaatgcgattgaaccgtagtgttgtcttgggtgctatttcatgttctctgcaggagaacgatgagggaaaccttgctctattttgtgctatctatcttgaacttgaattcccattgcctgtcattcctactgatcttttactgtcttgatgagggtataaataaaaacttgccattctctatcatgtctttcgttcgcttccattgtccggccttacaagatagatgctatgaccctgtctcctttttatcatggttgcagacattgcaggtgatgcatacttgcaatgtatggcatgtaaa

SEQ ID NO: 2362 - DNA, 1673 bp, Oryza sativa
gagcataattatataattatatgattatcaatttagaatctttacttttttatatagtgatcaaagtggaataaagcagagaaacttagacttcttcaccaaaatatctataatacttaaaatgttagtatttttgtattcattcccacaccacctctgtcactaacagccggatctcacaatatatactaggggcatttgcaaatttgccaccggttttttcaatattgcaaggatgccactcgaatgacagttctaatggcatttttgcaattttctagtggcagttttgcaataacgattcaaagtagtggtaaatttgcaattgcccctatatactattatatcacctttcaataagtcataccctattgcactattggctcccctaaatttcaaaatcacctaactgtgttcaataagaaaaatcatttttcatagtactacttatactaacacagaaaatcatagtattacttatgcttaataagcgcttattatttgatttaataaactagtccctccgtttcgtattataagtcgtttgacttttttcctattcaaacttttgtaagttcaaccaaatttatgaaaaaaaaatataataatatttttagcaaaaaaatatatattatcatttaatgttagatttaatgaaactaatttcatattttagatgttgttaaattttttcaacaaacatgaccaaacttagccaaatttaactaaaaaagatcaaacgacttagggggtgtttagatctaggggtatcaagttttggcgtgtcatatcaggtattatatatggtgtcgcatggggtgttcgggcactaataaaaaaactaattacagtaactgtcagtaaaccacgacacaaatttattaagcctaattaatccgtcattagcacatgtttactgtagcaccgcattgtcaaatcatgaagcaatcaggcttaaaagattcgtctcgcaaagtagtcgtaatctatgcaattagtttttttagcctatatataatatttcatatagatgttcaaacgttcgatgcaacggggtgtaaaattttaaggtgtgatctaaacatgcccttataatatggaacatgggagtacaaactaaatttattttccattgcaaaacaccggctctaggctagtacttcctccatcctaaactaaacgcatctataagtttccgtgtccaattttgatcgtccgtcttatatgaatttttttaataattaatattttattattattagattataaatatgaataatactttatgcgtgatttatgttctataattttttttttaaaaataaaacagatgattaaagctggacataagattttttttaacacggagggagtccaactcaacctgataaactccccgcggcctatacgcatcgtccccttcttcttccctcacccccttttcccaccaaaaaccctagcctccccctcctcttccagattcatcgccgccgcgccgccccgagcccagagtagccggcgacgatgccgcccaaggcgtccaagaaggacgccgcccccgccgagcgccccatcctcggccgcttctcctcccacctcaagatcgggatcgtacgcgccccttaattccccaccgctatatctctactctcctttgcttcgccgtcgacgcg

SEQ ID NO: 2363 - DNA, 517 bp, Oryza sativa
caaaacatgtggtacataaaagagagatatcctggtatccttacccttgttctcattgatggtgcaatactcgacattagaatgcttcttccgattcagccaattgaacacctggtagtgccataaaaacataaatcaccagtaatctcattagatataagaacagtgagttgaatccaacgcacttgtttaagagagacagaaactgcaaagacctgtactttacagcatacactatacacggacaaatggtgtatcagcatgaactaactgtgtacctttagagccatctctctagaaccaatatgaaaccagaagagaaagccagacagtagctcagatcctcaaatgcatggcatggttttataaaaagacactagtctcatgattgaatggtccaggagacagaagaatggacttttggttgcaactggcttggcctgactcactgaagtaaattctttcaccaaggtagataagcacactttcgacagccatatgctacattctgttcaaa

SEQ ID NO: 2364 - DNA, 1946 bp, Oryza sativa
tcctcccttttgttgtagttcctcagtagacatccatatcacatatgcatgtttctgaacttggtgcattgtagcgagttgcatctcctcagaattgtcatgtagaacagttgtagttataaatcatgtgcatcctacccttctgtttcttgcttcggaacaagcagtaatacattctgaataaatcctggtgtcaggtaggaaatgggtactaaagcaccccccctggtgatatgctccaaccttttactgtgctggatgtatgcttgttgtacacagtaattctgtctcatgtagcctgttgattgtcctgcttcttttctgtattgagattcttgtatcagttctgggattgtaggccatttcaaatcttctgtttgttctgcttgcaacctggcgtttcagatttttttttggtgctgtttatcaggtcttgattctgatataattttcacttctgtgtatgtacatggtcttgttaaggagtataaatggaaaccataattcgacttttgccagaattgagaattggtaacaaccatttgatttttttttatgaattattcgtaccgattcgatcaattgaaaccaacgccgtgtttagtactaaaataattctaaaagctttcaacttttttatcacatcaaaacttttctatacacataaatttctaactttttcgttacatcgtttcaattttaaccaaacttctaattttggtgtgaactaaacacagcccaattgtgacaagtatcacggcaacctgaaattaatcctacagtacaaatcaaaattttaaaaatccaaagaagtaacgtaactactcgtgaattgtcttgatcctctgacctgactggtgggccctctagtcggcgggtacgattcgggaacccaatcgccgaggttggcgggcccacatgtcagccagcgcaggggaggacaaaatttgacgacgaaatctcttcgtcacggggagtcgagaggagaggagaggagagaggaaaagagagcgcgatatgggggaggaatcgccggcggccggcggtggcgcggcggcggcggcggccggaaaaccatcgggcacggcgcttccgaggagggggaaatcctgcaagggctgcctctactactcgtccatgctcagatcccgcggattcaaccccgtctgcgtggggatcccgcgctccatcccccaaggtaaaacgaaacgaaccctaatctccccccccccccccccaaaaaaaaaaaatcgcagcgcgcgatcgatcggcgtgcgggttttcaatccatcggcaaaaattgtctctatcgatttctggtggttcgggttcagattgatcggagaatctcacgaaactgttgttgtttggttcggtgctccagtcccaagctacgtggtggacgagcccagagaagaggcggcggcgcaggggcatgatttgaggcagttcaagtacgcctgcgctggttactccatgtttgtggtggataacaaagacggccgaagcggcgagaaggagggcaagacgttgttgccatattgccaggggcttgaggttggtttccatctcgtagttattaattacagtatggaatctcaattcttttcgtcgatgttgatatgaggttggtttccatctcgtagctgcagtatgaaatccttagttctctccattgatgttgattggtaatcacaaacatattaatgccaatgaggcaatgacttattatgtaggtagtgaatcacaaaacacgtgatcataggaatctcctacaagaaggaattagagtagtagatgttgatcatactatcttccatgatctttgcattagttttaagacttatatcaaatctcaacattttttttatttcagacaaaaatctatgtttgcctaagcactgtaactaaatgtgatagacctatcttacgattttcgtgtatca

SEQ ID NO: 2365 - DNA, 643 bp, Oryza sativa
caggctacgcagccagaggggcaacctattacttgggctcgcttcactgccgctttccggagaacccatgtgcccgccggagtcatggcccttaagaaaagggaattccgagagttgaagcaaggcaaccgctccgtgatggagtatttgcatgagttcaacaacctggcccgttacgccccggaggatgtgcgggaagatgaggagaagcaagagaagttcttggcaggaatggaccctgagctgtccgtccgtctagtctccggggactatccggatttccaacgtctggtggacaagagcatccgcttggaagccaagcacaaggaactggagtcgcacaagtgccgcttggcgaatttccgcaatcaacagggtgctaaccaaagggtccgctacaccaatccctatccagggggatcctcctcgcagcagcaacaacagcagcagcaacctcgctccgcgcctcgacctcaattcgtggtgcgcgtcccacagccgcagcagcagcagaatcaacaagggactcgtgcgccccgtcctcctacgccaactgtgcagcctggtcaaggccgcagggacgctcaaggtccgcagcgtctgtgcttcaactgcttcgagcccgggcactttgcggataaat

SEQ ID NO: 2366 - DNA, 679 bp, Oryza sativa
aatgaagatcatgttattgcgattccattcctctacttttctcggtcagtggacatcggagtaacgccggcggcgagtccgaaaggaggatgttttcgggtggtgatgcatgtgcttctacaatcatgtattggttaattgggtgcatgcatgtatgttctataggctgaagggtgctcaccgagatgctagacatggctggggtagctaggttgatgacggcggctcgtgtaacggctcggcggcggcaagaacctccgggtgaacggcgatggctcaatcagctccaagaactatcatgcatgtgtgtccatgaggttagagaggccccagggatgctactgatgcatggaattgggttggtactcaccggagggggtggattcggcaacggcgacggtgaccggaggtggagaagacggtggacgatctccacactcgtagcaccatccttcgagattcttgaggggaaatggagaggaggtcgaggcgaagacgctggcgcgacagcttggcccggcttggtccagataagcgggaacggcgatgatgtcactgcggcggtgcacagagcgcgctccagagctccggtgtgcacggcagcgttcccgtcgattggctgcaccagagaggatgaaatcaaaaggagaaatattcggcatggtgggctgcaggaatt

SEQ ID NO: 2367 - DNA, 2626 bp, Oryza sativa
ttgcaaagagtgtttaatcaactccgaaatccattgtcaatatgttgatgcaaatgccttcggtgcttaaatcagcagcagatacaactgtactcttgtgatacactgtcctctttatttgtctacaatttcttttgaaaacaggctatttacattagtatgatatgatatgacatgatcatcttttatcttttagaatgatactggtaataacaggctgttattgcaggcaataaacagcttgtccgttcaagttcaaacagaagggttggaataatcaaaccaaattcacccaagtcccctgttgccagtgcaagtgcttttgagagtgtagaaggatcagatgaggatgatgctaaacaaccgaatggtaaacttgaaaatggctacctgaagatgaatggaaatgttgtaagtttcagccatcctgttgtcattacagtttttcttgttatatagttcctaattcctttattaatcgcctatatttttggagttaaaataggtttggcatcaagttttgcacgcgcaatcagtatatcatgcacataaaggaagtgaatttgtggctatcattttcttaatctattgagcatcgattcttgtggttatctattttcttaatctattattgcattgttttatatgctgtagtttattgatttatcttcttgtcgtttagatttaccttagacaaaagacatcttactggctcaacaatggccacataaatctagctaggcaatactgctggcatgcattataaaaaggtactacacacattgaacactatctgtatttgctggctgcagattttgttagcctgcagattttatattactcaaaacctagtaaccggcaggagataaatgtgagttcctcggacagtcattctacagttagtgacttggtagaagaaatcatattgctaactttagctgtacaaccaatagcatttggtgctgatatgaataaagcgtctgctcagctggctgtgatgctgctgcactgcacagccgcagcaaagactaccaagtgcccaaatatgctgatatttctctctgtttgggggaaatttgctgattttcatttggtacaatggctgcgactgattctgtttttttttaatgtctgatcatatatgtttcaatcaggaaggagaacagaaaggaaacaaagtactggaaaatggggctgcagcgccattagctgcagcaagtttgattcggtctcatagtatatccaatgatcttcatggtgttcaacctgatccagttgctgcagacattcttcgaaaagaacctgagcaagaatcatttattaagctgttaactgctccacatggtatggtattagatcttacagaacagtaatattctccctgtatgaatatcctttaattttgttatacttccattttttatgagcactaccatttttgttcttaagaaaatttgtccgataaaatattcacatgctgtattttatggactatggagttctccatttctttgaactattaggtgcaagtcaagaacctggaatactagtaaaaattcatggagaccatattattgaaatgtatgcatgttagtttcatatttttcctgtcaattagtcagtaattcttttgtattttaatgcatataattttagtcggatacatcaaatttcgttgttagtaagagtaaatatttttgaattaattcttctcatttccctttattcccaaatccaaagtaatttctttcataatattattttacattttatgtagagattccgtctcctgatgagattgaggtttacaagctccttcagaagtgccttgagttaagagactgttatctttttagagaagaggttgctccatgggagaaggaggtcataaatgatccctgtactccaaaacctgaccccaatccgttcacctatgtgcctgaaccaaaatcagaggtagcctagttcatttttttttcagtatttcgattcttcctctctgttttgtccttctgatttctgccattgattatgatttcagcatgttttccaaatggtcgatggtgttgtccatgtctatgcagataaagactgtaatgagcactgcccgttagcccttttgcttcatatgtttgaccagatgctttcaatttcctatgactcatttattttcctcattttgcctcagatacggaaatactttatcctgttgctgatgcgacaaccttctttactgacttgcattatatgctccgtgtgatttctgctggaaacacaagaaccgtgtgccataaccggttaaatcttttagagcatgtaatcatattgtcaaatcattgaccccttgcttaccttggtgaataaacttgactcctaaaattctgtatgtgtgaatgttttttcatttctagaaattcaaatttcatttgatgttaaacgcggatagggagtttcttgcccagaagactgcaccacatcgtgatttttacaatgtcaggaaggttgatactcatgtacaccactcagcgtgcatgaatcaaaaacacttgctgagatttataaaatccaaactaaggaaagaacctgatgaggtatatttttgaaacaattgctgaactgactgttg

SEQ ID NO: 2368 - DNA, 3149 bp, Oryza sativa
tgaccatcattgataaccgttgctcgcatcatagctcaagggagacgtcatcaagttgtccaagttctacaatccaattcggttacctactacagtgttgacttcaaacggccactaaatatacatacgaactccgttttgggtctatgagtacctgatgaaaagcaaccagagtcctctttccaacggatcaagccttatcttcaaatttcatctcagtcggtcgcaatcatagaaacaaagtattgtgtcacctataatgggcatatgagcttataacttcatctgggacccatgtggggtgcgtcacagccaggtcgagcacaaccgtagggatcccttggccgtcttcccgcctccttaaatagctaggtaccccttcaaggttgctcggggttttgtttataaattaaagtttagccattactattttgccttgtaattacgcatgtcagctagaccccctaattactcgtcttcggaacctcacattatcgtgagttctaattcctatttgcagttcagattgctttgtatcttgttattatttgtttcttcgatttgcttgcaggaataagattgatctgcaccggcaatatcaataactcactgagagatgtatcgatcgctaaggcacaacacaacaatatctcgtatggctgtagtcgtgtcaacaacttctctcccaaatcatagttatctttaactcaccgaaagatcgggccaataagaacagttagcgtatgaattgtagcttaggattaccacagctaggcccacaggttcactcatcaggattgtttgtggtaccatagtaatcgcttttataattataaacttatcgttttacctatattaccgtaataataaacactagctatcaaaaactcagtaaacataaattaattaataatttggatattatcaaaagaataaacactcattaaggaagataaggtgatcttttgtactagcaagctaaatgagcaactggcggctaaatgcttagctcaacccgattgattatgactacaagtttaagtcgagctcaatcaaaaccgatttgagccataagcttcgagctatttttttcccaccccaattaatgcccaacttcatagaaccaacatatatatataatacattcacacatgaagttgtgaatagttcacacgattttaaatttcaagttcgaatctaatttgttccgatccggcctatacatttccaaccggtcttaggctgtgtttgaggagaggagatagagaagatcgggaagacacgcaaaacaagatgagtcattatcacatgattaattgactattaactattttaaattttaaaaatgaattaatataatttttaaagcaactttcctatagaaattttttgcaagaaacacaccgtttagtagtttggaaatcgtgcgcgtggaaaacgaaacaaactcactcacaatcacccagatcacccaggaaagaacatagccttaatatgcaatgttccgaaatttggatcctttatggcatctgatgcttgctgcccctcttgcagtacgcaaatatccttggtagaatgggagagaaaatgacgtgcaactatctccgaagcctatctttgcaattttgcatccatccatcccatccatgcatgcagccacttgacctttggtgagcatttcttcttgttcgattcagaaagcgaaatatcaatctcttctccaattctccaaatatgcagcaacttcatggttaattgagctgcacgtgtatgaattatgaaagcaaagcattcatatgaatttcttcaaacgtatgacaggagtgaggaacgttggaggtgttactttctagagataccaaaaggactttagtagaaaaaggaactttaattagactaaagaagacattaaaaagaaactgaattagacgtgattaattcttgtaaagctcctgcactgcaaccacagtgccagacagagggaagaattcttcagccgttcggcgatgcgaaaatgacaggccatggtcccagtgccacggcgccaccaaacgcacgcaagagcgagattaaattaagtgctccccaacaacctcgtggttttcgcgtgcaattataataacctacgtactctgctcacttatttgaaaatgaaagaaacattcttcctctgttctaaaatatagtattagtttttgcaatttatatataatatatattgtttagtaaacaaaataccctacacccatctctgcctttttaaaaaaaaatcaaagctataatagtatactaattttatccatctctttaatacccatcttgaagttatatttttggatagaagaggattagctagtcgtcaatattgctgttgtctttcaaccgtgtctcctagtcgatgtggacatcgttgtccctgtcgaacgggacggatcagatgagccgacgaggcgcgtgcgtggatagtgaggtggatcgaattgcttcgtacacatgtaccattagcttttattcagactgtttgttagtgcctccaaagatgctctcatcttgctctggcaacatagaagaaaaataagtgtgattattattattattattactattattattgggagtaataaacatgaatgaatatcgttgctattgggacttatactctatacatcactcgacacaattcccttttcaaatcacacgaatttaaaatggccaagattgatttaagattcatacaatacctcctaaccatatcctatcctttttgtcttcatcactctttgactccaccgccaccctccgtcttgtgcatctcctctagtgtcggctccagtacgtccatcctccatcttctccaacaacaccgttgagcaccccccctctcccggtgttcttcttctctgactctagcaatatgatgcccttatcccaccggtccttcctcgcctccactgttatcattgggctttcaccaccctaggcatccctccaaaaccgtcggtcactatccccaagacccctaccctccatcacatctcaaccccaaaacgctaatctcaaggttctctaccaaagttggaaactcgctagagacgaagacaatgcataaatcttgaagtagatttaagagaaaatttgatccatagcat

SEQ ID NO: 2369 - DNA, 2546 bp, Oryza sativa
gtatatactcatgtctactgtgaaagagccatttttcttataagagtaagcaaaatagtttttcgcggtcaaatacacttatatagatttgcactgcaaaatgctttgataatattctaattttatccattacgaacatatacatgaatgagaattattggttgcaagaatgcaaggtactagtatcttgccaaaaaaacaaagttaaaaaagaaagctatagcaggaactatgacaagctctacaattaatcgtaaaagagatgggtcaattattatagctagcaattaaccatactatttaacttgctctaagtttcaatattaatattttttttgaagggaactcttaagtgtcaatatgaacacgatacatttgttcttttttagatgttagtataaagctagatgggcactttttctaaggggtgtgtgttttcgtagggtctagtttctctcttttttttcccactgggtgcattatctatggagtcaaacaccacaaactccgaggcaatctacattgagagagggctcaatattggtcaagaaggggatggaaatgattcttggaccaaaggatctgtttgactcctagtcatttgctgttgtctcagaagagtcgcccccctagtgaaagggactcgattggatttatgtgatggcaagctcactcttgggtcacaataatggaaacgtatcctatacacacaggccctcgcgtgtacacatcgtatacaccaactaaaaattatcataaaaaattctagaaaaattcatacatgtactttcaatagtattacatctacgtgcaaagtcgcatcttcaaattcattctacatagaaaataacaaaaaagataaaattctaacaaaattgcaaccttaaaactgtcagattttttgtttttttgttacggctaaaatataatgaatttgacgttaagattttaactctaggtgtaatacaattgaaagtatgtgtatgattttttctagattttttggtgatattttttagttggtgtgcacgtgtgtacacgtgagggcctgtgtgcataggatatgttgcccacaataattcatagcgtttgacactatgtggtaacccaaaccgacatttttccttctggggagcaaaacaagcggcgccactttattcgcaggagtataactgtgtaagaccagttaaagtacatgcaatgttggtatagcatccttcacaaacgagaggctgcacaattacaatcacgccgaagcaattgtttgcctgcctcccctacactacaccccaaaatccagcacccagctgagccgcttcatccttcctaatctagtaagatccaattttattgtgtatatcttgttgtacttttggttgtgctttttgggggcactacttggtttgaagtttctctctcgtcggcttggaacccggacacgatgtgtatcacaacacttctcatgctgacttccaataactgcaatgttgagagaaagtgtacggtttaggcatgcagttcagtgatcgattaataaagaaatgaaatgagatgtagagtatgaaccggcagataaaaggtgaataatgcttacccaaacatgaaatgtaactcccatggcaaccgcgccatatacaccaggtacatgttactggtccacctcgtcaggtaagatgacattgtttaggtatacaagacgcatctcatctctccaaatctgaaaatcacgcattttctgatcagctaacgcggctagcaagggaacatgaaaattcaagtttttcgtccaacagaagtgaaggaaatttgttcgtaccaagtccctaaactgaaccctgatgtgaggcacattagttttatgaatatcgttccctgtaggtcctcttttgtaatagttcttgccaatccagtgtgcctgcaatagatgaaatgatgatatgcttcacggtgccatataatgcattacttacagagcatatcaagcaataagttgctcaaccataatttgtgaaaaatggtttgtggctgaaatgaatgtaataaggtaaagatcaccaacgagctttgaaagtagttgacaaaggttgtttacttgccttgagagcatgtgaaaaccctgattgatagacagagtttctagctatttcacataaatcacaagaactgagcttccagagctgaaacaaaaaccacaataagtgagtttgtccttttgttcgaaaaaaagtggttagcattttatttgttccatgaacaagcataaaggtgcacactgaactgcattcatgtatgtcttgtacatgcacatatataaacataagtatgtacattagtgtctgcataagatgaatagggtgaggggagagggaaagagggagtactgaagcagcaatgctgtattcttccaccaatggctcttttgtcaggtgaatttgcaatggatcatccgttgacagggaaacattcaggcctcgttggaaaaacattgggaaaggattccggtggtaatcaagaaacaaggagttgttgcttaatggggggtgcag

SEQ ID NO: 2370 - DNA, 5212 bp, Oryza sativa
acaactccatcccaacctctcctaccaggcagaaacagagttacaagcactattacaaaacctacaaactataagcccctctccagagacagcagacacaagagaactcctgtatcccaagcctttgatctcaacggcaaatgcttatagactgctgactttttcatggatccctttggaatccggctgattacatatggatctacacaattcctcagaactgcaaggtattcctgtggctagcttttagagacagattaaataccaaagccaatatggtcaacaaaaaatggagtaatgatccccactgcccaatctgcctggccctggaatcagcggaccgcattatcctaagatgcagaaatgcaaacaacctttggaaaagactaggacttatgcattcggccaacagatctgaaacaatctctgacttcatccaagcagtcattgacaggacccaatcaacaaaaaggttagaaccaatctggtttgcagcatgtgcttacacgctgtggaaatcgcgaaacaacatggtcttcgaaagacacatggaccatattcagaacatcacacaacaaatctgtgataccctaaagctatggtgtctgcgaagcaacacaggaactagccacgaaattcaatcttggtgtgcgtcataggcaacagcctgctgtttatacccctgtaaatccacccccacccccttttttttattttatttctttatttttcctctcaccctgtatctctgtaatcttcttgtttctttccttttctctatctcacttaacctaaaatcttgtaactttgaatctcgtttctattaatgaaatgactataaggtagagctggctctaccttcttcgtcaaaaagttttcagtaatgcactattgaggtaaaacacacaaaactgattttttttttttagacattgagtccccacatgttctaagcatgacacttttttgtgtgttttgtctgctgctttccacagggaactagtaaatcaaagaaggggaaccagatagagatatgcaaaggtcaatgcctgaacaatttcagataattagaggccagctgaactaacgagttaacaatcttcattgatttagtactataaccggaggtaaaaccaaatctgaacattcagagatatagctcttaatctccattttttctgagatctaccatacctagaagattagtaactgcgttattttgttgagatggaatattttttttcaataactctattaatcaatgtaaattctacaatggagttgtttttttttaaaattaccttgcccatgtcagcatcagcctccttggtcatggtgagggaaatcggtgtcatcatggccgtcgatgaaattaagggtgcagatgaggccggggtggctgggaacacgtgttctactgcaactgcggtgctctcagctactggtttggtgatggtgccacttgttcccgacgccgaactcttggtgggtgtcacgtcagccccgttccgagggaagagctgcgcacgctggacatcaaagcaggcagcacccatcatagacgttgcgtccattagtggcagaccgaaccttcccggtgtcgtagcttgactagagtctagaatcagatgagagcctcaatgccccaagctcacggcaagcacctgcactgccactgcaccataggcgtcatagacctgactaagcacctcgtgggtcaccgggaatagaccatggctcacagcgacgtgaagaacagcacttgagtcatgtcccaattggctcggcatttcaccgaacaggtggtgggcatcacgttcggaagcacctccatcaagctgttgaccgcttctctggccatcggtgctatcacacaccatctcaacaccagaaaccccacaaatcgacggccctgatacaatattgtcaagaacccgcttaattctcaacaaatcaagcacaagcacaagagataaatccacctccaaatgcaaatacttagtaactgaggatagaaattgggggaaatagaagtgtaaggtgggaataagcaatagattagcaagaaacaggggatcagaggggtagagaatcagagaaccagattttgaggtggagaatcaagagttcagttcttgaatcttgatcgatccgcccatgggacaatagcagtcagccactctcccagccgagagggcccaatcaggcagcccacatagaggcccaacgcccatggcagcgccacacaccggcacgcgccaacaaatccatcgccgccaacacgcgcgaatcacaacaaggaagaccacacataaaagtttattcttttcaaaatcagtgattaattacatcaatgttattattagttaataatgataaatttttacatacaataaataattaccttttactacatctatctacaacttaactacactaaatgtacaactacaaatctatctatacaataaaaatcacaaagtggaaagtcttcgagctgagcagaatctttgactctcgaattgcgtcagtgcttcttgttcttcttcagtcttgacgacttcacttcgtcttcttcttgcggaggcgctcgtgcaccacgccgcgtcgatcatcgtccaccttgtcccagacgaccgccggcatccctcctcctccctccgaccaaatgccgggacacacgtacgcctgccggcagagtgtgtgagccaccgagtttccctcccggtagatatgccgcacctccacctcggcgaagcggcggaggagggagagaatctcctcgtgcatcgccgccgggatcctcgtgtgcggcttctcgccgcgcaggagctcgaccagcaccaggtcgtcgccctccaccacgagccggtccacgccgcacgacagcgcgagcctcaggccccgcatcatggcgcgggcctccaccacgcccaccccccggtgctccgtcgtctcggcgaaggccagcacgacgccgccgtcgcacccgcggatgacgccgccgatgctcgcttgtcgggacccgtcgtggaacaccgatccgtcgaagttcagcttgtgccaccccggcggcggccgcgcccacctcacgatcagcctcgccggacgaaatggcggcgagtaaggcgaaagtggcgtcgagcagcggggagcaggcggcggcgcccaccggacgagcagtcctctcggctgaaacggcggtgaggatggggacagcggcgtcgagcaatggcgagcaggtggtggcgagggaaagatcgtcggcggcaagaaagccaaaccaccgccgccgccgccgccgtcatcagggccaccgacgcacatccgcttcccctgccagaaccctccgccatcggcggtgtgattctggcgcttcccattggcgttcttggcccgcgcgtcctccaagaacgcggcctcgtcgccccggccgtgatccgcgagaagcatccatggcggcggcgcgctcaggggattgaacctgaggcccgggaggagcccatccgcgccagcagccgacagcgtcatcatcatctcgatcgcgcgcagcagctgaagaatttagggtttttgggaggaaggaagcgtgggcgagaggattcgagatggggagggggagcagaagagagcaggtgcgagtggatcgcgtcggcaaggcgggatttcaatatatagaaatggctgacgtcagcgcgacatagcgttgtcagcacgcgcgcgggggttgagggtttaaccgggtgaatgtgaatcttgattttggtacttgtttgggttagtctcaaaattcgagcagaaatctgagcttatttgccatggtgattctgatttctgtaaatgttagtatctgcagcttagtgccaatccctgaacttttgaagggttttacacaatgtccagttcttccgtttgttctaaaggattttattgatgagggacaagggatcagttctgaaggaggaaaaacagagttttttttctttttatttctgaaaatcatgaaactgaaggtgaaaaacagagtactgtgtatagtatatgatgttaacgaaacagagtacctcttcgagaatataaagatttgatcttgagcatgagaatggtttctttatcggaaggaagtcattgcaagttcagccattacaaacacataaatagatgtcaatccttttattagatataatcaatgaatatgaatacatcgatgttaatgataaatacatctatcatctatgtctacaactgataggaccggaccaatgaaattaattagctctacatgttcaactacaataatcagtaatcacaaatgagaaagcaccatttcgccgagccggccgatcgatcgatttgagcaaaatcctcaactttgccaagccgccgttgctcgccgtcgcctcccaagttgttgctctcgtcacacctgcttgcggctgctttttgggttaaaggatgatttttaatttggtaacaagatgagagacctacaaaacagcgtcgccggcggcttgccgccgcactccaagtggccgccgcagtcgccggtctggcgcttgtttcatcagcatggagacaccatgacacaagcatatgcaaatggatgaccaccactcagcactcagcaggaccagcgcgagtacagaacgaaaagcaaaatactccgtactagtagtagtactccctccttccaaaagtttaattcctatttctttttcatcaagaccaataaacaattaatttattcatcatgtgataaaaccaataaacactaaaatgacttcttaattcctatcaacaatttaatttagaatataataactataaatagaacttagacttttggaaaaaatcaaagaatgaaataggtcttaaacctttggaatgagagagtatattacaatctatagtaatcgaagtgcggcttacgagtcacgaatcacgaacagatgcaggacgctactatctcaagcatcgatcacaaaaaggaacaagcgggaccatttgatttctccgaagctgcacagatgctggaaataaatcgagggcttcgaaacccgacgacaccccggaggagtctatcgatgtcttccttccgcgatgcagaaaagaacaggcagtgcagagtgcgggttacctgctggggcgcattgtggccgggcggggcgcggaagacgtcggcgtcgagcggcatgtcgacggcggagccgag

SEQ ID NO: 2371 - DNA, 552 bp, Oryza sativa
atacctcttaatgaacggtagggcaccgtgaagcgtgcatgaagtcctagtatgatatattacaagtatgaagtagtatagggcatcatggagaggtaaacaaaagcactctatcacacgacatcccccactctgcttgctgaaatatatatatatattgaattagacaggaatgaaaaacatagagaacataactcacgaagtttcattaaaattcacaagtgaaccatcagatggtattgttcctatcaggaaattcatgcaaacattgctgcacaggtgaaatttcttatttaatttgcagcacaaagttagcataacaattcaatggatttatcaagataaaaaaacactcacaatgaagtaagcttcgtcagcttatcacaataaaaaagcactcacggtgaagtgcatctttgcagtgccaagggcccgagaagacactccgtcggcagcagtgatggcgatggaggcgggtaggtggcaatggtgttgtgtggcttcgtcgtctcgtcacggcgatgtggcaatgacggccacgcccatcccgct

SEQ ID NO: 2372 - DNA, 562 bp, Oryza sativa
tgtccaaggaattggggcgcgaggaggtgcattagttggccaaagacttatgcaagctctgattgatgaagacaaggttgataatattaccaacaacatttacagaagtgaaacatatccatttgatacacatgaaattcatttcgaggaaggaggatggaaatcgcattcacagggttataagttggagtctttaatgaactttgaagctgcagggaaaggttctaatggtttgatgttagattctgattggaaatatcatgatgaactatcacataaaggcaataatgccatggagaaggccaaggtgtggcctgagtttcagtacagtgagatgtgcttcagtgataggatcatcattgagctaagtgaagttggtgtatccattgaacccggggtatgtgttggttcactgttcaactgtatcattctgtacaacaattttttttgttaggctggtatagaatttcgcgttgcttgagttaaactattttttttgcatttctatgcatgggttgttacaagttattattttattttaatcctgtgcttttgggcaata

SEQ ID NO: 2373 - DNA, 563 bp, Oryza sativa
aaatgttttgtactgagtgggatcagaccagtatttataaaggaaaccatttgggagaactaattggaacgaccagctcacctgaaagaccacctgaggaattgtgagtcctagcagtgccagggcataataaggcttgccggaactgaaaaggtagcctgaaaaatggaattcattttgtcagaataatgcaatattttatggtgcttcgaaagtactagggtcgccactcgaaaacatagcaatcctcagaataatcagtttgctacggaaattcacaaagatgacatagcaacatttatctgctggacagtttgctgacatgggatgacgggaaacatttctaaagctaattctgaacatttaggaaacatttcttgtttcacagcaactgcccttttatagtttctttaaaactttcgtcattacactggaaatttaaacgacaatatttttaaatagtaaccagatcaaatttccgcatggttgtgcagacctacattgtcttacttaaaactctgcatctagttctataaatacaattataatttgcatccatctat

SEQ ID NO: 2374 - DNA, 554 bp, Oryza sativa
aacagagggagtattattattttccttgccaaatctaaaataaacaatgcttaaagctacaaacatcacatcccacctccccatatttttaaaccctctttttttttcatatgcgtttctatactattcctaattttttataaatcctatgttccaaaagtgcccatagtgattaggatcctaccttcaaaacccatatgtctctaacgttgaaggtataggatattaggatcctgtcccataggatattaggatcctgtcccaatgtcctcaccattatgtctaagtattttgctatgtttttattttgtaatggcatttcttttttttccctcattttacttgttcattgtatttgtaataagtttttttactcttatccaaatttttatgacaatgggttacaacattgctagaatttttatttttctaaaatatgccatgtcttaacttgaccacattctagtttctattttaataggctatatatatgttcggttactgtttttttttcaatcaatttattctagtttctatggagagtttagttccaa

SEQ ID NO: 2375 - DNA, 587 bp, Oryza sativa
agttgatcctccgcaatcatcacataccttatcatccaagccttgaaacaaaataactggacatgtaatttgtcaacaaagttgatcggtgatctctcatagtaagcattttcatttcctgaagagcaatgtagcaaaaggtgactattacattggacatacgggttggattgaatacttttaccaaagcagaaatagtgagactcttatggtcttacctacaagattgtcagtatagtgagactcgaatttgtgtgtctctgctctcaacaaagataagtcaccaatctgctcattaatatggtaataaaaatgacaagtcaacaatctgctcaatagttcttatgtctatgtagagacaaaaatgattgacgttacaaaggtggaccactctgtgaactgcactttaatctttttatcagttttccatatcaaattacctatcatacaaatgcaagtagtgatttaatacctcaatttcacgttataaatcaagtttgttaaattcttagttatatctgtgaaaaacagatcctacaacgttgtgcactgggctgaaaaatattcttgaatattcccatcttgga

SEQ ID NO: 2376 - DNA, 3221 bp, Oryza sativa
  unsure (1)..(3221): unsure at all n locations
cgttttgatgatttattggttcaaccagttaaaccactggtttgaagcggatcaatgcaatttaaatagataggttattctttcaaaacacaaggtgcatcgtagcatgctggtcgtttggtttgcttctatgcatgtgatcgtgggatcgaatcccacatgcgtactttttcccacattttccctctccaacagcctccaggacgcatgtgaccttgcacaaggcaatccttggtggttcaattccagttcaatagcaatttttctacaaaaacgggtgacccaaccggtttctaccgggtcaattgcgcaaacggtcttttagctggaccaaactggcggaggctctagttctagttttttcggtccaaccaccggtctagtccagttccaataactatggattcagccacctgagggaagatgatgatggtgacatcgacaagcagccgtgcaccacgatgacaggaatagtacagtgacaagaagctgcgcgcgggacggggatagtagaacaataagagccatggcacggaaatgatggcggcgtggcgacaagcacaacctttttggatttttttggccaaatttccctatcatagtcatggcaattttggccttttttgtgcagaattttcctatctgtgatgggtcacaacttgtagaccgttacatatgatttcatcattaacgggggtgtcattctcaccactgaccaatagttaaatgtcgggttgctcacccaacccgccgttgatagtctttctgaaccatcagagatgacccgttctctagcagtgtgtcctccctagaaatactccaaaaagcatatcatattgacatcttcagaattagtatattgttgtatgtcatattgtaaacttccactaatttagcgccattttatacaagtttcttgcaactggctacactgcatagtttttgccgtacactcactactacaaaaccattaattgaggacaccctcatgtgctggtcatctaaaaccagcacatgaggtatatatttcctatcctcccaaaacccgcacatggattaaatattgaaaaccagcacctatcaccccttataggtgccagattattaaagaaaatcaatcgatacataaaatatatgtaccgaattttttaataaaccaaaacttataatgtggatataattgctagttttaacaaaaacacagcactgttaaggatgcagccgagccaacaaaatgtgggactgtgggagcccacctcgatttattaggtacctctcgatcttatctccctgactccatccccaacacaccatcctttcttcatgatctttatctccctagccttctctcttctcgaatgacacgccggtcccctcggccgtctgcctcctctcccctagcctatgggcagcacggccacctcctctcccccaagccgacaagcgacggggctgccttctctctccccaactcgtgagtagtggggccgccctctcccatagcctttgagcggcgcagctggctcctctctacttagccaacgagcggcgtggccacgtgtcctctcccccaagccggcgagcaatggccttgaggtccttgttgacctctaccagatctgatcatccgcgaacaccaaccgtgcctcatggagttcctcgctagtcaccacgcctccatctcctgatcctactgttcgctgctcgggagcagccaaatccagccacctcctctctgccaagccggcgagcagtagaactagagatccccgggggacaaatctggcttgtatggtggtgggcgagcaagcagatttcaccttcacccatggtgagcagcaacggggatggcgaccttctctccagtgaacctcctcaattattgttgttgattctgtgagtttgtatgttaatgatttctaatgtcaatcgagctcagagacgaccttgttcttggatgttattatgtgtgtctgttcttggatgtcaatcaaaccttgggggctatggggaacgctcaaagcatcggctttggttcgagctgatgcatcaagccagttttagtttttnttattcgtgacacctcaaaggtaccggttcctatactagcacttttgattctccccatcagtgcctctaatagggtgccagttgaaaaatccaacacctatgggggttctcaactggcacatattatgggttctgtactagtgtcttgttgtattaataatcatctttatcaccaatatatctataacagtacaacaatgacaataaaacatctacaaaacctattttcactcggttaaatttatacaactgacggtaattaagttgtgactaactttttttttcctctaggatctagcttattagctgcttacagggacacagaattttgagaacccatagagaattactagctatgattcaaaatacccttaactagactaacatgtttggcagacaatagtgaaatcaatgtaattaaggacattattacgaggttaacaaaagtaactagtggaatctaatcattttgtttacctttcgttggagctcactgatttcttgcatgaattgctggtcctgcataagcatatattgattagttgtctgaaaaacttgatattgtgcctgccaattcatacgaagctgaaaagggaacaccatcggatgacacccaacctttgtacagagcacccgctgcagtcctgcctcgaggttcttttccatctgctgcagctcttccacactcaatccctcaagctcctcacctctcatctgtctataaatgtggaattgtgacattatcaacttataatacgggctatttctgttgcaaacaattttgtgatatatcgaaataataaaatcaatatggatcagaacataattaacctaagttgaagacttgcttctgccagttgttcattcaaactgctacacttgctgtgctctaactgaagaagaaggtgaatatatgcataactgttagtatatgtacgaagcaatataattaagaagaaggctagttacaaagacaatttctatgagattcttgcatttatattcctaggttagaggacatataaatgtgtggagttagtactttatgtcacttttctttgcagatccaggatattaaatagtgtctcacatttacattaattacatggtcttattttcattaagagcaggtacaatagcaggctattagc

SEQ ID NO: 2377 - DNA, 6832 bp, Oryza sativa
gagattgagaggaagagggagagagagagagagattgagaggaaagtgggcaatagagagagagagattgagaggaaagtggggaagagagagagagagattgagaggaaagtggggaagagagagaggtgggagagtatgacaggtgggtcccgccattttttaattaaaaaaacgctgactgggatgccacgtgtatgccacgtagaccaaaaccaccgtggattgggtcgagatggggtaattcgtccagtttacatagttgggggtgaagaatatccgattttgtggttcatgggataattcggacgacgttatagttcaggggtaattcgtactttttcttttcagatattgtgggatggaagaagtatgaatttgttatagtagctcgtggaccacaagttgcagtaggacatacgaaaatgttggtccagccgagcaggagactcattcgagaggaaatcgacattggcctagtacaccataaacgggctattttggctgttgctcgaagaggcacacacatgctctgaccgatgttaaaatgaccccaacagatagttttgtagagcccaatagctagttttattgcggaataagttcacctgccatcccttaactttacatcgagtttgtttgacatcccttatcctcaataacagaaatcttcgtccctaaactatacaaaaccgtgcattttaagtcccatagcagtatagatgcccggtttcgctaatgtggcaccctacaattttctcttttcttttattcttttcttcggctgccgacgacagagggtgagaggcgacggcgaatccctcgccttcctccgtcgccgcttcgacaccaagtggctccttagccggcgtcgactggctgcttcctcgcccgcgatgataaccccgttgccatcaccttctgccgcgcccggctccgcaaggatccctaccgccggccggagagcggaggggagacgcggccgactgctgttgctgctgacgtcccatcgtcgcccaactccagcagcgcccgagggcgggggcagctggatccgcccgccggccggagagcggaggggagacgcggccgactgctattgctgctgacgtcccatcgccgcccaactccagcagcgcccgagggcgggggcagctggatccgcccgccggcttctacctctctcacctctgcctcttcctggctgagccgtccccactgttttcctccctctgggtgtccgcctcctcctcgctgctactccatctccccctgctcggagggatgaccggcccgacgaccctcgtggcgcctctgcccccaacatcgccgccgtcggtgcagccacttgcccagcctacgcactacaacttcctcaactccaagctgtctgttctgatgctgtcgccactactgttgggcgcgaccgtgggaagccaccatatctggcagcaggtcatcgccctggaccacggccaccagcgacgtggcgttccccagcagctacttcatcatctctaccatcctgcccgtggcgtcggtcgccgcgcgtgtcaccaccgcgttggagtagctgtataggaggcccctcaactccacggcatcttctttcttctctcttcttcacaagattgagagggaggggggaggtggccgacaggagtgtgtgagcgcggggcagcggcaggcggagcgggcacgatgccgccgagagcttctttccgcgctggtgccaccgcctagcttcttcccgcgagctcgcccgctgctgccgccggccacctctcccacatctgccgccacccgaaaagagaaggagagaagagaagagaaaaagaaaagtaagaagagaggtggggcccacatgattttctctcacttacatgtgggccccatattttttttttgctgactaggatgccacgtcagcgaaaccaggcatatatactgctatgggacctaaaatacatggttttacattgtttaggggtgaagatttctggtattgcagataagggatgtcaaacaaactcggtgtaagttgagggatggcagttgaacttattccttttactgctacaaaagatccagcctgctagttctacttcaaagagttcaaagaaaactgtctattttctcccccaactatagaccaagtctgacctctgtccctcatacacaaagctagatacatcatacaagcatccctcaattatatcactatagtcgagcaaggtaaaaaagttggttggacgatggttttgtcctacataacacagtgacttagtcagaaaaaaaaagtcatatggccctctttcaatgatccattagttatcgttctatcttctgtctccctcttttccctctttctacgagaagcctcaagcttgagcgtagagggagcgtggcatcagcggttggcgaggccatccgcggaaaggcacggtggacggtgagctccgtctaacttgagctccagttctgcccatgtagaagcagtggtggccaagcgagccccgttaagcttgagctcacccacctcacctgtccgcgagaagaggaacatcggtgatgatatctggctaaccccctcaagctccggtgaaagtgcgtagggagagggggggtggggaagatgtggtggaattagaggagctgtggtggaaagatggtgagctcggatctctaaaagatattcagatgaaagtatcagggcgtgtctagttcgcgaaaagaaaatttttagatgtcacatcggatgtttgactagatgtcggaaggggttttcggatacgaatgaaaaaactaatttcataactcgcctagaaaccgcgagacgaatcttttcagtctaattaagccgtcattagcacatgtgggttactgtagcacttatggctaatcacggactaattaggctcaaaagacatgtgggttacttcacacttattgcaattagttttttatttatatttaatgctctatgcatgtgtccaaaaactttgagaattaaagtaggccttagattttagattgctttttttaattgaagatgaaagtgtgaagctatagttaaaactttcgtgtgatttgagttgacagttttcaaacgaaagtgtactaaatgaggaaaaaaaacgtatgctacagtgcacccctgcacataaacggcatctgtacaagttcataaagacaatcaatacactataataaaatacaacacaattattttaactttattttccgttaaggtgtcgtggtgtagttggttatcacgtcagtctaacacactgaaggtctccggttcgagtccgggcgacgccagattatcgttttttttaatctccacatgtttaataccatgaattttctctcttattcccaaactatttaacgcaagaaaccatgaaaatgttctctcccaaacttaggggtggattactatttaatgcaagaaaccatgaaaaatttctctccccaaatagggttggataatttagccaactcggttcatttgtgcttgttatcttaataagctttttcagtgtaaccataagttaccacgctcaatcgttttatttgaattttttttataattagtaattttattattattatatgataaaatatgaatattactttatacataacttatgttttaagttttttttgaaattttttcaaataagtcgaacgatcaaagttatgcacgaaaaattatggctggatttaaaataggatggaggaagtaataattagttgcaaatacgaatacagtgctaattctaatatttgaactcgggtgaacatgcccaagctcagttcggagaaaccatgaaatttctcttttattcccaaaatattaatgcaagaaaccatgaaatgtttctctcccaaaatatttagggtcccccaaaacaatactatatgctaaccatcatttgagtaaattttcttcgttctcatttttctttttgccactttatctggtttgatatttctatttgatggttgaccgtggaccttacatcagggatctgggaggtgagacgacaatgacatactccactaattaataaaatatttaatgcaagaaaccacaattttttctctcacaccacttatagggattagtatataaaaaaaaccatttagggatttgcttaacaatcagttaagtacgttgtaaaccaacatacctattaacgaatcactagatctgttccctgttcctcacagcagtagaggcgtgagatgatgtggaacacccgcgcatatccctttgcccttaaaaacattgcagaagtagacaataaacatatatatatatggtgaatgctctctcttcattatagatctgattagtagtacaaccaaccttaaatgtcacgtccttgtatatataggggttttaggaggagatagatgttatctctactctactctagttcggattggtcaaaaaaaggatcttatctccccgggagataatattccgtaacaaagtaaacaattttttttcaatcgaattttcagccatttgatctgctaatttgagatctgcggtagatggcgggcctggcataagtggttgcaacgtggtgttggttttgttatcagaaacagcccagcccatggtcaaggcgaggcaaaggtgatgtttccattgcgggggctacgcgtttggtgaggtaggcacgagatgctgcagggtggctgcgatgaaggtttcgtttgattagctcactgaaccatatagctaatttattacttcttttatttcataatgtaagtcattctagcatttctcatattcatattaatgttaataaatctagatagatatattaattatcatcaatatgaatgtgagaaatgctacaatgacttacatcgtaaaatgggggagtatatgttggttttaaaataaactaatagctgacagtgaactctactgttaaacttgctctaagtttggtaaggcgcctcactactttgttttaccggcgaggaaggcacgcagccggtgagccatcttaatgttcaaccaggtgtcaacgacatctagcatggagggtgtcacctgccaatgtggttgtgcaatttgaaacaccaatgcagggttggggggcttgggggccttgggggtaattcggccggatcttcatcctgcataggacgtcatattatatactgcaaggatcatttatccaaaacaaattctcaacagactatcgttgtgttgttgcttagatcacttctttttattttttatcgttgtgttgttgtttagatcactttttttttctcgaacaatatagaagaactacgtgaaaaaatgctactccctccattaattcccctcgatagaaggcgtaatcactcgttatgcaaagaccaatgaaccgagtaatacccgttgcttcgatcgttcgaacgcgtgctgcttcaattgtttcgcagacatcaatggccatgcccatgcagcccacgcttggatccaacacacttcaacactgtgagagagaggtgagagaggtagtgtagctaagataggggttaatacagtcccatggtcgtggatagagtcgagtgctatgctcgctattaggttttggttttgggtggttcggcagtagcttctttgttggtctagcagtggtcggtccggtgctaatcttctcctgggtgttgtataagcactgttggcgcgtggtgcgtggtgatactgatttttttctttcatggttactgtcttctaggttactagctttatagttttctcatgctatattcaatgaatcatcataccatctggtgttggtcattcaaaagaaaacgagagggatccatagccgatgcttttaaactagccaaacaaaagaatcaatagctgttattctacatgcacataaaacacgcgagagccaagtagttgccgtcgtgtatttggacattttgacaaaatgcagttacgccttctattgagaaatggagggagtacccaacacatacaacggaagacatttttacatgacaagaaaaactgcaaccatgaccggccggagcaccctcacagcatctctctttaatatgatcaaggcaaatgatttttgtcgattcaaagaaaggcaaacgacttttatctacgaaaatattcaatgcaagaaaccatgattattttctctcccaaaacatttaatatgagaaagcattccgttaatgttttatatattgtaaacgcaaccgaacgttacttaaaaaaaccactaacatcgaattaatttcaatttagggattcaagcatatgtcatcatataaagtactccctccatcccaaaatataacaactttcccttaagatttgtcctaaaatataacaacttcttcaccaacaattctctcgccaactaatcacaaccctccaccattcacttttcccacctatctccactactcatcctatcacaaccctccaccactcacttctacctactttcttaataactgtgtccaactttaaaactttttatattctaggatggagggagtaaatcagtatatccataaactcgcaacgttaaatgaaattactcgtcagcgaaaaaagtactaagttattatgatgagaatgactagcttaataattgtgccaataataagtctcagccgaggtcacaagtttccatacagttcccatacaggtacgtacataacttgcacgaattaagcgaacgatacatacgtacatgtcgcatttaaattaagtgcgacgaaggtagtatggtacactagtacaagttgagaaaaaaagatccaagcaaccggacca

SEQ ID NO: 2378 - DNA, 1915 bp, Oryza sativa
catcgatctcctttttaacataggataggattattgcagccttgttggtaatctcatagcatgacatcttcttgatcttcttaagatgcatttaacttccaacttcatccactcatgcacacagacaaataattcatggtggtcgtcatcccatttctcagctctctagctggtccttttatttcaaggcaacctgaagatatcaatttttttaagagagaatggattaaaccggtctttacatccaaacacagccatccaatatttgcgcttatgttgaacagcacaagaaataagttacatgaggaaaataaattcgcttggtaacttaacacccttgaaggagaacacaacacattcagagtacatagttctgatcgatctcaggtttaggggggcacgaatcaagtaataaaaagggcattatttcaatcaataattcatagttcttaagttgattttctttgtcgtttatcccttagtgcagttttcatttggatttagtgtgaaaatggataccatctgcagggaaagcttacctgccgggaccaactagctagtaaaagatcaaatccttaagtatattaaaaactaattgagttctgggaaaagatcatgatatcgtattcaatcgtctagaaagaatttaaatttcgttttatcatgttccaacagaacgagcagaattattaaaattgtcccatctgagaaaatttaaattagctacaaagaagcgacaagggttccagcggaaactcaccctagtttcagggatatatcagaaccatcatcattatcctgcgagcttcccgaatttaatgcagtcatcacagattcagatgattgtccatcttcagtaagaacattttcagtatcaggaaccgccaagccagcagtaggcacctgaggcatctgcatacaagcaaatgcacagaatataaatgcatattccgccgtgcctgatatggagaaaccaaagggtcctcgaatttgcattttattttgtaaaactatgcaaatatttcgaacgcatatacacagtatgtattaattacttggtctctgaggcgcatattctcttctgccagctgaatgccctacaagaacaaataaattgtatcataagatttgtgaaattatacctgattcattttcaaaccaaccaaatcaattttacgttttgtgctgataaatacaaaatattatatccagacataaatgttttacgttcatacaaaattttatcaaaattttgtaattccgacaatcagttttgtattagaataaatttatgaaatctaaaaggttatttttaaaggtaaatccatatatatcatttcttttgtttttaaactaaacatttgagaatctcaaattattgatggtcaactttttaaaagattgactgaatcttatcctaaacattaaatatttaagagcaaagggagtaaaattctattctaaatgtaatccttagttgcattgttggatatcggtgaaaatatcaatttctaaataaataatactcctcataagcctcacgagaaagtttactgtatctgaaaatctatgcataaataaacaggaagctgctgaatgataacatttccatccaatatatgtcgagaaaacatttcatgcctgaaaaattgtgcaataagttcacaacaaaaattgactctcgtacagagatcctatcgaacctcagcatttcattgacagtctattattgatttattgccatcgtataccgtctgcaagcaacattccaatatagtacatgcacatgtttcactcgtcaatataatttttgctatatataataatttttgctatatataaagttccggcactgaatagtgaatattagtaccctttagctagttctcgacttctagtcaccactacagaatgg

SEQ ID NO: 2379 - DNA, 752 bp, Oryza sativa
aaaagtgatgccgaatacgatgcttaccacattggataaatcagtgaagggggtgtcaagcaatgaaacagaacctatatcagagtccagaacaccaagatatgaccttccatgctgcctgtgtgacatataggtattgtgatggaatttttaatatattttcatcaacagaagtataacagtacaataaaaacctgtagctgaaaacaatgtgattgctttcaccaagaaaaccataagagctgataccaaaaacccacaatggccttgtgaactcagcatctagcgtgtaaactgaaataacctcgttggtgtgctcaacctgatgacaaacaagtgcattggcaatgtatgtcaaacaaaatccagatgatgaccaagaatgctgtatttgatcatgcaatgagccatgatcattgaagtcattacttacaagttccaactaaaaagtagagaagtcaaacaaaatcaggacaaaagatacttcaaatgttaaatgaagaagttcaaggattaagagaaaactaattacccatttatagatgttccaaaatccactccctctatcagttaggaaaaacaattcgcctgcaagttcatatgaattagacgaatctttggtagcagagttgcaagcaggatgattataatcatgataaatcaatagtcgcatcactgccaagcaaataaattgctattgctaaagttgcaaaggggttaatgggttatggaaccaacgaatttaatcactg

SEQ ID NO: 2380 - DNA, 12097 bp, Oryza sativa
ccgtttcgaaacaagcggacgtggcagacaaaaggcaaggcacccaaagaatatcagaaaagcaggtgagaaaagccacgcacaaaaggtgtcaattgtcaggttgagcacacaacagtccaagacgaaaggaaatgtccattggcatgccttgcagcaaagtctgaaaagtggaaaccgtgctgttcagttcaatgtctcggctttaacagcgttgatacgcacaattacttttgtagtaatgcaaaagaaaaacaaaggctatcctctcccccactattttttttccttgtatctagatagggagtcagcgtcttttgcgttagctgcgcagactcccttgttataccctgcaaaaagaaagcatatcatttaatcagtatatattaacaaaattaaagagtgtaaatggtgtcgtatcgtataatttggacctcttcacggttccagtatgtatcccagatcaagctaccaaaagttctgccggggaaaggaaactagggatcacttgctctcctacaggagaacgaaacagccattagtacctttgcttgataagtgctgaaagcctggataagaaattaaggggggaagaaaggataaggattggcatttgagaattacttcattgtctttgtctgattttccagaaggttggaacatccttgcaaatgccttccgctcctgattccttctgtcggcaatctgtaatcatttgcatatagttggtaacgacgcgcatttatcaagattctaggttcacaagaattacagactgaccttcttctttgcagcagctagctctcgtttaattcctcctaaggattataaaagattattaaatacgcggttgcaacattacagaagtgttgccagtgaatatgaaaaataagagataccatcacttggctccaactccaatgcatgcttgaagctctccactgccgcatcaatgtcattgagtgcaatgtgtgcctgcaaatggcatttatgccatatgagttgcgcagaaaccagatggtaataataatacgatatgagtagcacattgcattgattaaaatgtcaatagtttcaccttgagctaggtttaacaaatactttcacctcacaccagggtaaagcaaattaagattcactttgcaccaacccaagcacctctcatctactaggtttgcaatctgacaagcatctcactagcatcagcatgcccatatggacaactcacctatagctgggccatacttatcaagatgtgaacagagtcaattttcaagtggttgggctggtgcaaaatgaaacatatttcgctccacctggtgcgaagtgaaatatttgttcaccctagtgcaaattgaaactaataatgagtgccagtgcacaatgcaatttactcataagatcaatatctaaaaataagcaaatgaactgatagtcccaaacaaatggtaatagcaatatgatggtttagtggttcgattaacaaagctcacaagcacgcagacaaataaatcatagttcagagaaaaaaagcatcagcaaatagtgaaaccattactgcaggtcaataccaacctgtccttgtcgaaaaaatgccttagcattgccctcactttcacgcagtgcaaaatcagcatccaacagagcacccttcaaatctcccaacttcaatttgcatgcctgaacaagatttgaagggcaatgtaggtgaacaacagagcacgaatttgaagtttgtgtacggagtgagtagcaagcaggaacagaaagacactgctcctgcagggtaggtaaggattttgcagcgatgaacacaaagatttaagtttagatgagaatacaatagtactctaaaatcatattagaactaatgataaaggaattaaaagaaaatttattcctctgctttgcagttagttgtgtataggtattcaaagatgaactcaggaaaacaacctagagcaaagcaacggacaatcagatcatgagaaaaaggtaattggatatacacgagccatgtacattctacctaacttgcgccatgcccatgcactatttattctacaaactctgttccaaaaaatataagtatttctgagtgttttttaaatgtatctggacatcctttcgtccacgtacactttgggaaacacgcagaatattttagaacagagggagtaaatgttttgcaagttgctataatcccataaccatgtgcggaagcagtgtggcagaggtaactcatgataatataaaatgacaataacagtttcctttaagacaaaacgttcatccacaaataagttactggaatagataatgcaacttacagagctatttgtgagtataatcgatttggtcttccgcagtgctgagctcttctctgcataagtgttatgtgacgtgtttatgatcagtatgcatcatgtgacagaaacaacaaacattgaacagttgtagtgagacagtataattgccttcatctatatcttctttctcccagcaaacgtccaagtaacgcagtgctttcctgtactttctcagagctgccttgtaatcctgtttctgtaaagaccagaagtactaacttcagcttcagggaaacagataatgaaatattaaattgtgccaaagtaattaactagaattgttcaactgatacaagcaggtatttcattaaaacagcagtagtttggctactaaaccattcaaaaatcaacagcagaaggcttaagaaacatgaatctgtaaatactagaactatcgaagctggtatcgaacaagtaaggactaccatgcactaacttaagctaaaacctaaacatttaatcatgattaggatttgctgtcgtcacctgactttgctgatttggttttatttagtaaatgatgcaatattaatctaacagataaaaatacttgaaaattagcttgaagaggaaattaccttgaaattattattcccaaaagccttagcagactcaacagcatccatccaccatgaaacctccataggcttctcatcaagatcattgggccaatcaggatacgtatcaccatcattgaagaagttcacaactccatcatcagcaccttccggaagttccccacaatcgacaatttcaacatcagaagtcgggcggtcagcctctccaacaggagcatgctcaacagagcgaaccacccccattcccttaattactctaccaaaaactacatgtttcccatctaaatgaggtgtccgagttgtagtgatgaaaaactgagatccatttgtgttgggaccagaattagccattgatagcattcctttcctctcatgcttcaaaacaaaattctcatcctcaaacttcaacccataaattgactcccctcctgttccatcaccagcagttatatctccaccttgtaccataaagcctttgataacgcgatggaagcaagatccctacaagaacaacaattaccggacatggtctcagagattacggtgaagatgtgacaacagttttcagtgaagtatatgcagttgtatcaggacaaagtttctcatcatcatttttaaatcccaagttaacagagagtggaactgtcctcttttggtgttaaaagcaaaaggaataaaaagagcacagcaaactagaaaagaaaccatccactcaatcatatagaaaatattactgtagtagatgcatccattagctccatgaacagaagttaaaatgaggtacaaaatgccaagcagctattcaaacaagaaccatgtcagcatgttatgtgctcctcctgtaaccactaaaacttgtactagactaaatgtcaaactaatgaaaatatacagtaaaatggctagcaaagaatcttggtacagtactggtgactgtctctgattctattctaaaaggctacgaggcctttctatgcgtacggaatattacttaacgatacgcatacaaaaccctcttcatgtctacctaataacaaaacatccatgcatgtggctgggccacctgtcaatatgtaaaacaatgaggccttgtatgtgctccattaaaaaaggagcgcctatatacagattgcacaaggctaatcgctaacctgcacatggaatattttgagagtaaagtgccacagaaattggtaccccatatccaatttctggactagtctactgcaaaagaattggggttactcgtgtgcaaaagaacgttcatgtgatcaagtcacaagcccttgtcccaacatattgtataagtctaatatgtactactgccttagtttacttctaattgtcacagttcattacactatgcaaattttgaccattaataactttttcagtaattctgttttaatagacttcacaccgttcgatttgacaagcagtttgaatgaatatatttgtgtccttagatttttcaccgagcgtaggttaatgatgctatttaaatatttcctccttacaagtttattggaaagaaaaatagaggtgaaagtttggcaaaagccaatggagcgagtacatcactgtctactcttatacatggacttaaccatactgtaatagcagataacgaatctgccaaattttaacaggaaaactgtgactgttccacaggcatatgacaaaccacaaaagttagcacaggtggtacttgataggctaatatctgcaaggtgcagataaaaggaagccaaaatggagggggcccgttttaacagtcagaacatgctgtaccagcagtaccagtgcatagagttcatttcatatcaaaggacaatgatttgacaccacagcacaaatattagccggaaaataaatcgacagattccaaatgggccgcataagtaagaacatatccatacgacaaaagaagaccatacaatggcaggatgcagctgcccataaacacgctaaatgatcattaggaaagcaaatcggtggcacaaaggccggccgaacctttttaatctctaaactagaactgatttgcagtagtgtaaactaacccaaatgtttcagaatgcatgtttatgaaatccgcatcaaaatcctaacaaagtaacaatcaccaatcgcccaaattaaaaaagaaaaataaaacagttctctgtctctgatcagacgcctaaaaatttattgggagcggtgggcagtcaatcgcaccaagacacaagacatgtgctaaacataacagaatcgaatcattcattgcgcgcagtactaccgcccaaatccagagcctaagacgctcctccacccaacgaaaccaattcgagtccccactccccaacaccctaaacctccaccacggcagaaagccccgaaagggactacccggacgccacaagcatctcggcctcggcgatggctccaaatcggcggttccgtactcaccttgtagtgtaggtgcttcccggtgacggcgccgacgcccttctccccggtgcagagcgcgcggaagttctccgccgtccgcggcaccaccgacgcgtagagctctataacgatcctcccctcaatctcgccgccgatgctgacgtccatgaagcacctcgggttcttcacctccacctccgccgccgccgcggaggcgacagctgctgactccgcgccctcgccgccgccctccattgcgatctcgggcctcctcggggtcggggctaggctaaaccctagaaactagtggagcttcacgaggcgaggcggcgcggtggtggtggtgtccgtcggttacctcgggggccaaacggcgaaggctgcgttgtgggtgggtgccatctggggttttgtggggaaattgggtttataggggagggccgtcggtgagagagagtgtagtatattgtggatttgtggttttaccgacatgtgggcctcctctttaggagtagtactcccggtatatgattcggaattcagaaataaaattcagcaagataagaaaattaatactatataaaaatctactcctatatccaccgggcaatgaaacagacgatataaaatattggaatatgcaaaagtcttataccattaacctgaaatggtagtggatttaacccttatgtaacctacttaatgtttacagagagcgtagacatcgaatgctttttttttctccatcttatgaataagacatggagataatgtacatgtttagatgtaacaagtgactagttgtctacttgtcttttatttttttcagccaagctatcatgacttgtaaaatgacttcatcttccttattttcggtcaaactatcttaaattttaaaataacattaagataacttttcaaggaaagaattaaaccatatagatacctatcggtcttcattacgagggatggtgtatcatctcatatataactcttcgtagagataattttagctatacgaagatttcgaggtctcaaaagaacgttatctcacatcatcttagagagcctaattatacataggcaacatcttttcatgtatttatatagttatcaatatataataaattcaaccttaaagataaatcttagtacacacttgtacactcctacgcgcttcaataggtatcatgagatccatgcatgtagagctcttaccgtttctcgaaactactaattttaatgattatggacgaatgcattagaaaattctttgagcaggtacaatagcagactatgagccaattataaacatattttaaagagataaaagaagagagaagagcagcgggctacagatctgtagccagctgcagcacggactccaagatacaatatgtgtatgacatgtgggaccatatattaatagtgtattaagtaacaattgtataaactggctagtaaattagctatagatgatttggtgctaatagttgtctatactattaaacttgctcttacataatcataaacactatactaaagtaatatcatctaaaaggaaaagttaattgaaacactacaaacataaaagactttcaaatactcccatctcactcatatattattagtatgaagaatacaacgataaaaggtagtggcaattatgatggtttcgctatccaccatcaatgtatgtctattcttttatatgaatttctaaaacctacaccacatctgttcttaaaaaaaatcaacttccaaatatgaacatatatattcatgacctctgcccatatttccacgcattcatgactcatcacagttcacaccggtccatgaaccgtccgtcgtcgtgctatatgcacaacggcgccccacactccttccaccatcttcaacctacccaccccgcctgggccccaccaccccctcgttcgttccataaccatctacagttagtactactgttactacaccctgccctctgactgcgggccccacaaaccatcaaaccccctcctggtccccacgcttccgcctccggctatctcggtcctcggcgcgtgtcaactgccaccgccactatgccggcaactgtaaacaaggcgggggaggggaccggggccgggcccaccaaccccgatcggacggcgtgattcggccttgggcccttggcctcacctttttttccgccgctgctcgttttgctggcccatccggtgacgtccggtcgctgtccggtcacctggcgacggagggcgagcggcgcggggccggccctccgccgcgccgtcgccggcgatggccacgacgcgcgtgacggcgatcacagcggcagggactccattgattgaccacacgctattctggggcgtggttcagttcagtatgaccgtgaaacagtcagtggagcgaatcgtgaatgcatgtctctcctgtgaccatgagcgattggccggcaagcacggctgcacggggcggatcagcatgggagcagtggggtctcgagcctctactacttgcgtgaaggctacttgagaccccacgaaaaccctactaattattttttttttgccatatgcaaatggtaggggactgtaactctatctagtttgctcagatcccactgctattttttttatggatccgccactgccggcaagtacgtcggcaagtacgtgatgagtcctggataggggtgaaaacggccaaccaacgttcatttccaactttttaccaactgatctatatggaaatggtaatcgactgaaactaaaatggaaatggtaaaagaatatgaaaatggacacgaaaatagttttgctgttataccgatagggatgtaagcggggcgggtaagcgggctttttttatcccgcttatcccacttctagtttattttttcttctaaattttatactaccatgcgtaaaatagactagcaagcatatttttatgcgaatagcgggactacccacttgcatctctatataccgatcgtttccgtatttaccatatttttgtgaaacttaccgttttctataatatggtaattaccgtatgtttccgtatttaccgtattcttgtgaaaattaccgttttctataatatggtaattaccgtatttctaaatatgcctctacttgacccacagtttagagattgattgactctttaatcaaatctctaacttgagtgcatggctaaaatggagttaatttatatatatagtataagcttgaatttatttatacatataacatacttatgtaaagttaaaatagagtatatatgtttttatagtttaatgttttcgtatctgttactggtttctaatctgtactgacatgtttccgtccgtattgctccgtttctgatttttcgatatttctgatatcattttcgttttcgattttactgtttttgatttcgttttcagaaaaatatggttatggaaatggtggtgtctgttttgccgttgtttcggaccgttttgatccccactcccggatatgctgctgcctacaccatcaattattgggggtggtttggattcggttcgtctggattgtatgagattcagtcaaatgggacagccgagcacaatcatggcggatgcatattcagcttttgcagcctggggatgcgatgctggaggagagtactctacctctaccagagtcgtcgcacaaggggagcgtccggatcactggatggatgatggattggatctactggtgtagtactactgtaccagtgctttttctctcccaggtgtacaacgtagtacgaacggattatgctgacgtagtacggttccgtgcgtagaaaacggtgtacgtgtacagtgcactgcccatgtgaggatcgagaggggggtgacgagggacgaggagcagttcggctgacgcaaccgcccaaccgcaccgcatcaccgcggctgattaatttgcctcgttcgcccggggcaaatcaaccgtgcgtgcctgcagcccagcacgtcgcgcgcgcgcgcgccatcgatcgatcgctgctgccgtggcccgtgctacggtgcgggtgcgtccgtttccagcagcccgcggggaaggggggacatggagatgcgtcggcacgggacaccgccacggctgcgcgtacgggcgtgtcacggcgtgcgcgcctctccggtttttacggggaggtgaggtagggggggggggggggcgcgatgcggtccgagcacgggacaccggtgccacggcgtcgcgagcgtggcttggctggcacgagcttggtatggattagtctaatcaatgtactcacatgtgattaggtttttttgacggaaggaatatatccatgttcaaaatgttataaattagcaccgcctccccctacttccctaacctcttccttaaggatccgctttctctctatcagcaccaccgtcgcctcatcttttctctctatggatgtggagggattagaaattgagaagtttcttgaggggtgaataagatatttcgcaaatgagagaatccaacggcttgaaacgtctggagtagaaatcggatggctcataattttttttgatgacgtggcaaattaccatttcgagaatgattagctcttccactattttagatatgaaaaagtacgaattacccctgttcccaaactattgtggtcgtctgaattaccccctgaaccccaaaaccgaatattcttcacctccaactatgcaaaccggacgaattacccccctcgacccaatctgcagtggttttagtctacgtggcatacacgtggcatcctgttaacgaccaaatttggtaatatcagtatcggagataaagatgggatcgaagcggaatcgaagatgaggattgttgcggaaacagagtaaggatcggctggagtccggatcggctacgactgggatcggctaagtctgagttggactggttaagtgatacagccgattccgacaatacgacctgtgtgcgacattaggatcgagttgatgtgcttcaagatgattgccacacatggataaagtcctgggaaggcaattgtatctattaattaggatattttatgtaaattccttagagataaatatgggcaaaagtctgccgcaaagacttatggtatcttagagtttgttagagataagagtcgtgtccaatatggacatatcttgtaattctcgggtataaatagaccccgagccctatgtaatgattaacacacacgttcaatacaatttcggcgcatcgccaccctttttgctttagttttatttcgacgagttattgctttcgggttgagctgcatcggtttcgatcttcaacaagaggtaaaacttgttatggcggcttgtgttctcgcgattagtgcttccatctttatgatactctaatcttgtttatgtaatccgtcaagttatcatatatcttgcataatccttgacaatatcgtcatctaacctacaatcggctaacatctgttaccagaaggcagccgattaggttaaataacgacgttggcttagattatctgagatatccaccactctatgaaacatccagcggcttgattgtctagatattgttcttcttttcatacttaatgctgtatcagttgagtttgacctattaagtcgtgcttagaatttcaatctctagcctgcctactggttgccgattagggtagtatcggagtttcagccgatcgtatctgatctaattgcttttatcttacgtgctcaattaacatgttagatctgccctttatatcaagatcttgttgcatttaagtatattaggtttctgcttagtatattctatttgctttaatatcttaatataaagtagtatcggagtattagccgatacatgctagatctatctgatcggctatgctatgaacatatatataatctcattattaatatatatttcgatctaagtgatttatactgtctcggtaaggtgaccgatctatcccaatcacttgattcaagtatatatcgatataaggattatatatcgttgatatctacagccgatcgagtagatttagttctaatttgttcacttaataattgccgatcgatttacatatgacatcggctcaaagataaataatatgtcatcggcatttagccgatcggctatcatttatggatttaatcacggtttctttgtctttgtttcttgttgattgcaggatcaaatcaactagcacgctcatatatccgatggcgagttttggacctacactggagttaagcagatctcccaggtctcgtgttttctatcaacacatcccagtcagcgttttttaataaaaatggtgggacccacatgtcatactcttccactttcccccctctctcactcttcctctcttctctctctcactcttcgtctgtctctctcacggatcggtggcggcgggagacacggaggggcgggcggcgtcgcggcgacgaccgagcggaggcggttgcggcggcggctgccggcgctgctgggtgagtggcggcgggcgcggctggacgagcggaggcggcggcggcgacgggctcggctgaacgagcggcggcggacgcggctggacgagcggaggcggcggcggcggcggcgggctcggctgaacgagcggcggcgggctcgactgtgcgcaacgccgcctcgcgccccgccgtgcccatggtgcccgtggcgc

SEQ ID NO: 2381 - DNA, 536 bp, Oryza sativa
tcctttgagatcactttgggcttgccgtcctctctttttctcttgttaacagcaatggcggatggagcaccctttacagttctcatcggattcagtggtttcttgacgaccaaacctggagcttggccccctttaattgtggggacagtcgcaactgaagcagttggttttgtttgtgaacttgaggattgcccagcattagcttgggaggtttttgcccatgcgtatgcctcttcctgagtgacccatttacctgctcattaagaaagcataaatattagtgagaaatagcagctccctcaaaggcatgacataaccacttaaagatccagatacacatgttaagagaagtacctaaaccgtcagaatagtagaaaccagaatttgagtcaaaatagagtccagtagatttgtcataatagtatcctgaagtagagtcgaattcccatcctgcacaaacaggatgttatctaacagattgaacaaatattgttaaatagcgaaaattgtagtagtgctggcggacagaatgatca

SEQ ID NO: 2382 - DNA, 980 bp, Oryza sativa
gtcagattctcctccggcgcggccttgtcgacgaccgtgccgaattcgaagtccgtatcccacgccgcgccgccgccgccgccaccgagcccggccttcggcgttccgggcctctcctcccaatcgaacggcacggacgaggcgttaacggtgtacgacgcccgcggccggaacccctcgtcgtcgtcgtcgtcctcctcctcctcatcctcgccgtcatcgcggccacccccgttgcccccctcggcgaagtgcgcgtagatggcggcggcgcgcctggggctggccggcgcgctgctgaagtgctggaagaggtcgaacgggttggcgtgggtgaggcgcggcgtctccggctgctgctgcgccgccatgacggcctcgaacgggtcaggcgacggcggcgccgtcaagaacgtggccgtggcgaggcggccacgcgggctggacagcgccgtggcgtacgggctcgccgccgggctgtcgaaccggaagtcgtggtggcgcggcggcggcgaggcggggcgcaccattacttccatttcgggtggctctgactgacttggcttgccggagagctcgtggtggcggagcgggtttaagagtcgtggagatggcggggagggagggagggagggaggaagccgtgaggaaggagggaaatgagatgatagcagggagctgggcctcaaatttgatttttatactttctcagaaaaataaataaatacactatcccacttgcaaagttgcaatctaattgaatttgtaatatttttcaatgtaaatttgatgtatcaaatgatttaactcaccatctttttttttcattcaaagaagaacttcaactatcaactcctcaattaatcatagggtgtgtttagttcacgctaaaattggaagtttggttgaaattggaacgatgtgatggaaaagttggaagtttgtatgtgtaggaaagttttgatgtgatggaaaagtta

SEQ ID NO: 2383 - DNA, 1045 bp, Oryza sativa
tactgcatggatccgcgctgcgagagagcgcgggagatgcaggcgcgcatcctcagcttcctccgcaagtgaagctcctccacgacgcgaaggcttcgccatgatggaataattctggcgctttgtgatgccgccattgttgagctcgagggctcctgtagcttgtcgctcgtcagttcaggcatcttttgtgccaattgacgatcttattcttcaagagttggaaatcatcgaacaaattggaaatttctattcgaatcatcaatcagttatcatataagaataagttgcattttgcaccagcacaacgcacatatttagcaaataattttcactttacactgggttgtattaaaataagttccatttaacatcatggtatatcaacaaacaataggatgcaacatagtgcaaagtgaaatcttgatgtaaaatggatgtactacacttgttacaaagcaaaacaagatacactctacctagtgcaaagtgtaatttacccatcaattaatcaatcacaaccttgcacaaattatagctgaagtttagggtcaattatttgcaaatgattcccttccaattgatttggagggaatatgattgcttgccactctgtggaggtgcatttgatcatttctcatcctgctcactgtaacaaattattcactagaggttattaatgtcatggtttattccaaataacacccttaccctctttgtgccgtcatggaatacgagacagcatttctgcatttgtagggacaaaaatgtctataacgccaaacgatcatatttcgaatcaaattagtataaattccacaggtattacaaattacttcgtggcaaataatggtagaagccaccacaacaatatggcaaaagaaaaggaaaaagaaaaatttccccatcttatttagattagactaaacacgctccaaatctgactccgccgccggcgatcttcatttcttgatgaattcgacgttgcgctccagcagctcgacggcctggtcggagcccgccatgccgacgaagtggaacgcgt

SEQ ID NO: 2384 - DNA, 2523 bp, Oryza sativa
acgacggggagtttctcggtggacacggcggccccgggcgggaggtacacgcgcgccctggcggcgccggcgtgaatgtcgcgggagacgacgcgggtgacggggtcggtgccggcggggacggtggggtccccgccgaggcggaagacgcgcccgctcttgtactggcagaggtagggctggaagtcgaaggcgacctcggagtcgggatccatggcggatggggagcggttggtggccggatcgggagacggaaatgagttggccacctgcaacaaatcgagctggaaacttaaaaagaagtctagttcacttcaagaagttcaacgcgggggagagagagatagtgggagcgtggttggtgagggtagagacttgcggcgagtggcaacgccgctttctcaactttttatttccccatttggtgatcggtgaacaacttttataattattttccccatagtatgacccgctcaaaaactaattactgctccctccctttcatattataaatcattttgattttttttcataattaatttttttaaaaatttatagaaaaataattaatttttttaaaaatttatagaaaaaactagtactccctcaatactcataaaggaagtcgtttaggacaatgtttaaatcaaaccttaggaatataaatcataaataactctcaagttgttaagtttgaaaatataaaaattatatgtatagatttttcttgaaaaatactttcataaaaatatacatatatcacttttcaatatatttttatagaaataagaaatcaaagttgtattttagagaccgtgtcactatcctaaacgatttcctttacgagtatgaagggagtatcatttacaataccaaattagtttcattaaatatactagtaatatgtttgtgttgaaaatattactatatttttctataaacttgatcaagtttgattagaagaaaaactaaagtggcttacaatataaaacaaaggaagtactagtattaataaagactatttcttctcgtgtttatttagatgatgtgagaaccgattacgatcgacttctgttcagtgaggtcgccgcaactcttaagagctgaacaaatacaaaggcattcaccgaataaatcggtgcaagttggtgacagttcttgaagatgggtgggcgatggcactagttgcaggcttgcagctatccttggacttttttttttgcatgaagttcacagccagccctgtctggatccccgaccgactatccagcatggtacacaaagacaacagtattttgacggtaaggagattgattaactgataaaaacggttggtgaacttggcatcatccatttggtcagactgccaacgacccaaaagccaacagagcaaaaaggaacggctagaagttgaaacttaggctgtgtttagttccacgtcaaaattagaagtttaaagaaattggaacgatgtgatagaaaagttggaagtttgtgtgtataagaaaacttgatgtgacggaaaagttagaagtttaaagaaaaaagttgggaactaaacaatgccttagtggttttggtggttgggggcttaagggaagacagccacaacaccgccagttaactgaggcgggttaaagggctcaaaccagagattttataggattttcataggaatttatccaaactcccctaaaaatccttataaattcctcacttccaaaggatatattagttccaggctacccccttagagaccaccatatggaaatccttgtactaccaatgagtaatttaagcacacgtagcaactgaagagcgtgaaaactcaattcaagagatgtaaagtatggaaaaaaaaaacccgctacctgatatgattttcaaattcatacacagtattgatctcaaaatgttctccagatcatttgactcagaggttgatactttcccagtttccatacatagtgtaacatagacaatgttattgtcatgggcttgttagcatgctacttactgcgttttgcagggaggcaagtgaatcaactgcagtctttgtgaaccaactgattccaaccttcactcgatgttcatctgtgggcatcctaaggcagtatacaatcttcctagctgcagaaccaagttgaatgttattcttaaacgtaaaattatgcaaaaacaggaaaagaacatgccggtgaggattcataccagcatgccctaaaggtccttccaaggtcaggccctcaataaagcttgctgttatcgcagcatcacttctaccaagtgtcatcatctcaccaagattttgaaacctgaaaagttacacaggatatttagctcttctatgaagttcaactattcctacagacatgacagaacattagcattaaaaaagaaatgaaaatccttagtaatcctgaatacgtcaacatagacagttcagctagatttaaacctgaatggcagaagaggtcggtcattgattgctgcccagagattccatccagcaaaatctgcttg

SEQ ID NO: 2385 - DNA, 816 bp, Oryza sativa
ttagagaagatcgcctccaaggagcccaagaccaccgccgagctttttgagctggcggacaaggtggctcggaaggaggaggctgggcctggaactctcccggcaccggtgcggcggccacagctgcccccgagtctgccccccgctctaagcggcgagataggaggcaaaagaaagccggcccgctctgatgacgagggccatgtccttgcggcagatgggcccgcacgggccccgcgcaagggaaaggccaccgatgacaagccgagctccactgctccacccagcgagggccggtcggcagacaagtggtgctcggtgcacaacacttatcggcacagtctcaccgactgccgctcggtcaagaatttggccgagcgattccaaaaggccgatgaggagaagcggtagggtcgacgggagggcaaggcccccgcgacctcaaccggtgatcggcgagaagaggccaagaacaaggcccccgcagatgatggcggtgacaatgaggatctggatttccagatacctcagggaaccatcgccacgctcgaccgggggggggggggcgtgcgctcacacctctcgccggagcttcaaggccatgaggcaagagcttttggctgctgttcccacgcacgaggtggctcggaaggcgcgctggtcggaggtgaagctcacctttgaccagagcgaccatccgacagtgctcgctcgaggagggaagttggcccttgtggcctccccgaccattcacaacgtcaggatgaagcgtgtcctggttgatgggggagccagcctgagcatcatttccccagc

SEQ ID NO: 2386 - DNA, 2371 bp, Oryza sativa
atcatcgcctaatttggtttggaaacttgtggattcgatctcgaatcggattcatctctctcctccaactccgaagtttccttctcgccgccggccgccgtgggccttcgccgccgcctccttgcacctatataaggacccccggtgtctcctctacccgccgccaccttttccttagctcgccgtcgtgtctagcgccgcctccgcgtagccctagtcgccgccgtcgttgccgtcggttcagccgcgccgcgccgccgttgcagtcgccgtcgtcggtcgccgtcgccaccatcgggatcgccaagtcgtcgccggccgtcgtcgttcgtcgtttggttcgagggtgagtaccgttgggttcgtctcgtcgtcctctacgtgtacatgtcctccaaagtcgcagccgaccatccaatctccggcgaggtcgccatcttggtccggccattgttgaggtcatcatgacgtcatcatcgtttttctttttcatgtttttctaatagattaaatcttcggaaattcataactaaatcatcgtaactcggttttgagtggttcaagttgctaaattcatctaaaatcatgatctacatgtttgtttactttatatgtactgtttatttggtttttattagtctttttcttcgttttgcgtgttagtttgtcgtttccgtcattgcgaaggttcgtgagtgcgtcgggagtgttcagaagattaattgaagaccgattattgcaaggcaagtcacacagatcctaaacacaatcctttgagcatgttgatcctatatttaaattctctatttatttcaactgtgcatttattttcgaatgtcactgggtggtgtgaacctatttctttgttatagcccttttgttcttgattactttattccttgataccttgggttattataacttgactagttgagctttatatattggttcagctagatattagatataattgcttagccatgcttagaaacattagcacactattgggataacttatgattcactattaattaattaatgatggcttaatgatagttcacgatggtcaatcgtgattggttaattaattacttgccaactaaaacttgataatggtgggttgtgagcacatggttttgagagtcgtgctcatggcaattaaggaccggttcgcgagctactattgtgaaatattaatcgtgccaaccacaagccagcgtgggcaacggctttaccttttgtatagcatggttcattgcggagcaccagactgagaagtggcggagataagcccacgggggtcgctggggagtccatgccttgttttataagggggtgattatgatccaggaatggtgcactatggtgagttgtgttgtacaaagggtattgtcacagcctctattcgggtactttccagtatcgcgacgcatggtagacatgatgttgaggctgtgtcttgtgggtacagtggtacacctctggccagagtaaaactattcgaatagccgtgcccgcggttatgggcgggttgagcaatgttttcctgaactctaggagaagaaggggagaaagctctccggagttaaggaacccttgtaactgttaaccatcatctcaaacacaggagtagggtattacgctccacagcggcccgaacctgtataatccgattgtgtgcaagctagctagtagtattagaggcggatacgtgatttctaagaggcgagcctcttcccccggccgaactcacgaaaggggggtctcacgacctcccgctatcgagggacttccctcgacagctggcgcgccaggtagggggaaggtcgcgcgctttgaagtgaaggcgttttcttctgccccaagtttccctgggcccttgacgaccatggtcgaggtcctggaggtggaggaggcggtggcgtttacccccaccccgtccgggagtggggattctagtgggagccgcggccctcgtcaccgccaccgcaactccccaactcctccctgccgcgaaccctcgcggagggaggatgccacccgttcgggtggttcggccctctctccgctcccgggcagggggaggccacgacgcgtcggggcacgtcgccgcctcacttacggcgacggcgattcgccccgaggcgcacttcaggcggcgagtgcccttctgcggcatccccccgtaaactcggagccggagacccctgttcagcgttggctggacgacgtggctaacttggtcacctatgcccagcggcagttggccgcgggcggccgacctgccaccaccagtacgtcgcgtactcctattaccctctcctcgtcggcaacgaggagggcccgccgctcggccaccgcctcaaggcgg

SEQ ID NO: 2387 - DNA, 8753 bp, Oryza sativa
gcaacgcgccgacaacctggcagtggccacggagccgcaggccccggaggcctctgcgtcccgtgtctccaagaagcgcctcacctcggctgatgaggtgcccgtcaaggagatcccccttggcgatgatccgtccaagaccgccaaaattggcagaaacctagacgccaaataggaaggtgcgctcgtctccttcctgcgggcaaattctgacgtcttcgcatggaagccgtcggatatgcccggggtccccagggaggtgatcgagcaccgccttgccgtacggccggatgcgcgacccgtccggcaaaaagtgcggcgtcaagccccagagcgacaggccttcatccgagaggaagtggcgcggcttctggaggctgacttcatccgcgaggttatccatccggagtggctggcgaacccggtggtcgtcccgaaggccaacggcaagctccggatgtgcatcgactacacgaacctcaacaaggcatgccctaaagatcccttccctctaccacgcatagatcagatagtcgacccactgcggggtgcgaccttttgtgttttctagatgcctactctgggtagcaccagattcgcatggctagggaagatgaggaaaaaactgtcttcattactcctgtgggcaccttttgttatacacctatgccttttgggttaaaaaatgcaggccctacttttcagcgcatgactcgtattactttgagtaatcaaatagggcgcaatgtagaggcgtatgtcgatgacctggtggtaaagacgcgccaccaggacacattgctgcaggatttggctgagactttcgatagtcttaggtccacacgcgtgaaactgaaccccgataagtgtgtgttcggtgtgccggcgggcaaacttctcggttttctagtctcctcccgaggcatagaagcaaatcccgagaaaatacgcgcgatagagaggatgcgcccccccagcaaacttagggatgtgcagtgtgtcactggatgcatggccgccctaagtcgattcatatcaaggctgggagagagggcgctacccctattcaagctcctcaagcgctctgggccgtttgtgtagacggaggaagctgagcaagctctcaaccagttgaaagcttacctcaccttccccccccccatcttggtagccccggggccgaaggaaccgttgctactctacttggccacgaccccccatgtggtgagtgccgccctagtagtcgagcgcgaagagggcgaaccggaggcctctttaactcgagatgacccttcgtctcccgaaggcccggagcccgaagcccccagcccccgggaggaccccgaagcccccgtgggaggaagggaggctttggcaagtggtcccgaggcctatgatcccgacatgactcgagacccccccccccccggggccctcgagcaagggcaacccagatcacggcccctgacggtacgaaccggccccaccgaaaggtgcagcggcccgtctactttgtcagcgaggcgcttcgagatgcgaaaacctgatacccacaggccagaaaatgctttatgcagttttaatggcctcatggaaattgcgccactatttccaagcgcatcgggtttccgtagtgacatactaccctctcggtcaaatcttgcacaaccgagagggcactggacgggtggtgaagtgggccatcgagctggcagagttcgatctgtacttcgaaccacggaacgcaatcaaaagccaggtcctagctgactttatcgcggagtggaccccagtggacgaacctgttccacccaaggtcccctccctccccggagatgaagaggacccaaacgccgatattcgtggtgggcactaggttatgcattttgacggctccctcaaccttcaaggtgcgggcgccggagtcacgctgacttcgccaagcggggacgtcctcaaatacgtcgttcggctcgacttccgagccacgaacaacatggcggaatatgaaggactcctcgcgggattgagggtggcggccggaatgggcatccgccgtctcctggtcctgggtgactcccagctggtcgtgaaacaagtatccaaagagtaccggtgcaccgacccacaaatggacgcatatgtccgtgaagtgcagcgcatggaacttcacttcgacggactcgagctccggcacgtgccccgacgtgacaacacagtcgctgatgagttgtcgcgtatcgcgtcggcacaagccccactccccccgggaatattcgaagaaagactcgcgcagccatcggcgcaaccagacccctcgagggaccccgatgacacgccctccgccccgacccttggcgacccgtggccctcgaggcccgagggggtcaaccccgcccccccccccccccgtcaggtcgtttggatgaccgacatccgcgcgtatctcgacggcaatactcttcctgaggatcgcgcagaagctgagaagctcgcgcatatctccaagcggtacgtcctcgtagaagggaccctctaccggcgtgccgccaacgggatactcttgaagtgtgtttctcgagagcaaggcatcgagctcatagccgacacccattagggtgagtgcggggcccattcggcctcacgaactttggtcggtaaagccttccgacaaggtttttactggccgactgtattgcaagatgcccaagaatgggtccggcggtgcaaggcatgccaattccacgccaagcaaatccaccagccggcccaagccttacaggtcatcccactctcttggccttttgcggtctgggggctagacatccttggaccattcaaggcggctcgagggggtatcagcacctgtacgtcgccatcgacaagttcaccaagtggcccgaagcttacccggtcgtcaagatcgacaagcattccgccctcaagttcatcaggggcatcacatcacgattcggagtgcccaaccgcatcattacagataacggcacccagttcaccagtgagctgttcggcgactattgcgacgacatgggcatcaaattgtgctttgcctcacccgcccaccccaagagcaacggccaagtcgagcgagccaatgccgaaatcctcaaaggccttaaggccaagacgtacaacatcctgaagaaacacggggattcatggctcgaggagttgcccgctgtgttgtgggcaaatcggaccactccaagccgtgccacaggggaaacaccatttttcctggtctatggcgccgaagcggtcctaccctcggagatttccctaagatcgcctcgcgtcgcgctgtacaatgaggccaaccaggatgatcttcgccgcgacgatctcgattatcttgaagaacggagaaggcgtgcagccctgcgtgccgcgcgctaccaacaaagcctgcggcgctaccatcaacgccacgtccgggcccggtcactgcaagttggcgatctcgtcctacgccgcgtccaatcgcgtctggggctgagcaagctctcgccaatgtgggaggggccatacaaagtgatcggcgttctccggccaggctccgttcgactaaccacggaggatggcacggagttgcctaacccctggaatatcgaacacctccgtcgcttctatccatagcgtcgagattttttgctttccaggagctcggcccaaccctcgcacaacccctcggtttgtacgggcttggccgggggctaccactgtgtatcctcttccctttacaagcaatgaatttttctactcactgtgaagcccattatgcacccttttttctctctctttcctctggcttgtcctggttcaaaggatagttcgcggttactctgaaccctaagtgccgtggggcgacctgaaaaccgccgaaagggagcacaaacgcgggccgcgccccgggttgcaccgaaccccgggggctcggaagggcctacacacggccgtccccgacccccgatcgtcgtagccccggtctagccagtcccgctgggcggctccctcagggcgacggttttgcctttcaccacttaggtaccacggaccgagcgctggtttgccttttcgctagaacaagcccgggggggaggatggggtaaaagcggcatttcgatcacaggcagattaattatatactttcgctcttgttttttcttctttctatgccgcaggcattcaatggaaaaaagcaaaggaacaaaaaatgcgaaaaggaagttttaattgcagaacaagacaggaacggcacgatggcctaaatacaagaagtgtccgctacaggcacacaacaaagggaaattggaagcgcaggtaatcacggagtgcccgggcccccgaggctggcgccgctaacgacgttgtcccagtcctcgccgccgaagtcgtcatcatcgtccccgctgccgctctcctcgtctgaggcaagcccgaaggtgaaccgaggggccgacccctcgaagttagagacgatcgcgtcggccgcctcccggacttgctcccgagcccttgcctcggtccccgggggaaaatcctcgagtgcgcgccatgggacaaagtcggggtcacgaacttggtggctcacgagaaccagttccaccgcggcccgcgccaaggaagccgacgacgatttcacggtctcgctaacctcctcctccagcctctccagatccgcagccagcccgtccagccggagtgcgagtgccggcagtgtgggcggaagcttactatcccggcgcacggaaatgctgactcggcgccccgcgcgctccagtcggtcgacggcgtcggagagctgcccgggtccgatctcgttggtgaggcggagggccgcaatctccccggcttgatcttgcaccaagcgttctagatcggcgagagtgctctgagccgtggcaagctggctccccaactccgcgccgccgggctgcccgcccgccgccaggtccttctcacgggcctccagctcagaagccctcgccgcaatcgccgcgcgcttggcgcgagcactctccagatgccgagcctcacgcccagcaacggcctcctcgcgtttcgcgagctgctcgcccagctggcgcgaggccacctcacggcggttcacctcagcttcgcgctcggcgagtgcgacgtcccgttcccggcacgcctcttcccggagccgtagctcctccgcgcggcggtccgctgaagctttcacggcgagggtgatccggtcacgctcagctgcgacctcttcacgaaggcgaagggaggcctccacctccgccgctgttctctcgtgggcggccaaggtggactcccgctgatcgagcagacgcgctcgctcctccagcacctgagtccgcctttccagctcctgagctcgctgcgcctgctcctggtcgcgcgcgttttgctcacgctggctctgattgaggacctcgattcgttgacgaatcgtggtctcgaactcctgcgcggagcgggcacgctcatccaaggccctgcgttcggcctcgagcgccgctgtctgagcccgcagcgaggcattggcctccgatacccgccgctcttgggcaacagctgcgtcgaggataccgcgggcgtccttgatcctcttcgccaaatcctcggcatgggcctcgtactggaggcggatgtcacccagtgcttcgtccaggacgctcaaggcaaccagcgccgcctgccgctcttcctccacctctcgcatgatggagtccagcgactcctcacgcgcctggattttggctagttgggcttggcgcattttgtgtcccaccctcaccatgtcgtccatggcgtggcgcccctcgtcaactcgcgcgcggtccgcggcgagctgtgcccattcagcctccagggccgctcgctcttctgccagggcttgaacttgggcttgagcccctcccggacggtggaatcggcggcggcgagcacctgcaggagcggctccatacttgccggagtcggagaagaaaaagtcgcggcccgcccctgtgatgatggagtgctgctggatccccacgagactgggggctgctctcgcccccccccttctgcgcgaccagccccgagggcgtcccaagtgcaagggggagcggccgtccctctcgccccccgcctcgggtcctcgggtagattcggcctcggcctcaggctcgggcccgcccccaattttggcctcggcctcaggctcgggcccgcccccgatttcggcctcgacctcgggctcagggccgccctgtccctcggcatccgagccgcgacctccctcgccccccgatcccgggtggcgctccgcatgaaccctggtctcggagtcgcccccaggagggacgtcatcatcgctatcgcccacggcgggacgagtcccggctagggttcgctcgggtccggacccggtatgcggcccgtgggccccgccgaggggctgtgaaggccccgcggccttggatcggccaagcccgggccgctccgatcgttcggatttggtcgcccgcgaagggtcggaccccgagaccccctaggaaggaatctcgctacaagggaactcagatcgcgttaacaaagaaaaagaaaaggagggaacaagagatcgagctggataaaagcaccgaggtgggtgccggcgatcgtacctgcggggagggcggttgaaagtccacttcggaggctcaatgaagctcccccgacacggctccgtttgtcctatcttccggagccgtttctttttccgtccggcctcaggcccggcagggcgcttgtggcccgctggcggacgatccgccacgcgctcggcgccccctccacgcgggggagagggcggtcgagattcggacatcttccgcttctctttcaggtcgctggccgagtcgtccccgggtccgcggtttgggccgggagacctggagctcccacctccgccgggtccgcttgtccgactcccgcctgcggtcgcgccaccgccaccaacaccggcagtgctaccaccggtgccgccccggcaggaccggctcctgccggcgccaacaaccgacatcatggccaggatgctctcccggtcgcggtcgcagcagaggggaaggatcccgtctggaatcagagtttgctcggcggagtccaagcccagtactcgccgaatcaccatcttcgcgtcctcctccccccaatcccagcgctcacccacatgcgtgcgcatggggtcgttgggaccagtgtactcccacgcgccatgggatcgatcctggagaggtgcaatgcggcggcggaaatagtcaccaaagaccatcgcccctgtgaggcccaggcttcgcaggcccctaaggtgatcccacaccgcgtcgtactcttcgcccagttccgaaactgccagccatgcggcggatctttcgggaggaccgacgggaagccgaagtcgtggatggtccggcaatgcggtgtagaaccagtccttcttccagtcctcccatttcttgcgaagatgactctcgatgtattgccccgctgtgcctggccggggttggaagtaacatccccccaccaccgcaccttgcagcagctgcgggatgaagaaagactggaacagccgcatcgtcggccgcaccccgatgaacatctcacacagatgcgcgaagatggccagcgtcatcacgacgttgggtgcgagatgcaaggcatggatttcatagaaatccaaaacctcatggaagaatccagagaacggcggaatcaaccccgccatagcaaaggacaagagatgcacggatcgctccggataccgcggccgcggccgcaactcccccgccctcacgacggcgccttccggcatgatcttgcgggggaggctaaggtgtctatccgccgtaatgcgtgatgccgggagcaccgtgtcgccaacgtcttgagccatgatggccggcggagaagcggcggagggcttggcgcgcagaatagtgtgaagtggcgagaatgttagggcttaaggagcaagaagacgagtgggcagttggcgaaaggaaggaggcaaagtcctcgcctccatatccttttatcctcgcctcacccacgctcacctcctcgtttcacgccctcacggttgcccccacgattctcgcgcccgcggttgtctcttcgtttcccgtgtccactcatcacgtcgcccattgaatctgcgccctgcatttagtgcgcctatcagcggcacactcgaagtagggcgcacaacggtcacgggcacaacctgagcgaaccgtcgccactaccgccgcatgagtagcgggcaagggaatcgaggcgtggcctaaccgaccccctgattttcgcgccttaaacatcaccatcatcagcacggtcagtggtggcaaaccgctgccgtggttaatacgccaacctggccattcggcgacatttccttagattccctaccggacccacaaccccagcttgggaagtcgtgaggcaccacgtcagaaccgacctcaggaggtcagtgtccgatatggtgccgagggctactgacggagatatgggcccgggggtatgtgaagtgggggaaagttacctttccatccagccgcgtggctctacagcctggccctactcccgcgcctcgcgagtcacagaagcggccgggggggcctcagggtgccacgtcgtgcccctcgggctctcccgctgcctcgccctgaggccctcgcctagctgccatgtggcgggaggaggga

SEQ ID NO: 2388 - DNA, 727 bp, Oryza sativa
aaaggaattgcatattcagcagatcctgggacaacatcaattttagcttcagcccctaaagctagaacgagcctggctgcccattccaaaaggtatatcatcagttatatcactcaaaacttctaaggacgccataaaattacaaatgcaagatatcctgaaaagttattgtacatttttacaagctaaacaaagtaaccacataatcttatttagtggtattgtactatcatacagtttcctaatacagaagatagaaagaagtccgtcataggctccaccactataggataaactctaaagtatcatgattcaggggtggcacaatcgaaggaagaaatgctgcataatcatttggtatttctataaaagatatataaatatataaactattgcgttgccacttgtgaaactgatgggcacattaacaaggcactaaatgatatccgcaaatttcaaaattttataccagcatataacaatctgtccccagtctaaaaattttcacaaagagttacatgaaggaattcaatgatattgtgagagatatatagtttattaaatttgtttgacatccattgcaattctgtagaaagttatcatccgtaccaatcatattcaataacggtgccactttccagatgaacaactccaccagtgcatgatcctccagaatctcttctaaagtgatcagaagggcgcagaagctttacactatccttcacga

SEQ ID NO: 2389 - DNA, 4445 bp, Oryza sativa
ggccccccacgcgtacgccacgtagaccaaaccccccgcgaattaggtcaagggggtaattcgtccggtttgcatagttgggggtgaagaatgtccggttttgtggttcaggggagtaatcaggacgaccgcgataattcggggggggggagggaggggggttattcgtactttttcatatattgtaatcgtagtagtatggtaatcttctttaaacttttatagccatattactaattttgtatgttttaatatgctttattattagtatattatgttatacttttgatctattttattatctataattgcattgtatatattagcatctttagatttactatgtttagaaagaaaattggattggaccacccgtatcttaaatcctaaatccgccatggagttccatactccgacaatcatgatgtgggcagtaagtacaaaatatttttttaagattttcctaaaatatattattcacgtgggtagtaattattatatatgggccttgccccccacattataattccaacataaccatggtgattgttatgggttaggatttatagcgggtaaacaccgcctaccaagttgttataggttagggttcatagggggtaaacaccaccgggaggatagccaggcgatgacagctggtagggatgagagggggacttaggttggagaagactaattctgattcattgcttaatcctatatacctatacaattcatccccactaactgcaattaaaactattttccttgcttctcagtgagccacgtcacatctatcagtttcagccgttcgattcagccacacatcgatctcagacactgatctcatacactcatgatctatcaaccattcaacaagcccataattaccgagctcttacaggcacgttggcttcctcgctccagtatggtcctataggctcttgctatcctgtaaccgctggtgtattaatcgccaaggaacttgagcaggctgtaacggcaaaggtagtgcacattgtgaggagttttaatcattcatcttccatacacatcacctacttgacgtcttcctctatgtatgcttgcctttctcccgcggaagcatagcacgtcgccggcaacccgcatcatccaccaagggcggcctgatgtgtccaacgccataatgcatacacatacacgagttgtcatcccatcaaatactctaatcctccgataatcataggttacaagactcatctcatcccgcttacctatgcttcctcccgttgaatagtctatggattttatttgttctgccaaccagccacagctgaacggcgatgatggcacctttaatttgcattgttcatttccctgtcttcattttccacttctacatgttatttaaatttgagatgatcaatttccgtccatctgctcacttctcaatgtaattggggattgtttgaagaggagaatatcgatgacttctgtttttcttttactgtgattgtgttctccctagcttcatgcagacttggcaaaaattggtgagtcagtgataaaaaatgaaactacactcaactgtataggtctgaatattttgtttcacttgcaggtatttgggttaagcaattgcaggagttcaacgagtcactttggttcgtagttcgtggagtatttatgttcctacggaatcacacaatttctgctgcgcagtgaagctattcgatgagtttcagcctattggtctgcatcaagacattcaggtaaggctatttgttaacgtagtaacttcattcagcctgaaaaggtgctaactacacattgctgtgtgtcggagatatgggcccgggggtatgtgaagtgggggaaagttacctttccatccagccatgtggctctacagcctggccctactcccgcgcctcgtgagtcacagaagcggccgggggggcctcggggtgccacatcgtgcccctcgggctctcccgctgcctcgccccgaggccctcgcctagctgccatgtggcgggaggagggagcaggaagggggcccaggctgaacagccatcaatgcgcagcgccccaactgtccctcgtcacatttaatgcggtaagggcagacgtgcggtgccgcctagttgacccacatcaatcgaacgtgaccagtctgtgaccggcctgttgccggtcacatccgattgaacgggcggccgtgcccccacgtcgcctctgtaacaggcggagtggaagtaggtatgacccgtcccatcaaggcgtcattcagggtttcctccatgagaaaaggaccaccacaagtcttcacccatttatgagggaatgacagggctgtcccccgtgtcaggcggggggtggcgctgggtcccactcaaggacgggctgctgcttagcttccgagcgaaggcacggctcgtggcccggtcaaggtaaggtgggtccccctcccaaggaaggataggtagaggcggtgcatgtggtatccccttgaactataaaaggaggaccttgcccaccgagcaaaaggatgactcccagaaaacctgaactctaggagaagaaggggagaaagctctccggagttaaagaacccttgtaactcttaaccataatctcaaacacaggagtagggtattacgctccacagcggcccaaacctgtataatccgattgtgtgcaagctagctagtagtcttaggggcggatacgcgatttctaagaggcgagcctcttcccccggccaaactcacgaaaggggggtctcacgacctcccgctatcgagggacttccctcgacagtgtgcaagatcactgatttaaaatttagtatgatcataaagtttttcattttaaaggttcactctgggaacattaatgatttgctactcaactaaggcaagagagttacttcactatcacattcttaacactaacagaaactagattgagctgtaactctttaagttgtttcactgtaacgataaggaatcaaggcacgagatgtgatgagtttgttactttcgagaataaactaatttggttagttttatttccacatctgtttatttaaaaagaagcatgtaattttgacaatattaccaaccagcaataacaataataaaccttttcattatatagccttccctttgtttcatttgatatttggacaataagcaatttcatcaaaaaaacgatgcatatttaatcatatttttttagcaatgctacaagattatgtgagcacattagataattgcacttgcattatatgtgggcaagataccttttgtatttttcacattgcacttacaataatcattgagtcccgcaacaacacgcggggtattatcagttagaatgatgatacaatccatccttatatagatggagagaggacccagtctaattctatccaacaaactctatccttatccttagggcctcgatccctcggcccactacccatgacatatacttgtagttggctctctgaacttgattagattcacaaagtcaacaattggtagtagtactccctccgtcccataatataagggattttggacagatgtgagacgtccagattcattgtattaggatgtgtcacatctacccataatcccttgtattatgggactgagggagtactagcaggcaatagcgaccacctgctcaaccagttttttcccctgctcaactccatgtctccatcatctattcatctatcgcaaattcaaatcatagccaaatcactcggcatttggagtgcatcgattttatagaaattcattccatcacatcgctactcgatcctaagccaacgacaaagcccccgcattggcaatggcaatggcgccatcattttatttgcttgtttatttcatcaatttcacgcaacagtgacacgagtacccgatcgacgcgaaggtcgcagcaccaagtcatcaatcaacgagtgacgaaatccacgacgaggtccatcatcttcgccgccgccgccgtgccgggacgcgtgaggtggaacaagtggtcttcccccggcgtgtccaccagctcggcctccccgtgccaccggctcgccacgagcgccgcgtggtacgccctccctttccccgccaggaagtcgtccccggccacggccaccatcaccctcctgcacggcagcgccgccagcgacggcgcgccctgctgcaccgtcgggctcagccgcgggtcgtcgacgcggacgtcggggctcccgcacatgaaccgccactcgcggcggatccggtcctcgagcgccgggcccatggtgttcgacgcgtcccagaagtaggggtgcatcaggagcacgccggtgatccccgcgccgcccgggagcggggcggcggcggcccgcatggcgacgttgtgcgcgatgttcgcgccggcgctgtcccccgcgatgaacacccgcgacgcgt

SEQ ID NO: 2390 - DNA, 3179 bp, Oryza sativa
  unsure (1)..(3179): unsure at all n locations
ccaccgggatgaggcaacagtcgacggctgatgagcatggtgtggagcgcaatgtggctggcgctccagcccatgagcttaatgaggccgacgccgtttgccgcgctctcggcctccacgtgccagacagtgatggcctcctgcgtcaccttcaccgctgtgtggaacccgaacaaccggttgataacgccaacgtgttttccaccgtcttggggatccccgccaccaccacggcaagccgctgctgctggacctcatggtggatcgtcaccgcaccgcgcatgatgttgtccgcgccgacgtcatacacttggttgaacctgtgccactcgatggcgtccacgatcctggtgaggtcgaacccgccgcgcgacgtgccgagcaccatcccgcaggccttgttctagtgctccaccgtcgccggatcgagcgggacaaactcctcgaaaatgaccgtaggcggcagcaacagcgctgtcgccgctggggtgggacagaggaggagcagaggcggcggagggggaggaggatggaggtagtggcgcgcgagggaggagcctggaagggaaggtagcggtggcgcgcaaggtcgccgagggtgccacctgctacccgcctcgctcgtctgcaggaagggaagatgaagagggggagagagaagagagagaggggagagggaagaagggaggtgaggtgacatgtggggcataggttttattatttttccaatatcgaattgccacgtaagtgccacgttaaatgccacgtgggacaaagacgaagtcaaaccagccacattgccatcacatcagctaaaaccaccttccaaaccgtcgagggacctcgtttacactgattttgatagctcggggaccgccggaccagttgtatctggtttttggtttttgggttcaaggacgtgtaaagttaagggaccctcaaatgaacttaatccatcacaccataacccataaatagattaggcctgtctaagacgatagacagattaggtccatctaaggccagaaatgattgaaatggcatggctaaattatggcgtaaagaattaaatggcccaatttcattcacgttaaacgtggcgcaaatttgtttggctaatgttgaacgtagtggaagagtacttgatatacttccaaaatgtggcgactggttggtttgtaatcgtgatagagaatggaaaatgaatgttaggaaaatgtgcaacaaatcattttctgggaaaagatgtccagcttacctagttgttgagtaaacgagtgaacggatgaatttagggatggcaattttgcccatgggtttggttatccgcgaatacccgacccattgggcacgggcgtgggtgtgattttttatccgtgggtacgcccgcccaagactcgtagacatcgtgggcaacagccgggtttcattttttacctgtgggtaacccatgcccaacccgatacatatgtattagctaattttgatttatctcttaattcttatacccctttctcttattcatttgtgatactaactaataataagttgtgatgtaattcaaattattgttgataactgataatttggtaaattattgattttatttttctttattaaattatatatctttcgagttattattcacaaagttttacccgctaaccctagtgggtagggtttgggcgggcgacgatgggcatagggtcgggcatggtttnactcnacccatgnccgacccaacccgttgccatccctagatgaattgatgcacaccctttaaaacactattcaaatcaaattggactattggagtagtggagtgccaaaatttgtcaccaccatcacccagcgcatcaacacagctgtaacataagtaccgggcaggcaaacacaatgatttcaacttgaatcatttgtactctttttctactttttctactttttcttcttcgaaaaagagttcgccaccaaccgtccatccaaaaaatacaccagctatctcacatgaactctagctaaccgtctagactaatctaaagactacaaaagccaagaagaattttgataattggtatatgagttcgtggaactgtaccaaatttgatgtggcgttgcacatccgaacggagttcctgtctcctgcaggcagtagatactagatagcctgtaggcagctcatacagtgatgacacctgacatccatggcacaacaacgggagcagatggatgagcatccctgtacgactcagaatacctgtctttgaagttcaatttagggtgatcagcctgcaagcatgcaaacaatgaattcaaagttacttcgctattctttggcagtatgaggcccaatctttaggatcaacatcaaatgcaggttcatctgaaaggaattgtcagtgaaataatccacagaaatattacagttaaatacagtactttaagataatcggattgcatttctataacctttattggcaaagatatgataaaattgcataaaaaatagtacaatattccccgcaaaaaaaaatagtacaacgcattaaaacttccatgttgcaaaacaagattctcctacaaccgcaagtaactaaatgttgaatagcatcatgaattcagtattggagaattcaacataccaaccttgccactttaagtattgaattcgctactaaattaaaggcagcaaaagtactgtgccatactttaccttgtgatctaaaagttacaacttatgcaccagcctgtccagccatgttccaatattcaggaactggaaactgcttagcttaccaaattttgctaatgtgagattttgctgttaccaaattgatttggtttgtttggcaaacaaaacaagcatgtcctccaagccaccacaaccaagttacaagcagggccatgccctaagatatgcatgataacttctaatatatccaccaattagattcaatgtatgcagtcatttttaaatatagaggacaaaatagttatatggaaagaacataacaggaactgatgagtccctctatttttaggtataattttcagaatcattatctccaaagcagaataggaagtacccaactaccccgtcatcaaatataaaagaagacaacatgatgatacctgtttcaaccagcactcttgatgtttgtgttcatatttatctggcg

SEQ ID NO: 2391 - DNA, 760 bp, Oryza sativa
ttaaaaacaaacactaaaaaaaattatgttgaaaatatcagtgacagtcacatatctgggcgaactcctcctgcggctttctttctctgggcctaattctctaggctgcgtacgtgagttaggacactcgtgggctccgttacggcccaacttaaccacgtgaaaactcctcccacaaaacagaaaaaaaaaagagtaagaacaggaatgtgaatgcgacgactgcctgctgtcaactgaccacctggcagtgcaacgggtggcgcacagccgagcatgctccaagcggctattaattccgtgtttaaatcttttaatccgcgtgtttaaagctttaaattcgacagctggtgagttgttaataaagccttctgccatagcgatagaactctccaggctccatctcagtagctgacgtcaccaccccagcgtccacacgcgcaccgcatggcttctaccgacgccgacgccgacgcggtcgccgtggagctcctcccgttcatccgcgtctacgtgagcggccgcgtggagcgcctgctcggcaccgacacggtcgcggcgtccctcgacgagcccacgggcgtggcttccaaggacgtcaccgttgacccggcgaccaacctctccgtgcgcctctacctcccgccggcggtcgccgccggcgagaggctgccgatcctcgtgtacttccacggcggcggcttcatggtcgagtcggccacgtccccgacgtaccaccgctacctcaacgcgctcgcct

SEQ ID NO: 2392 - DNA, 939 bp, Oryza sativa
ttatattatagtacatgataaattataagccaaccgtaccaagtttgaccatgccttatattaggatgaagggattaggcttgccgatcaatgagtgaaaagcaatagttagatcaacttgggtttactagactaatctttgtgtcatgcaagccaataccgctgccacgtaatcattttcatggcaaaaccacctaaaaaactactctggggggttatttgaaccctttttcatactttaaggggtagaatatccggtttcgtactttagggggtgaagtaggcttattccttctggtaatggagcatgggaaataccctataagggaaaaatgatgggctataacatatcactgatatctacaacttacaagaaaggctcaggtcattttgtagctcatgctaactatgacaaattagtaattatgtgcacaaaatggtttatgtgattttttatattaacattttggctatcggagtttttcggtactaaaaggctgaaaattggttatgtttcattttctcattttattttgtgtgttttctctacataggtgctagggcctaatgcgttgtgctggctctgcccaatatcaaggaatacaggcaatggtattcgtttccgtacatcatatgatataccactatctacaccaccaatttgacatcaggtagcattacattcatgttagatttctggtaatttgctaaaaaaacttggttgcctatccaagtgtgaaatgtgctattctcgcaatagcatttgataacccttcataaaggaatagcgtttgtcaatgtcttgaaactcttgcatcaagagtttgtacttgatgtgatcaaatgtgtaaatgacactcccgtgtaagatacaggaagaggagctggatattcctccaggctccaaggatctatatggattttggagctagaaatgtt

SEQ ID NO: 2393 - DNA, 1812 bp, Oryza sativa
actataatctcaacgtgctgaccacatagttaggcaaatgaaaacaagcagaaaactttatataccttttgaacatcctgcacaaatctgaatcttgatttttgttgtaatgcaggatcaacgtgactgacctgatcagcttaggcatggagcacggcacatgggagatgagcgaatccaagcaccgggtcgtcctcgcggacaaaacataccacggcgagatcagagtcagctcacgttcacggcttctgcaaaggtaaacaaatcaccagacgcacgactgaattattgattattcatgttacgccccgttgacctccattggtctctcctgattggctgggatctgaatgtgattcgatgttgatgtccaatgacaggctcaagaccacgcagacaggttggaggatgggcgcacagctttcgtcagtagaaagattgtgaacttcaagtctataatcagttggggcctgtgggaggtttagataagtatactatagtactagcaaggtaggattttgtgagtaacaacggcatctaatgcccaagattgatgtggttcgaagtgtatgtatgctgccttttttttttctatactagatgtatattcagaacattgtagagtcatgaacctgttaatggatgtgaattatgatactacttcaacctctttttcgcctttgtgtagcgatacatacggtcagactttaccatctctaacctccaatatattaattagaatgtatgtataattcaagtgtgatgataacgagttgatttttcatcaaaaccacttatgtatcgttatattctttacaattttttattaccacattattaggacgtctgtgtgtataagaaatcatctatttagaaacctagggagcaggcttacaccgggaagtatctactgagaagtaccaattaggtcaaaccgtgaaaaccatcacatatcagagtatcgagaggaatgtctgcatttatccactccataattcatgagaacaaatgcaatcaagtttcttgtgtccttggaaaatccattcttagtgatgtcctccgaaaagaagactagttcagaaataaatcaaaggaaccactattctttcatcgtgtcatcatatacaacgaccaaatataaacataagcaaaaaatctattatattattaaaggaatagaaaaaaggagtctccacgttcgctctcatggcctaaaaattctcacattaatcggagaaaaagaaaaatcagagtccatatagaaatacaatttagaaatagctgaaattcggaattaaaaaataagaaatattagaagaggagactagagtccatatagaaatacaatttagaaatagttaaaattcgaaattaaaaaataaggaatattagaagaggagattagagtccatatagaaatacaattaggaaataactgaaatttggaattaaaaataaggaatattagaagtagagtatagagtccatatagaaatacaattaggaaataatagaaattcggaattaaaaataaggaatattagaagtagagtatagagtccatatagaattataattaaggaaataatagaaattcggaattaaaaataaggaatattagaagtagagtatagagtccatataggaatttaaaactaactaaaattcggaataaacataataaattaaaggtagagttttgagtctgtataaaaatacaatttacaaataactaaaattcgaaattaagaaaaacacgtgaagaagagtttaaagtcaacatagaaatacaatttagaagtaactgaaatt

SEQ ID NO: 2394 - DNA, 1033 bp, Oryza sativa
gccgccagcatgtagaacgtcgcaccggggtacgacggcttggtggtgaggagcacgttggtggtctggcccggggtgatgaggagggtgtccacggtgaatggcttgacgtagaccgcgtcgacgtcgaccacggtgagcgtgtgcccggcgatggagaagaagagctcgtcattgagcgcagcgttgatgagccgcagcatgtacgtcttcccggcctccaccttcagcttgaacgtatctgcatgccacacaatgcgtatgcgtataatcaaaatgtactagctagctagcttatagctgcaagtgtacagcacagtgcaccacctttggcagagcagttgtagagcggcccagggaggccattgatggtgaacgcgtcggagacgttcgggcctccgccggtctgcgtcgcctggcttatcaccgcctccgtgtccgccttccaccactcgcctaccacccaaacaaaacaaacgcaatttaacccctgatcactgatcagtcgccatgtttgttacgcttacgtacagacccacgccacgcgacagtacgtctgtcgtcgatcattacataccgaagacgacggggacctccttgtccggcgccgggaacgggtaggggacgccggccttggggaggatgatgatggggccgtacacggtggcgcggagccaggagatgtgcgcgtgccaccacagcgtgccgcgctgcccggtgatggtgtacttgtacacgtagctgccgcccggctggatcgggcactgcgtgatgtacgccggcccgtccgcccacccgctccgcagctgccggatgccgtgcctgcatcatcgatcgatcgatcgatcgtcacaatgcgcagtgatgagctcgatcggtaaaattttgcaccggaaaactgatcgatcaaacggtgaagcgtgcgtgcgcgcgggtgtgtgcgtaccagtggatgctcatgttgtagggggagtggttgatgacccggatgacgacgaggtcgcctcctcgcgaacacagtcggccccgggaa

SEQ ID NO: 2395 - DNA, 4204 bp, Oryza sativa
  unsure (1)..(4204): unsure at all n locations
cttacattgcatttctgatcaataagcgagaaaacagatttggctgcgcacacatgagttgaaatttgcaactaattcgctacttttgcttggacgtgtgcaggggtatggttcatgcattgccacttggaggtgcacgtcagctggggcctgaagatggcatgggtggtgcaggacgggagcctacccaaccagaagatcctccctccgccgtccgatctccccaaatgctaaccgatcgacaccggccgaccagagacagagattgcgtcttgctcatcagcttccctgtaggatactcggatactcctctgcttttgctagcttgcttctgttgattgctcgcggttggtgctatggaatgcttttcttgtagtggtgtgcctttccgaagttgtgtcgtcatctggttagctgatgtacgaatgatcatgggcaagtttcttgatcagacgcaaggcctttaattttgggcttctcattattatttgtcaccttttgtaacatatgagggagctggatcataaatccacgttcatcccaatatttgtaccatcatttgatgtacggcaaaaggatttttttatgtactatttcatattaatcaatgtttgttatattgttttggagtaactcatttacctcggtgattttggtgtaactagtattgactaggggattagcttgctatgacaggaatagattgtggttgcttgagaatgttttttttaatcaaagtttcacttttttttaaagaaaataccgcaataaaattgccaattcactttactgataaggaatatattgtggttgtgtggcaagtctgtttttggcagctccagcaacacaggagtgaaatcaaatcaaaggtttaaataataaaaggcctacaaagtgtatccaagtccccaagtctaccttgttaaattttctaagaaaaaataataacactcgttaactgttatgcaggacccaataaaaagcagccaatcaaaatatttaggtagtaacctgacccacacaatgcttaggttacaaaacatttcatatcaatgaaaataacgggcggtatcgttatcacctttttccaagaaaaaaaatatttgatttgggacagagacttgaaaaattaggaggcgacttctttctcacattttttttttgaagagattacaacgagactcctatgcagtcaccaacgcaaaccaccaaacacacgtgtgtgcggcttccaccgtatgctaggaatttttcagtcatcaaatatctcctggagtgtggcagaatctttactcaacccactaaacatgcacatccatatactgttaaaattaaagtacactggttccaagccttgaacataacccgtttagagttaatcattgaggttaattactgcttgattatagaataaattgtactgtcatgaaatttgngaataataaattaatgacaatctagctgctctttacactttgacatcaatctgcacctctgtttgatcttattgacatgtggatacataactcacattgtcgatgtttgatgtcgcgattccggtatttgcatagtatggggatcgttggtactaggatagatctcagactaaggtaaaaaagatagatacaaggatttttatacaggttcgggcccctgaattgtcagataataaccttacatcctgttggccgaagccggtttggttttattttatcaaccttattcgacccattccatttttgggggtaacctatctaactgttatcgacttggcggtctgaaggtctgactcgtattcaacaacagggtagccttcctcctcaagttcgtgcccggcgagatcaaagacaacgttaaatccttacagccggtctctataggtaccggatagggttgatccaggcatatctctgatgtcaatatccggcagcttgtcttggcatatgtgggcttgtatgtagatcttttgtcttgatctattgttctgtgacacgccccgaactagtcccgagcggaactagcccgtgacgctccaaattaacctgttagtcgataccagtcccaaaacacagtgctggtatcacaggaaggcagaatatcacagcaacagaggtctctttattatagagtaggagtacagtcatgttgggctgcggacagatcccgagctcacaactgcattacaaaagggaagcggaagccaagacttcgaccaaacatcacaggcgcgacttgggaactaggccgaaaccctaaaactcatcgtagccggcttgctcctggaagaactcctcgtcagcgggatccgtttcatcttcttcagcaactggggggattatttatgtagagcaagggtgagtatgggagtactcagcaagccatgggaaataagtgtttaatgcaggcttcaaggaaaggctgttgtttttgcaattgattttatttaaactcttttctgaaacaactaagtgagtgcttctcaaacgacacggatgagacagtgcgtctcgtccggtcggagtatgtgcaatgtatcagtcttttgaattgatcaagattggcacccggccaacagctttcaaacggccacccgggcctggctgatcccatcagccgcagattttccaaacatcaatcccaaaccacatcagcaaatttcacaaagcagtagtaaaacaaaactacgctaggaatcacctcacatccgcccatgaccgtgggcacggctgttcgaacagtttaataacctctgcagagggggtacactttacccacacgacattactaacccggatcatccagcccgtgcagaacggccacgactagagaccttaaggctttcatgacaaggcatttcgaaagccgacacaggttcaccatatgccaacgagaggggtcccagaccaacaccagatcaggtcccataccatattgtgccaggaaacccgggggtcctccccgacaccaccccgttgaatccacatgtctcttggcatcatggctcccccgattagctagttactcagccaggggtgtcccattccacccatgtggtcgtacttgtcttatgttcggatgaaattccaaggaaacggtccttaagtgcaagagcgggaaactgtacacccggtacattccccgggtccgcaatttggaaattcatttagttcgcaagcaccgacccaggtgtcgggtttttccgagtcttttgtaaaacccaagttttacccaggatgtttcttagaatttaagtttgaggcgaccgtcgatactcgtacagagtgcacgattaccgaggcgcaactaaggggttaagggggacatggtataacaattaacaatggaaggatcagatgcaacaagttaggtacgtccgccaatctgccttgcagacgggacaagcagattaagtgcaatcctatcaatacataatatttttcaagcaacataattaagttcaaatataggctcaagatgttcaaaggtggcttgccttgctcgagatcttgagcttgatcctcgaaatcctcgcactgcgggtcttcgggctccgaaactacacgcgaaacgggacaactcagcaaacggcgaaaataaagccctattattgacctctaagcgtgccattagatagatctcgagatttgagaaattttggaagttgaacggagtcaaacggacttacggttgggaagatattgaatttctaagattattggatttttagtctaaaggaaaaggatttatttaaatcctttttgaaaaagaaaagaaaggaaaggaaggagggagggaaattagactttcctcgggcggctagggcgcggcccgagagaaaggggcggctcgaccgagcttaatgggccggccggcccaagaaggcggcccaaagcgcgcgcgggggcggggaggggagagagagagagccggtgggccgggtccatcccgcgtggtctcgggtgggacccgcttgtcggcgactcggctcaccgtgagcgaggtgcacgcggggcgtgctagggtttagggagggagccgcgacgcatgcgcgcggttcgcggaggacgcggtgcggcgggcccacgcgcagcctcatggctcaccgcggaccatgcgcacggggggggggaacggagggagcggctggccgggtcagccgatccggtcgtgccgaggtggctccgacgtggcgcctacgtggctg

SEQ ID NO: 2396 - DNA, 842 bp, Oryza sativa
ccgttgactccgaatgcagtgacgacagctagctgacatgtggtgcatgtgtgtggcaggggtgtggctcatgcactgtcacttcgacgtgcacttgagctggggcctgtccatggcgtggctggtcaacgacggccctctgccgagtcagaagatgtgccgccgccgtcggatcttcccaagtgctgatggctgatccaatggccgggccgggacagattgtttgcgaacgttttgctgtgtgcgccttcgcgttccgttgtgtttgacgtacaaaactctttgatttggaccgacttaattttaactggtgtgtgccgattttgtggcaagtgtttgggggttttgcccccgtgcttaattcctctttcaaaacagaataagatgtaagcaactcggttctgttggtattttttttcgtgggcatttgttattggtgtgtacacagtcgaatccataatgtaccagataacttctatatttaattgttttggtttttgatcatttcaatataaaaaatggcttaagctcgagagtaagaaaagcgatcacattatcttactatctgttataaaaccagccccgaaatcgacgtcggtagctaaacgcggaagaaaacgccataggagatccaaaacgacaacgtcaccgagatacgatatttggtaacggagttcagccgtagcctacatctccagggcactgattacgggcgctcctctccgatctagcatattacagcgtatcagagttacaacgactcacggtcggttgacgcaggcaaccgctccctctcgctatgctaagtcaccatgcggttacaacaagcacgcccctctatt

SEQ ID NO: 2397 - DNA, 1231 bp, Oryza sativa
tctttaggagttaaaaccatcgtttactctttaacttatcagctgtagccaaactttaaattttacaactcaatttttgagttgatttttccatcatagtttatttgttttattgacttctctgagaatacatatataaaaactttacgaccaaatcattttttattggtaataagtgttacgcttataaataattaactgtaggtgaaatgatggaagtaatatattttctcttgattttagatagtttgaattcaagttgtgggaaacaaatccacagatttgtttaattgggaaagaaaatggatactcatgaaagaaaaatataggcaaaaaggacaacgtacaaggagtgttctggaacagtttcatgcaattaatgcccatttttttattcaaagaagcatcaaaacagtgtcattgtatagttgtacacaaataaaagaaaaaagaacaaaataatgtcacaaaagttagctaagaacgggctaacacactaaaatctccttcaggagaaagcaatcgcaaattggcgaacaaatgaaatgaggaaagaagaatcaacggcatctgtggtaaggtcccgactagcatttgggcagatcggacggcggaggaagcagcttctggttcggatggctcccatccaacactagccatgccatcctcaggccccacgtcgtgtgcgcctccaaatgacagtgcatgaaccatacacctgcacgcacataattgcacaacaaaaattattagcagggtagtactatatctaagacgaatttcacgtacactaattgcagagataactaactaactaactcacctgggttgtcagcgaggaaacggatggccacccatccgcggccggcacgccgacggtgttgcgctcgacggggtcgacgaggttgaacttggccgggtcgttcacggcgtcgtagttgccgaacccttggccgatcacgaagaagttgaagccgtgcaggtgcagcgggtggctctcgatgcccaggatgctggtgtcctgcatcaccagctccaccgacgtgttgtaccgcagcaccagcagcttggtcccggtcttcacgttggtgttgttcggcggcgtccccgtgtagttgaacggcgacagcggcgcgacggggaagtccggcgcgtacacgccgctggagagtccggtgaagtgggactgcagcagcgccctcgccgggagcacgaaggagacgttgttcat

SEQ ID NO: 2398 - DNA, 703 bp, Oryza sativa
ttgttcatgccccatataatactttacatccaatgcaacagcacttaattatgcaatgatttctgctgtaacaagtaacaaagagaacactgaaatcacttttaaaattgtacaaaccaacctaggctctcaaagcaaatgtgaaggtttcaaagtgcgcctcagtcacatcaagaataaaatatagcaattatttgcaatttaagaaaaaacagttataagcagttctcatatagaattgacaacattgaccaagccgatattgtttaacatatatataataaaatttgctacctcctgaattgataaaacaaaaagtatggcagcccaacaacaaagtatttgcaacaattttgtttatttatgtactcgtagcctagcagcattgtggatactggatagtttggcagccaggttgcaaaattcttatgtaaaatttgataaatcaactagtagaggcaaatgaaaattggcaccgtaaaaaataccttgtttttcttttccaagcctccgataaccctatcaattgcagattcaaaatgttgcattgtaagagtgtgccctcacttcttgcagcaattaaagctgcctcattacaaacattggcaatgtcagctccagcaaatccaggtgtcaaagcagctaatctttgtgaataaaatgatggttccttgtccagtttcagctttttaaggtagatgcg

SEQ ID NO: 2399 - DNA, 1794 bp, Oryza sativa
ctaatttcataactcgcatggaaaccacgagacgaatcttttgagcctaattaatacgtcattagcacgtctgtgttattgtagcacttatggctaatcatggactaattaggctcaaaagattcgtctcgagattttcgtgccaactgtgcaattagtttttttatctatatttaatgttccatttgagtgtccaaagattcgatatgatgtttttgggaaaaaaattttggaaactaaaccaggctatctctcaccaaacaaccaaccttgcagaaagtgagacgacgatcgagcgaacagaatatgaattccctttccactcatcgctttctcaggggcggatccaatgtgggtgtagagcggactcaaatcccccctacacctatcggacccatggatacccccctgagtccccccttcaattttttcgtcctgattgataagataggaggtgctaaatgtattttaatagtattttagcatagtttaatactgagattatatgtttatattgatgtactcggtatgttgaggggctgtttggtttggtgccacacaatgttatggatccgcccctgcgctttctccttataatttcttgacgacgcgttgagcttcggttgatcccgacgcctgcaacagtgccacggccgcacggcgtcgtcgtcgtcaagcgcgagtatgatcttgtccggcacagcgctacagccacgatcgaatttactttcgaatttcgaaagatctcgttgtgtatacctatggcaccaatcgatcttgctcgctgccactgccacttgctgcacgcactgaaagggagacgtagagctgttcctctgaaaatgaccgataaatccacgaaacgattcggtttcacccgtaacttgacatgatatttgggcgaagcaactgttaaactgtcatttgctcattttttttcaggcagtttggtcgagcctatactcggggcctatttagttcccaaatttttttttcaaaaacatcacattgaatctttggacacatgcatgaagcattaaatatagataaaaagaaaaactaattgcacagttatgggaaaaatcgcgagacgaatcttttaagcctaattagtccgtgattagccataagtgctacagtaatccacatgtgctaatgacggcttaattagtctcaaaagattcatctcgcggtttccaagcgagttctgaaattagttttttcattcgtgtctgagaatcccttccgacatccggtcaaacgttcgttgtgacacctaaaaattttcttttccccaactaaacacatcctcatttactctgttacagttgaagttgaaccacattgctcccctcgccacaagggtgtcaatccaaacgtcatctcggtcaattctgggatagcagcatggtcgaggacacgaggtagtataggaaatactactccactatgcactgaaaaagtcgtcctgcaatttctcgtaaaaaaaaaagttgtcatgcaattggggtagacccagccggggcaggacatggtctctttcgctaataaaaactccgccatcggctcatccatcacacagcgatggacacataaatatatactctctcggttcctaattaaatacttcatacaattttgactagttaaaaacatactctctttatattttattgtataacgccattgactttttaaccaacgtttagtcattcgtgttattcaaaatttttgtgcaaatataaaaatatttatgttatacttaaagaacatttgatgataaatcaagtcaaa

SEQ ID NO: 2400 - DNA, 520 bp, Oryza sativa
ggtggcacgcccacttctcctggcttcgcgtgcacctatacggccctctcgtcatcctccccaagcgcggcgagggcttcccgttccctcgcccctacaaggagctgcctcccatcatgttcggtacgtgacgcctctcccctgtgtgatggcacttgaacttgaaattgtgacggtgtttcgtaatgcgtacacttgtgtaggtgagtggttcaatgcggatacggaggctgtcatcaaccaggccctgcagacgggagcaggccctaatatctccgacgcctacactttcaatgggcttcatggcccgacttataactgctcgtccaaaggtgagatgctctgtcctctcctgattggcccatgaattaatcacggatttgtctgtttatgtctctatgatgctcgtggcagacacgtacaaggtgaaggtgcagccagggaggacgtacctgctccggctgatcaactcggcgctcaacgacgagctcttattcggcatcgccaaccacacgctcac

SEQ ID NO: 2401 - DNA, 506 bp, Oryza sativa
ctcggtgacctgctgattcaacatcagaggtttctgtcttcaccttcacaagcttcttctcttgtctaacctcaccaaggaacctactcccctcatctccactgtagagcttatccacatcaatcacaagcttgctctcatcaggaagaaacttgcttgcctcttgaaacccgcggcggaactgcaaagcctgttggttctgcacaacaaaatcattcaggctaacatcaggcaagacaccagccgggctcagcaacgactcgaatccttctgagaaagtaacactgctgccgttcgaagacgcgaacgacgaagattgcgacgggaggttctcacgaaccggcttggtctggagctgatagaattccgtcgggtcgtacggccaggcgccgcccgattccaccatgccccccgtggggatcagatccccgtacagctggggcgtctgcgagaaggcggccgtggggaactcgaggaccggcgtctgcggcacggcgccaagcccg

SEQ ID NO: 2402 - DNA, 682 bp, Oryza sativa
acaattctgtattgctgattcagcccagagcagaggtcgaagctgatcgccgagtgccagtcggcggatgtggtggtgctcacctacgcctgtgaccaacctgcgacgctggagcggctcagctcattctggttccccgaactccggcgcctccaggtgaggctctgcactcactgccggaattgattggtaattttgtggattaattttgtccgctgtggctcatgttttgttctgcttggctcagttggaggcaccggtgattgtcgtgggatgtaagctggacctgaggggtgaggagcagggaactcttgatgccgtgatggcacccatcatggttgcattccgagagatcgagacctgcattgagtgctctgcgcttcgccagatcctggttaatatgtctgcagtcataattttgtgttgataggttgctctgagatagggatgcttggcacattgctgcacataattaagttaatagctacaacactagctagatcataattttattgtattctaggcatgaacttgttgtacttttactgggcaatacttttattatgtactgtgtttattagctaaccagtagcaccaagttggacagactagagtaatattaccaataataattagagcagttttaaaaattatgaaatatacaagaaagtattacacgata

SEQ ID NO: 2403 - DNA, 702 bp, Oryza sativa
atgatggagaacgagagggagcgagccaacggcttggattcgccggagggagtccgtcgggggcggattgcggcggcggcaaccggcggagagaaaagggggaaacggcgacgaggtcacgaggggccgattcccagcggtgagagcatctacacggctacgggaacccattgctagcgtcggattgggcggagctatgccaagcgaggccggcgacgagcaggcgctacggagcacgggcggcgacggcggcgagcatacagcgagcggcggcaacggtcggggcggcgccagctagctacggggaggctactcgtgctactacccgagtctaaggggaggagatggaacgaggagggagaacggagggaggcactaccgggacgaggcggggcgctgagacgagaggccgacggcacgggagtgatctctccggcctcgggccagggaagaggaagaagagggcgcgcccggagtccccttccgcgtcctcgctcgtgccggctcctccgacacgcgcgacgatgaacggagcacgggaggcggcgataatggagtagaggcgatgggacaaaacaagaggagaagggagagagggcgcctgggctttatagggtggcaacgtcgatttgggaaccgacctagggcggtcaagggagggagctagcgctcggcggtcgcggccaaagcggcgacgggggg

SEQ ID NO: 2404 - DNA, 774 bp, Oryza sativa
acaataaaattctagaaatcaaagatcaattttctgcctaacaacacccccacaggtttgtcaagacaaattatatagttcatattaaacactgcgtgctccttatacaagatatgattgctcccagattaatttgcttaatactttacatgcactgtaagcaatctattccatacctagttttgatgctcagaatgcacagatcaatgaatatagagattaaaagaacaacaatatggggtttcctagagtcatgaaagaatcttgcacagtgctacaggacagccacaccaataaatacaatgcgtgtgagttctgaatagagaaagggcttctctttcttgttttgaaaccaatcaacaaataataatttgctaaaaggtcaatccatcaacaaaaaaatacagggttgtcaattgttgtgtcaactcttatcatgcaaagtttgagaaaataccttggagatgaacccttcaaacgacaaaccacccaagacattattttcagcacagttctcgtacagatgagaagaccacggactgaaattccaatagaagagtattgatacaggaaatatcaacagacagattattaaatagtaattcttcacacccttctaatgcaaagaatcttcattacatcaagtccaatagagaaattaatacaagaaatatttaacaattttggtaacctaactttttgttacaatgaaagtatcaagttattaaacatgaaagggcgttctatcagcttcttacttttcaggtgcggttg

SEQ ID NO: 2405 - DNA, 742 bp, Oryza sativa
aattcgagctcggtacccagaaaccgaatacacatgtacaaaacccccctataggaatacgcaaggaaataatacaattggccaaaatagataatgagggtcatctccatatcattttgcatttctcgacaaatataatctgtttggctattctaagtggttctttttttctgggtaaagaggaacttgttattttgaattcttgggttcaggaattcttctataacttaaatgactcagtaaaagctttttttattcttttagctactgatttttttgttggatttcactccacccgcggttgggaactactaattcgttgggtctataacgatcttggatgggttcctaacgagctaattttcactatttttgtttgtagatttcctgtgattctagatacatgtttgaaattttgggtctttttttgtttaaaccgcctatctccttcgcttgtagtcatttatcattcaattagtgaagcataaactcatttgatctcctgatattaatcaaaattagcatcctttttcctttagaaagaaagcctttttccattttagcaaaattctttttttctatttctacctgctcaaggtattcatcattccagtacaacttgtgcagtagaatgacaacagattcgtgtataaggactagattagcttagctacctatctaatttatttgtaaaatttcgggatctgtgattgacatggaaaataaaaatactttttcttgg

SEQ ID NO: 2406 - DNA, 653 bp, Oryza sativa
cattgagattttaaaatcaaacatgattattattggggtttatttttttatttttagaagcttgaacctttaaaaattggaccttatagtttttagagtttattgtcctgttgggtttcatttttttcataatagaaatcctatcaagcgctaccaatatactcctccacgacccatccgccacatactctttattgccattgggattataaaactcaaacataactatcgttggaattcattttttactttatagaagacccacaaccatcggtggctctgccattgtactcatatacgacccgccagctgccttttatttttattgtaattgagattttaaaaatcaaatatgattatcattggggattatttttttactttctagaagccccgccaaccgccttgaccgattgattcacgacctgcccgtcgtccttcgttttaatcatcattaggattttgtttggcgttttattaatagtttttagatgtcctatgaaccgccaccactctgctcctctatagacctgctacttaattaatctcatcatgtgttttagatggtatttttttaattagtcttatttttatcaacaattttagttagtataaaatatattcctagttgaaatttacttttctttttctaa

SEQ ID NO: 2407 - DNA, 699 bp, Oryza sativa
aagaaattagaaaaaccagaaaacctataggctgacgccaaagattccatccaaaaaaaccatattttgactgtgcttcaactatatcaactgtacttgaactgttggataatcatagtcgacgataacatcacagttcccaccgctattccaaaaccgtacatgaaaccttagtttcatacggctcctctatgatcagaaaaaaggaaagtactgtttcatttcgttattatcttcttgggcgtagttagaattatctaagataaaatcgatttcaacgtcctaaattagaccaaaggaattctgtctgctagaataataaaaaacgcttcggaattcatctcatcctttataatataatggtactttttctttgttcagcaataacttaatcttggaataaaacactcgttataacaattaataaacgaaaagagttgggtattagttcatgaagaattctgtatgaatatggataaacgacggaaagaataaataaagatctttttttttgtattgggggattccatatcttttgtcctcaggcatgcaagctttccccgaggggtatttaaaaagaaaaaaggaataaagggttaattcgttcttgatagccatttccttaacaagtgaatgggaacatactctggatcggaatccgaagaaagtactacttgctcatttccaccaatttcaagt

SEQ ID NO: 2408 - DNA, 1560 bp, Oryza sativa
aatatcataattctcagccataatgtaagattgcatcctactacaccaatgagaaaaatccgttccatcgaaaacatgaggcttagttaaaaacttattagaagcagccatggcaaaaactctagatcggttaaaatccaaagaagcaaacaaagctttgataccacttgtaggattgaatcacaagaactaagccaaccaaagggggggggggtgaatggttgagatacccaaaaaccaaaaacttttagcggaaataaaagttaccctcgaaatcgatggatcgcggtctgaccgaggtagtcgtccggtctgaccgtctgaaagccaccggtctgaccgagattgaaactccggtctaaccgcctgatcagctgtcgcttgctgtcgccaccgccggtctgaccgcccttacgccgccggtcggaccgccgcgatgccgccggtctgaccgccactgagatgccggttagactgccgaaacccggtgaaacacaaatcgaagaactctcaaagtagatgacaactttattgtttctctctgtgtttacaaagtgcaccaacaacactccttacaaaaatctcgactaaactcaaaaccctaactaaactagctctcaaaagcaatacaaaagcgatacaaagcgatgcagggaagactcacgctccccctctatttatacatgaggtaggcagcctaaagccacgaatcaaactcatactaagagtcctaaacaccttaggaaaccctctagtacaagaaagaacctttacataaccaatcgtaccaaatttgactccttccaaattcgactccgcatcccatacgcatacaatacctccatcatatgccatatggaatctccatcaaccacgtgcatcaactctagccttagtatcccgcatgatatttgaccaccacggacatcgtcttaccaccaagccgactcccggtccatcaccgcaaatactctcccgaggcatcgagtcacctacacatgaaacaaacaaagaaaccatattccgagactaagctatctccaacttgactcattagtagcaaacaacagtattacatacgtataatatccatctagaagccataaccatgaaacaatcacggatatccaaagaaacaacccgaaaccgaaactgacacagcgtcgaccggtcagaccgcgggctgcgccggtctgactgcgcaatacacgccggtctgaccggcacacccagcccggtctgaccggtcccgacaaactagtaaatcctgttcattttctgaaaattgattatctccaaaaccacttcgacgataatctccaaatatcaaaaccaataatcacatatgccaattgttcatcacaaaataagaatcaaaacacacattgatcttacaaatgattcatcaagaagctacgccatatagcaatgcaacctaattttcattatgcttgtagcatgacatgatttgtaggtgggtggaagttcttttggcgccatttaggttgttacagaatgtattagttaatttgtttgttagataaatacctcaaattcaat

SEQ ID NO: 2409 - DNA, 625 bp, Oryza sativa
ttctccatcgccgggcacacgctcaccgtggtcgacgtcgacgcggtctacgtcaagccattcaccgtggacaccctcctcatcaccccgggccagaccaccaacgtgctcctcaccaccaagccgtcgtaccccggtgcgacgttctacatgctggcggcgccatactccacggcgatgtccggcacgttcgacaacaccaccgtcgcgggaatcctcgagtacgaggaccccagctcccactccaccgcggcgttcaacaagaacctcccggtgctcaggcccaccctgccgcagatcaacgacaccagcttcgtctccaactacaccgcaaagctccgcagcttcgccacggcggagtacccggcgaacgtgccgcagcaggtggacacgcggttcttcttcaccgtcggcctgggcacgcacccctgcgccgtgaacgggacgtgccagggtcccaacgggagccggttcgcggcggccgtgaacaacgtctccttcgtgctcccctccacggcgctgctgcagtcgcactacaccggcaggtccaacggggtgtacgcctccaacttcccggccatgccgctgtcgccttcaactacaccgggacgccgccgaacaacac

SEQ ID NO: 2410 - DNA, 668 bp, Oryza sativa
aatgcaggaccatcactgtatatggattaacaattgtgttggacatgaaaactacaagattttcctagtctttgtgctgtatgctgtagtagcaagcttatattcactggtacttcaatatccttggtttattttagcagctattccttgttaggaaattaagaatgtgaggattaacatttataacaggttctggttataggaggtgctgtgcacagtttgcctaagaatgaacaattaggcagtgattcttctagaacatcaattgtaagtacctcagaagggctgtttcagtcatgctgtataatatgaccttgtataatatgctaagtgaataatatgtttcaaatgtgcagatcatttgcggggtatttttgtgtccactagctttggcattgtccattcttttgggttggcatgtgtatctcatctttcataataaaactactattgaggtttgagaaattgaatccccttggtgtttagggatttattgtttgtggaattgtaatgttgagtatgttggccgtttgcagtaccatgaaggagttagggcaatgtggttggcagaaaaggctggaaatctataccaccatccctatgaccttggtgtctatgagaatcttgtttcagtaagtattattcccgttcttttcttttcatatgct

SEQ ID NO: 2411 - DNA, 17197 bp, Oryza sativa
tcaacctttcccattgtaaaacctttcgcaagcaaaaagttcttaagcctatcataccatgccctaggagcttgtttcaaaccatacaaagctttagacaatttaaaaacatggttgggaaaatcaagattttcaaaacctggtggttgtttgacataaacttcctcctatacaaaaccatttagaaaagcatttttcacatccatttgatacaatttaaaaccttttgaagcagcaaaagccaacaaaagtctaattgcctcaattctagcaacaagagcaaaagtttcatcaaaatccaaaccctcaacttgtgtaaaaccttgagcaacaagtctagctttatttctcacaatcaaaccatcctcattttgtttatttttgaaaacccacttggttccaataacattatgtccagaatgtggttcaactaaagtccaaactttgtttctctcaaaattttcaagttcttcatgcatggcgttaatccacgattcatcagttaatgcatgtgacacatctttgggttcaaaagaagcaacaaatgcggaatttgcacaaacatcatgagtcgttaccttagaccttgtagtccgctcacttatattaccaatgatttgttccggcggatgtcgtcgttgaatgtgcaaaggagcagcaacttctgaagttgatccacgttctgtttcagtactgatcgaagttgaattctctggaggaccatctcgatcagcaccaacagtacccgaacccgacgaccctggccggtctgaccgctcctcatgtgtcggtctgaccggaggtgtgccggcggtctgaccggcctggcgcccggtctgaccggccgagccgacctcgtcgtcgtcgtcgtagtcgctctcgtcttcaaaaatatgaccatcctccccctgaacctgtgacagtgtacctgcaatttcaggtctagtaccaggactagcctcatcaaaagaaacttcacaactctcaacaattttgttagtccctaagataagtacacgataggcacgagtgtgtgcggggtaaccaagaaacaatccatcggtagggcgtgcctcaaacttatccaaatttccagatttcaagacaaagcacttgcaaccaaaaacacgcaaatgtgaaactttgggttgatgaccaaatcaaagttcataagaagtttttcctagtttagatcgcaagaaaactcgatttgaaatatagcaagcagtgttaatcgcctcagcccaaaattttctaggagttttgtatttatctaacatcgttctagccatctcaaccaaaacacgatttttcctttcaacaacaccgttttgttgaggaacacgaggagaagaaaattcatgttcaagacctctttcattgcaaaattgttcaaatgaagcatttttaaactctccaccattatcacttcgaattcttttcaaagaaccaggaaattcaagctccaatcgaagaaacaaaccacgaaagtgttgaaaagcttcatccttagttgccataaagaaaacccaagaatatcgagaaaaatcgtcaactataaccaacgcataccactttcctccaacagattgcactctagctggaccaacagtatccatatgtaatagctgtcccggtgcatccgtcatcacagaaacaataggagcatgtgaagtagaaaccatcttagcatgacgacacggtgtacaaaccaaatcaagatctttcttaagtttaggcaaaccacgaacaagatccaaaccacttaacctagtgagatgatcaaaaccaacatgtccaagtctacgatgccaaaacatcacatctttatcaaacttagcaaccaaacaagttatcacaggtgaaacagaattttcaaaatcagctttaaacactcttccataacgagaaatattcagcacagaatcaccacaagaatcaaaaattttacttctagttttcttaaagtgaacttcaaactcttcatcaacaatttgtgaaaccgaaagcaaattgtactttaaatccttaaccaaagctacattcttcaattcaaaattttcatttaccataaccaaacctgtagcgacaacggcactagtagaagcatcagcaaagacaattgattcagtcttggatgcctttttgagggaggagaaccaatctttatcaccggtcatgtgccgcgaacaaccggaatccacaatccatacgttctccttccttgccaccaaagcctacactgtcacagcctgaatttttgtttcaggatttaaaaattatttaataaattattaatagaatatatattaaatgttcattaatttacaagtgaagttaaatgtgggaaataaaatttcctaaatataaagcatggatggatttaatttgtattaaattctccatgattaattatactctttggaattttctcgaatttctcagagctcaattattaattttaataatacaaagaatagtttagcaattatttaattaacaaattaatcattaaatggtctggttttaatattgttaaatactttgagtgtccaagtatgttcaagatttttcttggaattatttgagcattgaaagtatttttaacaattgaaagatcatctcattggttaatttatttggaaaagtaataaaaatcctcctcctcagcttgggccgaattcagcccattctctcccttcctctcagcccagccaaagtctgatttacctccctatcgctacagtactccatcttcctcctccagacagagccgagccagccgtgctcgtgcacagtgccgccgcctcctcccaccaatccggcctccccgttgctcctttttccaaattagttgcgggaatggaatcctctcaatctcctcttccttttccccaagaaatccccaaaagtttatatggaaattctttccaatttcgcggatcaaatcctttcctttttcttttttttttgaacggaaaacagcactagagtgccttttcatcgaatagagcaggagaaaatacaaacccctaggggtaaaagaaaaacggagaaccactatagctgtacactatacagagtgtgggattaactcacgcaaccgcttagctcctgctaaagcccaaaggctcgcctcctctttgattttcattagtaggaagttcgttgccacctctttgtgatcaaaaatccgccgattcctctctttccaaatttcccagacgactaacagaatgagcgatcgaagtccttttttcgggacactaggcgtgtttgcaatgttctcccaccactgtttgactgactgggcttcctcccattccgttgggtccatctgctgatagcccacccatgcagagacgaggtgccagatcctcttggtgtatctacaagtggcaacgtggtgcaatgccgtctcagtctcgcggcggcaaagagggcaacaaccattgttctgccatcccctggtcgcaagccggtctaaagtccagactctgttctgaatgatgagccaagcatgaaatttgcatttccccggcgcccagggtttccaaatcaaggaattgaagtttgtactcggcgccccgcagcactgcgcatggtaagccgaggaggccgtgtagtgcccgttgtttgtgaacttccaagtaatctgatccggttctccaacatctaagtgcacatttcggaccgcttcccacagtgcgactagctgttcgacgaggtcgactgcgatagatgattgtgaatcaagcttaaaatcttgcacctaggcgtcctcctcctttccttgccgaagggattttcctctgttttttgagatcgcaaagacaagcggcatgaggtctttgggtctttgcccaccaatccatgcggactcccaaaatcgcaccgtgtttccgtcccctattgttatgtttgttgaggcggcgaagatcctttcctttttccggcaaatataaactttcccgagtttttcccgtcgatgtgggctcgatcccggcctcccatggctatataaaggaccccctagtcgtcctctacccatcccctcaagtcccgtccgccgccatcgccggaaacgctctccccgcgagctccctctctctccacctccggcagccgctccagctgccgtgcgccgtcgccccggccgtcgccggtcagcgccgccacttccctcggctccgcaaagtcgagctctaccccggccacccgttcttttgcgctgaaccccgccggaagtcgccgtcaccgtgaaggccgaaccgttgccatgttttgatctccaacgaagctttgccgtcgactccgtggtcgccggacctcgccgtatccactgtcggcatcgcagcagtgaggagaagcctggcagccacctccgcgaagacgcaagccatcggagcaccgtcgtccccgtgaagccgatctgttccatcttcagtcgcgccgttcgttgtcgtccgtcgtcgccctcggtcgccgtcgaatccattgggttcgcaggagcaaggtgaagcccggccaccggtttttcttcaccgaagatcgctgaaacgtcgccgccatcgctgacccgaccccgtcgccgcctctacctcgctgccggccgtctgccgtcatcatccatcgtcacgccgtccctcagtgagctttcctctctccgatgtcgttcatcggtgtagtttatccatcgggtcttgatccaatttaatctaatcttgtttggccctagcgtcgttgtcgtctccatgtgttgctatcggaacgttgtcatcatccctccctctccgatcattttggatcggtgagacgtctatccttgtctccttggtttagatttcaacccatcggccgcgcttgccaagccgcttcgtcgcagccgcagccgtgcccgttgcgttgttgttcgccgcgctgctgccctagcctgtgcaccgtcgctaccggttgtgccgttgttgcttgccgtcgccgctgcgctagtcgcctagccaccgttgtgccctccctgccacagtcgtgttgctcctgctgtgcgttaccgcttgaccgctagctgctgtttggccgctgctcgtgtgtgccaagttgttgccgtcccgctactgcaaccaccgagccactggtcgccgtgctgtgttgtgccgtgccgtgccgttgctgctataccatgtcgcagccgtgcgtcgcttaaacctagccgccgctttagccgttgctcggtaatcaagttgtctagccgtaggtgcatccctaggttcctaccggcctatcgtttgccataccggggctttaccatgaatcgtgtctagcccaccggtttagtcgcagccgttgttgagttgttcgctcgttcgttcgtccgtctagagtcgtcctttagttcagagccgttcagagccgccggttccgttcgccggtttcggttgatcattaggctgatcccgggtcatgtagaattgactcgttgagtcggtatctcgtgaggctcacttgccagatcaatcgaagccatccaatcttggtcaactctatgtcaagattaatcttagccatccaaaatcaatataaatcatttcctctcttttcagtggcatattattcctttttaatatatgtcatctaccaattataatctaatctttttccggaggttgttttaatcttttctctcagttataaatcatttgtaaatggtttaattaatttggaatagtcttttctttaataggtttaattggaattaaatcttgtaaaattcataactaattcatatgaaatcaaaatgaggccgttcaagtctctaaaatcatctaaaatcatgatctacatgtttgtttactttttatgtattgtttatttggtttttattagtctttttcctcgttttgcgtgttagcttgtcgtttccatcgtttcgaaggttcgtgagtgcgccggaagtattcaagaagattaattgaagatcgattattgcaaggcaagtcagacagatcccaaacacagttcctttgagcatgttgatcctatatttaaattctctatttatttcaactgtgcatttatttttgaatgtcaccgggtggtgtgaacctattcctttgttatggccagtttgcattgattaccctatttcttgattacctctggttataatttgactagttggatttatatattggttcaactagatgtattagatataattgcttagccatgcttagaaacattagcacacaattgggataactaatgtttcactactacttaaagatggacatgataatggtagctcacgatggctaatcgtgattggttaattaattaatgtgccaactaaaacttgataatggtgggttgtgagcacatggttttgatggtcgtgctcatgacaattaaggaccggttcacgagtttcggttgtgaaacattaaccgtgccaaccacaagccagaattggcaagggctggacactttgtatagcaaggctcattgtggagcaccagactgagaagtggcggagataagcccacgggggttgctggggagtccatgcctctggtttttgagggggtgactacgatccaggaacggtgcactgctttgggttgagttatgcgagggtcttgtcacaatcactcgtcatggtgacgtgtctgcgcggacacggtgacatgacggtgggttgtgtcttgtgggtacagtggtacacctctggccagagtaaaactattcgaatagccgtgcccgcggtcatgggcgggtctaacaatgtctttcgtgattagtcccacactactcattaataataatgtggtaattgatggtaattaatttagctcctagtttggaatggtacattcctagtttggagatagatctgtacagccgggtatggttgttcaggatggttgggcctgagcagcatgggtgtgctgttcagtgtttgatttaaattgatgattaattactctattgttttacaattctcaaatgtttgctaaatgctgcttttgcaaatgagccctgtattatgccattctttggtatccttgtgcacttgcatatttgctgtgtggcttgctgagtatgtcatatgctcaccttgcaataatcaatcaaacctcagttgaagacaagttgcgaaggagaagacgtttggcttatactccagttgagctgcctgtgggagtggagccggagcttcgctagattttattttccgctgcagttttcttcttggtgaggactaagtgcctcttaagtaagtatttattgttctagttaatttgatgaatctgtatattaaattgtcagtttgtgtacctcagctgattcctggacgaggattttatgcacaaataagttcggaaattactagtaaatttctgggcatgacatacacacaagcagaagttgaagcctcagtactggggttagatgataataaaaatttaggaatccagtactgcgacacacgaccagaagatccaataggcatatatccacgtgcaaaatcaattttagaattttcagaaaaattccttcgaggccggtctgaccgagatacagtggtcggtctgaccgggggccggtctgaccgcctctgtactgccggtctggctggtgtccggtctgaccgaggctctgcagccggtctgaccgcgggacccactgcggtctgaccggttgcctcgagggaaaaccagatttttgccactttgattttgcaacagcaatctctctctcctttttctgtttatgagctaatctgaaacaaaaatcaacaatatgtccatctttgccacaaaaagaacaaatatatttttcaaactagcatgaaaagcaatttgatatttttgcaataactttttagttaaaaacaactcatccaaagtgcgtgtgtgcaaagcaaaactacaagcaagagaagatctatttttcaaatcatgtgaagcattaacatctctaatttttgaaatctcattcattaaaacctcacaattttcacaatcatcatcattaggaataagatattttaacctatcaatttcagatttaagagattcaatgataaattcatgttttttatacatcttctcacactttttattttttgcactcaaaatattaatagctccttcaaaagcactcacctcattatcttcatactctgtgtcagattcaccatgcgccatgaagcaaacatcggagacgttatttcccttatcatcatctccactttcaccatctacatcacttagtggctcgaaagcggcgcaaacttgttgaaaagccttcctaagattctccatcttcctcccttggttagaacccttcgacttgtagttgttgggcttgttgttgttggtcttcccaccatctttgtcttctcttttgcctctcccaagcttaggacaatacgaacgaagatgatcaattgaaccacattcaaagcaatgatttggaccacctcttttcctgttcctggcattattcatagctcgagcaattcggttagcagccaaagccaaatcctcctcctcgatttgttcgagttgatcatcggatgtggcattaaaagcagcaagaaaagaaggcatagatgaagaagcatcaacaaccaaagaggaagaagaagaaaccaaagcactcgatttagaatcaactttgcgagaaagaatattcatctcatgtgttttcaatttagtataaagtgaatccaaagtcaaagtagacatgttaacagattcctgaatagatgtaactttcatctcccaaatagacatgtcgagaccattcaaaaagtgacgagaaatctcagattatggatagttagcatcataagaagaatcaacagatctaagatcactcaaaattttagtaaatctagaaagatagtcatccaaagcctctccagattttatctcaaatttaatgtactcctttttaaaaagatctcgacgaagctctttaatgttatttgttccttgatgaaaattcttcaaagcattccaaatctcatgagcagtttcaagatgtgcaacacgatcataatcagaacgagaaatcccactcaaaagaatattacgagctttgcaattattttcaaattcagtttttaaagcatcagtattaattgcttcaggaatcacataaggatgagaaactttcctccaaatatcataattttcagtcataatgtaagattgcatcttactacaccaatgaggaaaatcagttccatcgaaaatatgaggcttagttgaaaacctagcgggagtagccatggcaaaaagtttagatcgataaaaatccaaagaagaaaacgaggctctgataccaattgtaggatcgtaaagggcctttcccaccccaaaagctagccattgaggtgaggagctccaccacttatatcttaggtcctttgcccttccacaaccaatgtgggactattcaacaccatttatcccccctctggttggcttagttcttgtgtttcgatcctacataagatgtctagccaatcacacattggatcagctctagtcttcagtaatttctagcttttgggtgggtctcactagctagtgctatgtgtggaatttaggagttatacctctgaccgtgctgatgttgataacttgttggatgatagttgttgcttcagttgtttagctgaccaatttccaatattttctaggatcaaatcctctctcgagaaaggagttgtgaagttctgtacaactccaacaaagtcttagtgtcatcgagatatccatgaattgaatcatcaaagctggattgtttgcaaaaatgagccatttcatctgcccaacagttccatatgaggtgatgaaacttttgaaatcaaagcaatgtagactaaaaggtaggatgatgttcaaattttagtatcctttatagctcccaaaagtacctgaggtgatatcatagccatgagtgcgcaggaggcgaaatgccattgcacacgttggtatgtccagcatcacatcctcctcattgtgtagccagcatctgcaaacagtaataaaattgaaagatcaaaggaattggtacaaaacactataaattctgtgtaatccttttgttttggaaaggtagatgaaaatttcttctgagttgctgtcacctgtatgttctgtccaatatgtctcttatctcacacacaaaaatccgagaaatccccgtcctttcaagagcatcgaccgtgcatagctgggagtatatattttgcggatacattgctgggactgcagagaaatcttatgtccgttagctgcatatggttgacatttttttttatctagttcacatatacacgaaaagtgatttttacagtacttgacaaggtaatgagaaatactatattttacgatatatataactggatgtttcttcatgctataacaccaaaaacaaaaaaaagttaggaaaattagaaccatgccattataattttgtaaaatttgagatatgacatcctgacccacatatcattgactcatatcggtcctacatgtcattgaaataccgatggcatatctcaaactttacaaaattataatggcatggttccaaattaccaccagaggggtagtacttaggggtagtactacactagaaaaaaaatgtaaataaggtatttgtagctccggtaccacttcaaacactgtaaaatttttgtatattaatccatatggattgctgctgctgctgtctcgtacctgggccgccaaacttatttgtaaatgaatccaaatagttgagcgcgctgtcattgaaactatagattgctgcagctgccgttgtggaaggtgagttgaacaacgatccattctttctttgatacgccattacttcatcccaatcttgtaggctccctaacccttccgatacgtatgccataaaggcttttcttgcagaaactgttcaagcgccatccctgatatattgtcaaaattataacagtgggaaattaagaacaaactttaatataaaactaggaaggtagcccgcgcatatgcgcgggcatgtgcgtaaaatttttttacgaatgtccatatgtggatggttttctatcaaaaatattctttcactttatcataaactaaaattaaactaattcgacgtgctttgaacgctggttacttgaaacatataaattgaactaaaattactttaaaccgtgttgtttctaatacatgagaaaatttgtgtcgaaacaatagatgtgttccctatgaatgtccaattatttttgttagattctgtttgaaattttaaatatattcattttattagttttgctaaaatgtttgaatatttctatttagaatggattataaacccaacaaaaacaaattttaaattagataaattttattttattttcatttctttttatctccattttttttggataaatccactttatgaagcatcttttttgaaatgctttgatctctgtaagtcagaatgaaaatatatgtgggttgatcctacaacctgccatggggtaaaggtatcaattctaaattatctcgctccaattaagtaagaaaaaataaaatagatgtcgtagtattttcttagcaaattaccactaaactggaatatcatgtaataattgcatatttctagattgttctattctatatgtcacaaattcacgatgtactgtaggaagttttacccaaaaaaatagatatggtcttttaatttctatctgtaattggcttatatatagctgaggccacatcatggttgtttcattcttaagattccttggtgcaaccaacgtgcccggtacaatcggtttgttgttcaactggccacgtgacttcatagaccatatatataatttagaagctatgatcattttatgattatttatttatctcctgaagtgatcatttattgataaaagcatcaatatcaaaatgtatgggtaaatagcttctatatataagctgagaaaaagttgatagaaagtcgttagatgtctatcaggatataagtaatgggtcaaccagttttataaaaaattgagctgtgatattttgatttttagtgagcaattttagtattttcttttctttagggtaaaatttgctataggatattaaaaaacatgtaattggccgagagacaccgtaagaacgcgtatctgttgtggcacaccgaaaaaattggtaattagctactggtggctcacgatattattttataatatccaaaggaaatgcagagagagacaataacaaaagtataacttttcccttacctactaagtctggcttgcaaacacctttgacgcagcaacagcacccgccggcggtgagatggctctctagagaggggagagggggtcaaggagggcccgtgcacctgggcttgtggctccatgtcatttccgcacttgttgccgctacagtgtgagggctatgctggcgctaatgctccgccacacaccacgcttggggtgagcacaacgtggaccacctcttaattcatgtcgagtagggtgtcgcagagcgcaggctattgttgtcgatctcggagtcttggcacgccacgctgccataccctccaccgcccatgtcgtgactaccacggcgttagagcgatatgcgagccacacatggcaagaaggggcaaaatcatactttcgtgattgtttctctccccttttcctttggatataacaaaataataccacgggtatctagtagctaattaccagttttttgcggtgtcccatagcagatatatgttcttgcagtgtctcttagctaattatactttttttgggatgtcctgttgtaaattttacctttattgagaagaggcttcaatatggatgtgggttcataatgtaattttttgttagcagttaatatagtcaatatgggcattaagttattgttttcacttagaaaaataatagctggctagacctaataggtggagatttgtttgtggtcttttctttgctcatgaaaataattttaattttaattatcatagagatataaaagctgtgaaaagtaatgctgcacactgcaagtgaacggggatggaggaagggttgagatgtttcttttttttagaaaaatattgattgatttgatgatctaaaataatgtgttgatgtttaagtaaaaaaccgatggttggatgttatttttttctcagatttattaggtttttttttctaatttaagtgagataagtatcagcttagcgaaatacccatagggaaggagaggaaggagaggaagggaagatggtttgggatgttttttattaaaaaaattagatacaataatgatgtaaaataatgtgtgtatcgatttaagtggaaaacaatggatggatgtttctctaatttaacattgtcataccacgatttagaaatatctataagatttttaatggactttaacacctatttttgagattactttcgataaagttaatttttgttttaagtgtgacagggataaaaaacagaaaggaacagggagcctactaattgatcactctagcgtggtggactgtatgggggacgtgggtggttttggttttccaccgatttaaataaaaatcaacggagatttatctattttattagggtgccacgtggcgacttgagagtatttatagggtgccatgtcacggtttgggactgtttgtaggatatttaatgaattttgaagtataagatagatagatagtactacgtacatatggtttttctctttatcttatatggtagaaaattatattttatatttttctcccgattatgctatgtactttttttactttatcagacatgtattttttcttccgacgaacggaacataagctttattgtttttttccgaatcatcgtactgtacttatgattttttgttttgccgacggtacgtattttcccttttatacagggaatgtattatatacacacctaatgattcgtaataggtccaccaatttaaaagaaaatcatctatagatatagatataatctaatggtctaaaaatgatgggtccaccaattaaatgaaaattaacggtgagattagacagtgccacgtggcggcatatgagtgtttatagagtaccacgtggtggtttgagggtgtttttaggaagtttaatggactttgagtatataatagatagatgcccgacatattagaattcctcagcaataggaaaatataaattataaaatatatcatgagtagtttgatgcatatgttatattaatgttgtttttaatgctgtagtaatttgttattaaacctatttggcaaagaaaaaaatgtatatgataattgattaaggaataattgtctaggaataccaatcaaatagtaagagggcttgtagaagcgtcgtgactatatttgaattttattgttatagtatagaaaatcctaatttaaaaaggccatctaatttgttttcgatggttttagcactgtacttatacttacttttagggttttatagttcttttttatcgtgcttacagcatacatgtgcatgttccttttttattcacgtgaacggtaatatctcaatgttttttttcttgatagctttttttcatcgtataagtatggtctaaaataatgggtccaccaatttaagtgaaaatcgacggtgggattgtagaatgacacatggcggtctaggagtatttctaggagtgccacatggcagcgtaggagcgtttgtaggaagtttcatggacttttagtatataatagatagatagatagatagatagatagatagatagatagatagatagatagatagaagatagatagataatagatagatagatagatagatagatagaagatagatagatagatagatagatgtggatagtatgcagatatatgccaatctaccatgttcagtagtgtgcagagaaaaaacctggattttccagaattttgctgcctaggtacgttctacaataagttataattaagtgctcggtcgttcttaactgctattaatggaggaaaagctaattgcattgtgctccatagagtaatgaaatttattcgcaatcccttcataagggacaccatagatatgctagctgagtccagatcattttttttccccttctaatctgatctgttttcaaataatagaactcccaaaaaacacggatacaattcccagttagttccgacactttcatgcatgatatttgcttgatttcaatccatcctgacatgttattgtcttgccgctagtaattttacacttttaaatacaaaagctaattaaagaagtataagtacaatataaatgttcagaactgaattttattaattagtttttcactaattggctaacctttccaattcgatcttccggaggtgaaaaatctcatcaatatatgtttgcataacaggtaatcgcaaacccatcccagcggcaaggctaatcagaccagaaaaagtaatgttgaaaccagcgggagcaatagttttgacatccatcgcaacagagaaatttcttccgataaaatttagacctgtcaacaagcataattcacagcaataaggtctcaagagcatcgaacattaaggtacggagagcggcagtttactgatcctttttttaaaaaaaaaattagagaagggtattttttacccggccattgaaataggaaacttagccccacaaacaacccaatctctgaaattttctcatatagagatttgaactcagaacattggagtactactctggtcactgcaaccactagtttactgatctttttttttaaatgatttaccgagctcttttgccatcaataaatatttgaagcttgaaacaaaggttaaaatacttagtaggaaacacaaaattggtgtatatagatctctctcaaaaagtaattttataatatcttcaacttacaatattttataaatttattctaatacaaaattataatcaaagtcacaccttaaattctcttaaaatgtcagatatcatatactgtttttactagaggcagcactttttacctctcttaatgtgatatggacctacattccacctcttgagcgcaacaacacaagccaatgtacacaaaaggatatctttgtcgactgatgaacttgatgggtttataccccatgatccattgtcctgttggttttgcagtatccactcaatacaccgcggataacatggagcctgaggagaaccacgctctgacaccatactcacccatgctgtgtcatacaaggacagtgataattcaactccctgcagcttcttccttgtgttagctttgagttccttgttgtgctgcaatattacaacagaatattaaactcaaccaaggaatcagataataagagattagatatactagggtgtatctctaaattaaatacatgatactagtctctccattttaaaatatatgacgctgttgacttttcacataacgtttgaccattcgtcttattaaaaaaatatataaatatcatttgatttatttttttacttgttttatcatcaaataaaatataacctcaacttatactttttcgtatttatattaaatatttaaataagacgaatattttaaacgatatacaaaatgtcaacgacgttatatattttaaaaatgagatagtactttagtttacaaggatctaagtgcaagatattgttggtaggctatttaaaccttgaccacctcaaagaactttcagatcaatatttttcaatggacttcaataatgtcatgtgttcgtttgatcaagtatttacagatagaaattagtggtagtcaaactagaatgcacgaagcgcgtttagaagtggggcgagtagagataatcaaagccaccaaatgggtaccatgacttgcagacttcccacatttccctcaaattctatcctcttctcaacacctgttgctgctgggaaaacaaaatgaaaagaagtgaaatatgtcgccaaaaccaatccaatcaccactagaatatgaaacttcaatggctgaaaattacagataccagtacctgtgcactcacacaagttttttttatatacctttgaccatttatcttattaaaaaaattgtgtaaatatgcaaaaacataag

SEQ ID NO: 2412 - DNA, 536 bp, Oryza sativa
  unsure (1)..(536): unsure at all n locations
gaacgtcgagtgtccagcttggcaagaagcccccacgaagtagctttggcgagcaagccttggagcgcatccatgacaaggacaaagagtagcggcgacaacgggttaccctgccgcagtcctcgcgccggcttgaagctgtcactttcatggccattgagcaagattctggtttcagaagttaagagcagggcagctatccacgatcgccacctggacccaaagcctctgtttcggagcaagttcagcaagaaacaccaagagactgtgtcgaacgctttagtgatgtcaagtttcaggaggatcataggcttctttcttcggtggaattgcagcgctaaacctctgacaaaaatgaagttttncgtggtattcgnaatncngngncncnannccgnggnnataaggcagtctggttttcagcaactagatcgcccattctcggcgccaaccgggacgccaaaatcttcgttgcaagcttggaaaagctgtgtatcaggcttatgggcctgtaatctttgatcaacgtgggcgca

SEQ ID NO: 2413 - DNA, 638 bp, Oryza sativa
aatgtttcacttcttttgttaaatctattccgaagtattttattatttttgatgctattgtaaatagtatggttttctaaatttcttttttggatagttccttgttagtgtgtagaaaaacaactgatttttgcatgttgattttgtatcctgcaactttacggaattcatttgttagttttaacagtctttttagagtctttagaattttctgtatataagatatatgtcatgtgaaaacagagacagtttcataacttcctttccaatttgaatgcattttctttttcttgtctaattgctccggctgggacctccagcactaagatgaatagcagtggtgagagtgagcatccctgtcttgtttctggtcttagaggaaagagccttcagcttttcatcattgggtatgatgtaagctgtggtcttgtcatatataacctttattatattgagaagtattcctgctatacctaatttgttgaaagtttttataagaatgttgacttgtgtcaaatgctttttctgcatctgtttagatgatcatatgattttttttttctccagcactgaattacatttatttaaatttttgtcaactccagatgagaaaaagtaattttccttgtacttgtaat

SEQ ID NO: 2414 - DNA, 679 bp, Oryza sativa
tcctgcagccccgttgttacgcacctcgtcgaatcccgccaacaggctgcccgacgagggccagataaagttgacgtcatccgttgcagcagcagcggcgggcgcggtggccaccgccggcgcgctgggtgccgctgccggcgccaccgtggccggtgtagacgccgccgacgccgacggcttgggtgcgctcgctgccgatgccgcagccaagggcgaagacgtgacggggcgggtgaccacaccggtgtcagatgccaccgcagtcgccgcagccgcagcagggggcaccacacgcagcacctggcccacctcgatcaggttggcgttttccaggttgttccagcgcgcgatatctttccaactttgcccgttttccaggccaatgcgaatcagcgtgtcgcctggcttcacggtgtagtagccaggcttgcccgcgttctcagcaccaggcaagggcttgacctcaggcacggccccggcgggcgccgtcgtgccgctgctcgcggcaaaggtgccgcgatcttccacgggagccctgttgatcggggtgctgcaccccgccagcaaaccgccagccagcacggcaactccccaaaccacaagactacgcgataccaacataagcaaatccttcaggcgatccccgattttagggggacgaaatgcacggcttcca

SEQ ID NO: 2415 - DNA, 723 bp, Oryza sativa
aaacaggaagaaacaattcgatgtacataaaacgggaaagtattaaacaaggaagtaaatgcgatgaattacctatgggagcactgcaacacaagacaggagaggaatcacagtatagctaactaagggttgctaattttaaaacagctgtacgactccaaaaatgtgaacaggacaatgatatctgtacagaacagctatagtataggcaaaaacatatattattactatctaacagcagaaaatatctcgcggtacacgatgttccaagtgcgagtagtgcaattgccattgtcatcttcaattaacacctttaagcctgcgcgagaagtgactcgggaaagagcaacgtataactggccatgacaaaaaacagggtttttcaagtaaataccaactgaacgtaacctttgtccttgacttttatttatagtcatagcgtagcagacacggacagggaactgccgacgttctaatgtgaagggccattttttgctggtcgcagataaggttattcttgggatataaacagtttcccccgcattagaaccagttataatacgcgcttcgatcaccctatcacccaagtttgtaacaatatccttgtcccattgcaaagcccagcggtctgatctaaatttctcaaaagcattatgggaacacctatttttaggcacaattgatgttcaggataattgttaactttgatggggctgcaggaat

SEQ ID NO: 2416 - DNA, 677 bp, Oryza sativa
acgaacttgactatttgcttcttttacttcttaatttaaaaaaaaagattatttgcttcttttcttaccaggaacagaaacaattgattagtacaaaatggtacttcctccgtttcacaatataagactttctagcattgttcacattcatatagatgttaatgaatctaaacacatataaatatttagaatcatttatatctttatgaatgtaaacaatgctaaaaaaaattttacattgtgaaacggaaggttgtacaaaacaaaatacatcttaaaaaaaatcacttggggttacatctgagaaaaaaaaatcttaaggattaacaaaccagctatgctctcattggatgtactagtatcatgtatgatatggaagcattttatgtaaactaattgagcacttgaggtgttgaagtggcgttaattagtccaataagcagacgatttgaccctaatagagtcattacaaggagcagcccggtcggtcagtgtgtgtcactgtctctcaccctcccaacgcttagacatttcaacgttctcctccacagcaacagcagcagcagcagcatctcctcttcttcaccgcatctgccagcctagcgagcctaatcaggtcttcgtcttcttcttcctcatccccgtgccaataccgatttcgcgagctccgatggatt

SEQ ID NO: 2417 - DNA, 660 bp, Oryza sativa
caatagtactccgccgccgccgacgtcgaagtggctctgacaagtgtacatatatatcaatgtgtggctggcaggtggggccaagggcacagaaggacagggagaggttcccgccgaacaacatactgttcacgctgacgggggcagggttactatggatggggtgggcagggttcaacggcggtggtccgtacgccgccaactccgtcgcctccatggccgtcctcaacaccaacatctgcaccgccatgagcctcatcgtctggacatgcctcgacgtcatcttcttcaagaagccctccgtcgtcggcgccgtccagggcatgatcaccggcctcgtctgcatcacccccgctgcaggtacgtcattcatcacactacacagaaaacgaaaccttattacttaagtgttagctaaaataacttaaaagtaaattattgttattttttttaaaaaaacaatctttctatacaaaacttttacgaaaatgtaccatttagtagtttgggaagacacgtgtatgcaaaacaaaggagttgaaattggaaaaactgagtacctaacatagccttatattaatcaaattgttgtctagtactctaattaactttgggatcgatgaactataacgtgatggcgcgcgtgaaaagctcggatcg

SEQ ID NO: 2418 - DNA, 545 bp, Oryza sativa
ccttatatattagagtttttcacaatttaatttactatctttcatatgctacttatatatgactatgggaatttttaaaaggtttaaatcatgcatgtggcatttacatatgttaattagagtttttagcatttaatttaatataattcctacgctaagtatatatgatgattacaatttttattaattttaaatcatgcagtatgtacatacatatcttaattagagtttttaccaatataataatatcattcatatatatgctaagtatatatatatatattggaatttttattaattataagtcatatatttgcttattacgatttatccacttaatttattacagacaaaaataatttttcgaagtaattgtcattaatctttagtactttaaataatgttaatgcattaacttctattttataaacacatatgtaagcgaaaatcatatgcagtgctataatctttagtcccggttcttaaccctaaccgggtttaaaaagaatttcgaaatagcgggaaaagatatttactcccggttg

SEQ ID NO: 2419 - DNA, 699 bp, Oryza sativa
catgactagtggcatatatctttctctttttttacctcattaacatggtaatttttaggccttgagagcaaatatgttggctccatttaaccttcactaacttatataatactccctctgtcaaaaaaaatataaacaggcgccccctcgctgtcgctacttcctttggttggtcacccttaaccgttgctggatagcggaccgcctcccgagtcgtggtttgtcacacccggatcgatgtgttctttgtgatcaatgcgaagagacgattgatcatctcttggtcgaatgcccggaatcgcggcaactatggtgggttgcattcaaagctatcgggcattcggagtgcttaccgctcattaacactctttcttttcatggttgtgtgactgtcataagaagatggtcaaggaacatcgccggggtttcgacaccatcgcaacattggttgcatggacgatctggaaggaaagaaacaatcgagtcttcaaccagaagagcagaacttgggtggaggttgcaagggttatgacgggtgaagcggagctgtggcggctagcaagagctgcaatccctgttttggtagcccatgttagtggagaagggtcgcaaaaatttagttggagattaggcttttagttttttgttctcctcctgtaccctgtccccttcgttttgtctttttggcgggctgcagga

SEQ ID NO: 2420 - DNA, 603 bp, Oryza sativa
gcacacgtcttcgagctccatgggcatgtcgaggctccgaagcttcagcagcatccccttcgcacgggtatagcggccatccctgatgctaccgagaaacctatcgagttcttgtggttttgcagggcccagactaccgtagtacgcgagaatatggacgggttcctcggctcctattccatcactgattaagatcaacgacatcggcaagacggcaatgatcagacatgcaggactgtgtatgtgcaaggcggtagagactagagagtacgatgttttggttaccttggtgagtacatggcgcttatctcgacaccgggtatgatcctgatggagcactgcttcgcagattcgatggcctcggggacgccggccatggtgtcgtggtcagttagcgcgagtactttcacctgcgctgatcacaagggcattagcgttaggaaacgcgacgatttgcggtgacgacgagtgcaagcgtgaccgagatcgttcgtgttcgcgggcatttcggtgctgtgcttactgcttaccccattgcggtgcgcgcgctggacgagcgccgcgggtgagagcgagccgtcgctgcacgtcgagtgcgcgtgc

SEQ ID NO: 2421 - DNA, 598 bp, Oryza sativa
ggggaatgtgtgacttgccttgcttcttcacttggatcttctgaactcttatccttgcgaacgcgatcttccgaaacgacgggaactacacgctggcacgcaaaacgaggaaaaactctaataaaaaccaagaaaatagtacataaaaactaaacaaacatgtagagatcaattttagatgaattttgcaagttgaatggctcaattcggagttcgaatgaattagatatgaattttagaagttttgagccatttaaatgaatttctataattattcacgaattattgcgcaattattatttattttacaaaggaaatggacctcgctgacgtcatcaaaggggaggggcggcgccggcaagcgggccccaccggtcagcggcacaagggcgccggtccaccgtggaccgggaccaccgaggcggtccaccgccggtccacgggaaccgacggcccggatcggcccaaagccgatcggacggccacgtggcggcgcggctggggcacgggcacggcacagccggcctggtcgagcgatagcgcgcggcggcgtgcggccagacgaccgccggcgacagcggcgcgtcgcggcagcggg

SEQ ID NO: 2422 - DNA, 880 bp, Oryza sativa
atattcttacgtgggtgatactgtgatagcactttattccaataaaattctatggtttaaatatcggtctccataattttagctcatgttagttcagtttttacaaaacttctttttttttttgtttagtaataataataatattttccctaacaggtagttggggataaagaaggtgcagtttttggcggtttagttgaggctccattgcagccaaccagtgcaaagaaatatcaggttccacctacacattctgaatttctgataccctttttttctggtttaattaccttatgcagattatgatggaatcttaatattgcaggggagcaatagctgctttgttttcactaatttacacagcaatcctagtatatatcgaccgactggtaatatttcacctcctgttttcatgttctttgcataagaacatcaaaagctgcgaaataattttgttccatttgaccctaccttccagactactagatgtatttctctgtgtagcagtgacttatgattgtttttgtcccctgattcctgttcaatatatataacactagcatactcctacaaaaattctgggggatcaagttgctgaatatattactgttaacactagcaaagacttaactcaggagagcccctgagcattcatttctggtattgcaggtgctaataactatttcacagtgtgctccaccgactatttggcattaggaggtggaggtcatttcgcactttatctagatgccgacctgtaatctcccacctcttaagcatgtctttcacgccgtcaaatctgctggttttattgccttttgtcattgatagctctcatcttttcttctgggttaccctttttcaggttgagtggttcaag

SEQ ID NO: 2423 - DNA, 15094 bp, Oryza sativa
acaatgtcagcgccagtcccgttggcgctgacacggccaacgtcagcgccaatgtgtttggcgctgaggcgacggcctatttttggttgaagtttttggcaggggttagtttcgaaataagttttccaaaagggtcaatttgtcaaaaaaaaacaggtcgccctgcatggctacgtatatacgagatttctagttaggcttatatatacagccagtagcaccgttgcaaagttgcagtaatatgtggaggtttcgccttttgtagtctttacacgcatgtcaaatgtcaaattagtacctgttatcacgtttgacttttgtaggtatcgtccaacggcggagcctaatacaggagtatttcttatcttaattacctactaattaattagatgattctatacttaaacaaattgtttggggggacggcgagttcataaatagttatattttggaacatataagtagtatatataaattttatatattatgatagtactttgcaagacaaatatatatatatatatatatgtgtgtgtgtgtgtgtgtgtgtgtgtgtataaccatttttatgttttctttggttaaaactaaacattttagtatcaaaagtctgtgaattgtcttaagcttttaatatatctgatgcttttatcccatcaagtaattttaattcgttggattccctaaataactaatttatttggactaatggattaattattaatgaagatgcgaataaaattctctaattttaataatatatattgtaacggtagtttaatttgactgaacaatggaatcaagaggtcaaagcagatcacttattggtcaattcagctgatagaaggctttgacctacctaccataaaacctgcaaaacctttgttgctacccctgtattgtgcgcatttatagatggcctctgtcatccacaagaaaaatgtatcagctatagatttcggacgtctaaacattttaaatttttcaatcacctaaaattgtactatcaaaggctaaaactaaaatactaaataatgtgtaattgctgtttattttcattgtgatctttgctagtctatatggatttaatttaatgttgtatcagcttgaatacttttatatttaagtcttataatgtcgtttttgatttgtaaatttgttttatgcttaggttgaacaattagttgctcaaactttttatctcaaagtggtaggtgatagtactggttagctagatttttcaactgatgatataaaatgaataccggtttgatggtcaacaattcaaatcgtttgatcaaatcttgttatatatgccatatatttatgataacgagtatttaaatctccctataattttttttctgttttaaccgaagctacataatggggttagcgggaggcttctatgtacatatgcgacagataaaaatcacttactccattttttaatatagataatgttgttgatttttggatacacatttgattaggtatcttacttaaaaaaattgtataactgcataagatataaattatgtttaaaatactttaaacaataaaatagctaacaacaaaataaattataaatacctaatttattttagtaagacgaataattaaacgtgtgttcaaaaattaataacatcatctatttaaaaaaagaaacttcgacaattcttagtacatcgagatagatacataataatcgaaggtatcaaattctacgtaaaaaaatataagtttgccatattaaaaaaaatggaaatggtatatatacggtacagaactagagagcgaggatggagagaattcagtagtacccagcaagtacgtagtgatcctacgtggattcctcgtcggagtggggcccagtaaaaccaacgcacgcactcagttcgatctctttttactcgtgtcaacatcgtacgcttgcgcgccgttgcgcgcggacacacacacccacacccacacccacacctttggttgtgtcatgtgtaccgaaaaagatcatccgctgccgcatggctcaaggcggaggcggaggcggaggtggagtggaggccgcacaaaccacacaagttgtgcgcgcgacctgtgagccagcactccccgactcccggcccggccgtatgtgtgtgtatacaccagtgtatcgcgttctcctcgttcggtgaagtgttaggttccggccggaaattaattaaccaaacgaaacgaaacacgtacgcgccttcaatctcttagccggcccgggacgacgtacgtgcaccaacaaatcgataatgcatgggagatccacaactgtagaatgcctcttttcttccggttcgtaacccccaatagttatgtgctgcaaacccggaaaaggaatccaggatgacgatctttagtcccggtttaaatactcggggagtaaatatgcatctctactcgtcaagcccctccgcgccgatcgatgcctgccgcgcagtcctctgcgccgccgcccgccgcgcctccccgcgtctgccgctcgcttgcccactgccgcaatcgcgcgtgagaggataggatagagagaggaaagggagaggataagaaaagagaggaggaggataagggaagaggtggttcctagaggataagtccgatagattatatactatgcaccaatttttaagtctcctctaaccgggaataaaaagagtagggggcgtgcactttttcgactagaactaaacatcatagaatagctgtgcggtttttaactggagctaaagatgatatttttagtcccagttcttttaggaaccaggactattatgatttttaaccgatccagcaaagatcagttctccagtagtgatcaatcagcttaatcgataatgaggctgatctattacagtgtttctgttccatgcaaccgcaatcaacgagcgaacgaagcatatgcatgccaaagcaaaaggaggcaaggatctgcagattgcagatcgagccgacgtggaacgtgaggccatcagcagccgttgcgccgagcatccacggtgcccggccagaggcgggcacaggggtgcggacctgcgaatctgcgatgcgtctgcctccccgtaccactaccaatgcaagttgcccagaaatgccaaaacccaaaaagcaagcggatgatgcaggggacggggccaccggtagctgtgctgtctcggcggcggttcaattccccggggttacatccactgcaccaaagcggcaaaatgtgcgtctcgtggattcttgtagttgtacttaattagacgagtaatggggtccgtttggattcaagggactaaaaatttaaccatacagaatcttaccatttaaaaatatttaataaattttatgtactaatttgctagatgaatatacaaggtatattaatccatgattagtaaatgattactatagcaaatcatggatttccccgcaaaaaaatcatggattaattaggttcattagattcgtctcgtaaattagcctggagattatggaataagttttgtcagtaatctacgtttaatactctaaaatatcaagattccggagggctaatattagccctccggatccaaacagggccatggagatttcgagcccggccatctgagcatatatattgcccgtgtccatttctcctactgttgtgaactcgtaccacatactatgttttattagggcctctcattgtttcgcttgtgattattagttaaaatttgaatatttagatttaaaattgaagttgattttggatgttttcaccgaagtttattttttagcttttgcttttatatcactgagaacacgtatataaaagttttatttataaactatttttcgtttacaaattggcttatccccgaataataagtgtgtaatcgaaattaggtggtgtcgcacactcgcggcctcgcgcgcggtcgtgcactcgtacacttgtctctgttgatctcgctctttaattccgtgtattatcttcacgtgttgttttgatttctctcatgggacgctttcagtgcatagtactactccagtatatagctgtgtgcctgtgtttagtgataagtggtgggcgcgtgcagctagctagctaactgtggcatcagcatgcctgccatcatgtgcatgcgcaagcagatctacgagtagtttgattcgaaaatgcgccaaaaggcacgcaattaagaaactatgtgtggcttcttatttggagaacacgagttaattgaaaaggtagttaattctttaattgatccacggatttttagcccacgagttttatctttcgttcatctggaactgataactacacactaacacacatgaccccctttctctcagttttaagtgttgatcggtcggcgatcgatcgctgcatcggtggatgcaatcaggcacgcaaggccccattttagcaccaaatcgatctaaccccatgaaaaaaacgatggattttgttgtagcagggggccaacgcccttcctcctatccggtcaaaacaccaaagcgataattcctggaaagtttctaagtataaaacagaaaaacacacttaagtgggaaaacactctcgagcagtaaaacactccctggtggaaaacactctcgagggggaaaatactctcgagtgggaaaacactcttgagtgggaggacgtacctgagtttgtttctcaccatttgcatgtaacctatcttgtttggagatgaattctaaatacatgacaggtgaaccttggcggctgggaagctggtgaagaacgtgtgagcccctaagcatagaagacattcggctagagaactcgaaggaaaaacgtatttcgagctaagaatgagtcgaatagaagattctgtaggggccacttcccaaccactcttgccagctagagccaaaagactataatgaccctgagaatgtatcataatatccttagggttgctgacatggccagggcattataggaagttcactaagcccatgagggcagaaatgtaatgtcacatgtaagatcgtatgctataaaagccggtcaaatacttgtagcaagacaagacatttttaatataaaagtaatcctcaaaggttgtgtttgttgttttgagcttatttctaagaatagacaggaaaacacttcttttcggcctattcccgatcttgttcgtgaccaaaggtcacaacagatttgatcaaaagatagtgctagtgttgcatacacatgcaaagcttccacagctggagggaggaagttacaaaagcgctccttggtgacaatactctaatgactaataccggcttctgcgcgcgctttaccccctttcttttccgatcaatgttagaggtgatcgatccacaaattaaagctagcagccagcaggagatactgcctagctacctacttagcttatctgaaaccatatcctgaacagcgaaagcataagcaagagcatgcatcgatcgatcgatatatacgtatgcccaaattaaagcacggctagcctgccgccccggccggttggtcgatctatcggagaacaagttgttggcttgttcccctagctgacgcgctgcatgctgagtcaatgtagctacgtgatcaagttatcacggtcagcttcgtcgacacgaggaaccgataccgaccagaactgggagagaatgcatgggtgtactacagaattaatgatggattatattctccgagatcaccgtgctttctatccctccagttataggccagacaggcgcagattatttcgccagcatcgtgcatgcatgcatcctagctcggtttcgatccgcaccatgctagctctgctctgatccgttcgttttcccggcgatttgcgcatagaatccgggcatccgtgacatctggtggtgtggtggtggtgatggagacgcgaattggcaggagcgacgcgggttggttccccgcgcatcgccgcgaggtggggcgtccagcgtccagcgtccgcgctcgcttgatcggatcaacgagaggcatcggttcgtagctgcgctggttggctggacgtctcaaccgatcgacgcgcgtgtgccgggggtacaatgttgcgggcctttgcggcacgaacgatgcgcgcggtgtcgtggggctactaaattccacaggtccaccggccggcgacggctgtagctagtgcctcgcggccgcggtgcgtgtggctgtgcacgtcgcgtcgtgccgggagaggccggggcattttccgctgcggttgggacgggagaggccaggggcgtgccatcgagcactactggagaaaaatgatctttgctagattgttcaaaatccacaatagctggttcaactaaaaattcacccgaattcaactttactcccgattattttactcattactaaagatgcagtttctcctatagtgtaggatcggcaacgacccgagagagatcgagaggcaacacacgaggtgaaattagcaaattcgcctttttttaatcaaacattagcgggccaacaaatgggcctcatccggatttcgttggatcaatttgggccgaatcttgaggtaaccagactaccagtgggccggagttcagtagggcaggccgacaaacgtatgttttaatagttttgctatatatttgttgataattttttcccaaaactttgtcagctgtaaatatacagtacaataatagtgtaattatatcataacttgtataattatagtacagcttgtatgtaatttttcaaattcccacggtaacatgtcattttcgtgaaccggaggtcatgggacttgctagtgtgtgccccgtgaaaaacgtctaggggttttccggttagctccacaaggtgataggctgatgatctggatttaaagtctcatccattctaattatttaatattagattcttccttaatattcgtgtcatttagtgtgtgccatgtgatttttggctttgtttgaccgccggctttctagtttcttcgtacaatcaagcgagggtgccggccactgtgtcaaaaggggaagcatattttgcccattagctggcattagggcttatcagtcttaatccagaccgagtatttctaatctaacggtcatccagcggattggattgcacgcagcaaaggagctgatctcccacgggcgaccgcaagtatattttgagcaagatgtttaacaaattgaatctccagacacttgaattcaatcaacaaatccaaaggaatattccagtacaaacgaatcatcaccatttcatcaccccagttccactcaaagaatcgtactttcaaaaggaaattattaaagcacaaaccacaactcgcgcgtgaatcgtgacaggcatgcatgcatggcccccgtttgaatacttgttacgcccttacgtgcgtacgtctgcgtcttcacctttgcacaatggcgatgcccatccatccaacacgcacgtacgccgatcgaatcgaatcgccggcgatcgatcagtagccggccgccacggcgtgtgtccgctccaccgggacggggccgcggctcccgctgtggatcgcgaggacgtagaagagctgcgtcgccgtcaggacgatcgtgaacgcctccatggttccctgaatgccaaactcccaaggtttcaattcacagaccattctgaaagaattaatctgacgaaatggggggaagaattgatatggccgggagatcatcttaccagcttcgcgttgcgtctgtcgagactgatctcctggcacgccagcctgcaaaatccatcgaattaacaagggcatccaaatttgtgttattattactctctccgttttaagttataagacgttttaattttggtaaaagtcaaattactttaagtttaactaaatttgtagacaaatatagtaatatatataataccaaattagtttcattaaatcaataactgaatatattttcacaataaatctatcttaggttaaaaatattattatttttctctacaaacttaatcaaacttgaagcaatttaactttgaccgaaagatactaatattattctacatcgtcatcaaactctcaagtaaatcatgtaagtgtaaatatataccccatggcaaggacggtgagcgcccaggcaagcaggccggtggtcgccgccggctgcagggagtagtagttccagtggcggatgtggctgaacccgacgaggccggaggcgatgccgacgacgccggcgagcagcgagaacacgacgaagaaccccgttgcccagttgccgatcgggaagaacatcgggtggaaatgcgccggcagccgcaatcccgggcctgcaaattaaatcattcaccaatgaacgaaatgatcgaattccctatactgacgagaaacttttctttgatgaaagcgcaaaaggattgcacgccaatatattagaagaaaaaaattatattacacaagtacacaacgcaatcagacaaaccaacttatattaggggaagggagaaaaagcaaaatttaaaaagactaaagaaaactacaacgactaaacataactccaaacagcgggaagatagtgacggaaagatttaatttagcatcttgtatcgttacctaggatgaagccgcgatcgatggagatgttgacggcccagccgccgatgatggcgaggatgacgtacatgcagaggttgagtatcagcagcagcaaggctacgggcttcagggtttcggccatctctgcaacctcgctagtacctgctaattaattaacacgaactggggtaatctcgctgatgataattctagtaccgagatcaactgcaattcccctgatgctttcagaagctgggacttggcttcccaatttatatgcgtccacggcgcattgcaacgagatcggatttgttctttgcttgcctctctcccaggattaagaacaactcacagtgatagctaagctcaaaaagcgatggagtttgggacttgctggcgaaggaaaggagctaagccgagttcttgggtgtacttttggtccgtgttggtgttcgtcctcctgatgcggttaggtatgtgtacgggtacagacgacgcatattcgatcggccatgttcgcggtaaattcatccattggttgattctttccgttgtgttcgccgttcggggtatagtagacttgtagctgggaattaagcccagtttgtgttggacacgggccgggacgggtcgggccgagtgggccatcgatatacagtactgggccgtggggttgaaggacgggagacgagccactccccgccatgtcaacacgtataatcagggggcggaggcaggcgtagggcagctaaggctttgagccctaggcctacctccaaaatcatggctaaattatgttatatcacaatgtaaatttaagaaaagataaacaactcactaattaagttttactttagccctactctttagtaatttctagctccgccagtaaataatgtgggtacttgaaatgcttcttgtttgtgttgtgtgttactcctacttgaaccgaactacacatccagcatatttaattacctcgatgatatgatgagcgtatagtttgcggtgcaagattaagacgccggaatcactccactcatctcaatgcagcgaatcttatgcgttctttcatcgttctgtgttgttttcgtaagaagcaatcgtgcgtgcgtacatgggccgcctgcgccgcctgtatcaatcaattaatactaacagttagggcggatccagcatggcacggtggggtctcaacgctcactcaggattcctaatttgcgtgtacgcgccgcgagcgagcacttctagcccacacggcctgtatgcgcagtgccaccagcgctgatcaagattttttttttcatagcggcatgtctaacgtaactaactctttaagggtaatgatgataattaatgaaagattttttttcttttttgagactttattactaatagatagaaaatttttaagttacatttgaaaacttttgacttaagatttaaactttgaagtcaaattttaaaaactttcaacttaaatttgaaaactttcaactcgagatttgaaactttcgactcgagatttgaaaacatttgactcagatttgaaaactttcgactcagatttgaaaactttcgactcaggtttgaaactttcaactcgagatctgaaaactttcaactcaaaatttaaaaattttcaactcaaaattaaaaaattttcatataaaaatcgaaaactttcaactcaaaattcaaaaacttttaactcatagtagtatttgaaaacttttaagttgatattttgaaaactttcaaatcgtattttcaaaattttcaaatcaaaatttgaaaccttttaactcaaaatttcaaaatcaattgtttttattttttattgagaaattactgtagcattttcaattcgttaatcactttaatatagcatcatgcgcgttgttttctttcgagaaaagcgctaagcgctactaaaacgaaggtccgcgtgcgcgcgacttatcgtcctagcgggtacgcgcgagctagccacccctctcaaccctatgctattggtgtggggatcatgagagccccacatagcgtacacaaattgttttgtcatatatagatggaaaataggctataaaactttgctctttttttcaggtcctcatgctatttctttctgaatctatcacttagcagcttgatccgttagttaatcatcatgaaggtttacagttatactaaatacttattgcagccttaatgatgtgtcctccaggttaacagcttagacgtaatcggccgtacgttatgtacaggttaattacacgtactacgaaataggtcgtttcacacacagggtgatgagatagagtgatcttggagctagacccaatcgatcaacatcgatgcatgatatgatcgaaatagcctggattctcatgcgtgttgacgtgtcgtctctcttgtctcgtgcctaccttaatttgtaggagtactacatacttttgtacgtgcatgcagttaacagttaatcacacgtacacgtacgccgttctgattaattatcggtcgttgatcgcacgctacgcttgatgtacgcatgcatatatgctttactggcatgaacatacgcaatgaagtgtgaatcgcactggtcaaatttggcataaacatagatcaaattaagcatttcggcgtaaagatttcttaattcagttccaagcagctagattcctttttgaagcctgcagggcacgcatttgttaggagtacgtagtacgtacgtgcaagggtatcggagaaaattaaaaaaaggaaaagaatataatattattggaccggatgaattctgaagaaacacttgcccaaacttgacacactttgagtgcagaaggaaattaagagacgaaaactgcctttaagtgaagagaaatgtaagatcaaagagtacgtcaaagtcaactagtacaaattgtacactaattaacccatggccatgtctgactatcaggctatgtggttagcactttgactgcgtgttaattaactaacaactactgtaaagtaggagtaagtacattcaacaacttaattagctgcaaaaaagtcatttcttttcaaattttctatgacagaaatattctacgcaacatattgtgtttgctagtttggttatgtactcatatgcttagcccaatatggttaatcataattgacattagtagaatttacttagttgattaaacttttggtaattaaaaaaaatcaatcttctggttcttatatatgtgtcttaaataagagcaatctctggtagttttcaagaaaagagaaatggggtagtgaaaatgagataaagaaaaccccaaaattaatcctgaaatcaaactctgtaaattcaaaatcagctacagattacaatacgaatatatagtttaagatcaatttataatattaattcataaccattttttaatgatcaatttatacatattaattttttgtgcgaacttcttcatattaaaactgaaattaccatgcaggcatgcacatgtggttttgtaaatactcctgccagaaacctcatcaaaaaatggttttctgcagcatatgtttataagaatttttataactaataagttggtcttatatatacatatataaaaaaaccttaataagctagaaagcagagaaaagctagcagattaataagattttcagatacgtgcgaatgccttaattaaccatgagccagcccaccatactgtaatttaaattccaagtttctgaaaaatacaaaaaagttatgtaggtaaacataatcttcagtactattcttgctgaaaatcagccaaacttaatgccaagtaactttcagaaaagaggattatttttttagataatggaataatctgcctctacatcgtgagactgatatacacagccaacttcagaaaagaggatgtatctgtatttagtaaaaggatcaaagaccaatcaaccagattatcaatctaattttgtttggttcttacgctagactagctagatagatatgctactgtttagcaggtccaaaacccaagaacaaataagtagaaaattcagcaaagttgactgccgtgcgtgtccagacacgtaatgtaccaatgcaagaatgtatgccacatgcaaatgttttttttaaaaaaataaatagcacatgcaaatgagtaatatgattatgattaattaattaaattggtgtttagtaactagctagttgctttccacattccagttgtaactttataagcattctgttttttattaagagctcaaatgcatcgactaatgctgaaaataccaaagaaacaaaagctatatataacgacagctagaaggcaggtcaacctgaccagtttgtgatccacgtaatcacgaatgtactgcagtcgtacatattaagccaatgacatttcacaactccctatatatactaacctagttatactaaattagttgatttctatagagagaattttaattttaaaaataattaaaatttgtaaattttatatcaatcagtagttaaattacaagagtatgtgcttggtttctaaaagtaataccttgtcaaaaaaacacaaaagttatatagacatgattcatatttctgagcaacggttttacactatattggttttctattgatcaaggaaatatttctgagaaatcaattgtcaatcttgagaattaacggccatagccctctaaaaatcaacatacctagctatgtcccaaaatataaaatcaaaatcccttacattttttagcagagatatagtagcacacaaaagctagtaaaaaattaaaatcatcgtaactaattaaattaaggatgagttaatataatgattaattaagtacagatccattaattggagatgtttcttttattcacaatatatcaggaaaaaagaatccatataatatttctctgtaaggtcatgtaattaagctgtacacgtacccaaaaaaacatataataagttacaacacattatttcgatttattgataccataagaccacttatatatatgtagtccaacaataataagaaacacataaataatgagacgaacagacgcaccgtagatccttaaatttgtataacttttatcatttttttttcgtatatgtatacttgtttcaggagctcaacaattgcaattttgtaaaacaatttggagtatatatataataggtatgcactcacgtcgtatatacgtactgccattttttttatttctctgatggatgtgtaggaacgaatttgtattgcatttcctgcctcgatgatcgcatgcacgccacgtacatgaatgcacacgccgccgccgccgccgccgccgtcgtcgccggtcgccggccggttagccggcgtagtcgcacaggccgaagctgcacttcttgctggggcagcggacgaagcagtcgccgcagttcttgcggtcgctgaggaggtcgacgcagtggccgccgcagcaggtctcgccgtacttgcagacgtggttgcagctgccgcagtgcgcgaagctggagccggtgtcgacgcaggcgcccttgcagcacgtcgccccggggctccccggctccaggcacaccgacggcggcttcctcttgcagtcgtagtacgacagcggcggcgagttcttcgcgctcgccaggaacctgctctgcctccttctaatggccgccgtctcgagctcggccccggtcccggtcccggccgcggcgagggtgagcgcgagcgccatgagaagcaccgcggctgttctcatggcggcggtggtggtggcgagcgcggcggtggcggcaatgcgtggtgtacgaagtttttgcttggcgaacgcctgtgtggagggaggaaaatgggggaggaaaatggcgggggaggagtgcttatagctgtagaaaaggcgcgagaggcgaaagtcagaggtcatatgcagatgcagatggttgatttgcacggcaaaagcctggagtgcagggagggagtgtgcgccgcacggatggatagctgtggactccgcaagctacctagctgctgatcgatcaccaccacaagctgatcaactttaagcatgcttgcaatggcgatctggctggctagctagcttgtgtgcgtgtcttctgaattccaggtttctgaacatgtgattaggcaaagctgcatgcatgcctgccgatcgatcgcacacgccctgaagattaggtagattaatctggtcgtggcagttgactaatcaccggaattacagtaacaatgatggcacttttaattacgtgaagagctagcgatagctagtgtgtgctactcttcgattgatcaacaaaataatttagccgtcgtcgtttccctccaggggcactttgtcggcgctgcctgtttagacagcagctgaaggaactctgcatgctggcttaagggaaagaagaactgcagtctagcatgttaccgggatcgtctgcgatgcacggcatacattggtctaggagccaattaat

SEQ ID NO: 2424 - DNA, 548 bp, Oryza sativa
ttctttctttgtgaacggtaagcattcatgcatggaaacttttgtgaccatatagaatgcatttcccatactgaagaactttctggaacagcactaggggaaatgtctgctgttggtaaaaatatataatgcacatggcacttgcatagttcaaccattctagcttatacagtgaccgtttgcctgtcaaattgcaaaatgaatctacattcctactcttttgttgttattcaattactctttgtcgttaaggcacccattatttatgatgccattcttatttgtcctcgtagttgttatgctgaggagctgaatacccctctgaaggacaggcacccagctacaacaaaacaaaagcatgcatttgaaagagtacgtatatgaattcatctatttaaggtagctacaatctgcctgcatggaaatactaaccagattactaatctcctctgacagatagaggaagaacctcttccagaaacggatgatgtagatccaacaatggaaagcaagtactttgacagcagaatagatttcctgaagcattg

SEQ ID NO: 2425 - DNA, 705 bp, Oryza sativa
gtcattaattaattttaaattagtgataactaaatggtttctcttatattggccatcccttttcccatcagtaacaaaatgaactatctcatacattaatacatatcatattgttccaattgctattgctacagacctactatatccttcctaacaacaagttccccctgtcccctctagcattcttgctaaatgattggttgaactatggctgataagccgtagaaatataaaagaagaaaccaaaaatattttgaactttttgtctgtattattcatggtttaaaagccatgctggaaaatagactgcaatgaagaaaaacctcaaaatcacctataaaattatgtttcaaaattcaattttggctatggatgataaaccatcaagcagacaataagagttatttacaattgttgcattaaactacttgtgtcaggatgactcttcttctcgggcctccatcgtctggaaaaagcacacttatgcgagcactaaccggcaagcctgataaaaatctcaaggttttgatatttcttatttagtttaatgtagccacctctaacagtagagtcgtaccacatgactaatcactcgatggctacaggtgtctggcgagatcacatactgtggtcatacgtttaaagagttctatcctgagaggactagtgcttacgtcagtcagcatgatctgcacaatcctgaga

SEQ ID NO: 2426 - DNA, 12545 bp, Oryza sativa
cacgtccaagtcctacaagaaaaggtaccaagctccataaacatgtttatgttacacataaggagcaatagtttgttctatatgttctaactgaatttgccaaacagggctaggccatctcccggtataggagctgctaagaagttgttcaaggataatggtgatggtgttgctgatggcaggtaaactcagcctgtacaacctgtgctaaaagaagttcgtagaatgtatgactaagctattttgcacttacatttcagcggagacaacaatgcctgatgcattgtgggaatatgaagcttttgcttgatacagttgcaggagagtacaccgtcaggttcagtggccttacatgctgcctccagcttcgctacggcttcactgggcaatgtgttatgtacctatgcaaactgtgctattgtgttgctcattgtgtgtttatgagcataatacttttgtaacggaccacgaaaacatctacccatgcgttctgtagttagctaggattctatgttatcatagatgcactgtgataaccatgaatgctggctgttcattgaacgttctatgctggacctcctaagattaattagactgttctaatgttataatccagagcaatcgaactcgatgttgattctatggttgcttggttttagaatccctccatacagctgtttactgaaacaacaatgcgttccatgctcacggcatggcgcgtacaacgtatcacattgtgtcgtggtactgatttgtaccacaaatacatctatttaaccttcaacagccagcgctccacgcaaaatgtgcagcccatgcctgcacactgactccctttttaaagagtgacatgccagcctacacagctagctactcctatgaagggacaacacgacctgctaaaaatgcatcccacactctacacttatttcatttcagctcatcctcttcttccaccacagctcagcactcctcgccgagtctcacagattgaatctgaagaactcctgctcgaggaagaacaactcttttcctaccatcgtttctacgggtaagggtgctcttctctacctctgttccagggtatctctctatgccttgctatgctatgcagtctatacgaaatgcagccttctgtttcgacgtgattgcattgcctgatgcttcggtaataatacatccggttctattttcctagccgcgcatgctgcctgcgcttggcgataggaacaagagctatttttagaaaataaaacatatagcaagaaaaaacctagcaaaacaattaatccggtctaatactattatggatgttctttattagggatgcagtttgattggagcgctgagctaggcgtggggcagccacaacgcccttcttcctatggaaccaatcgtccattactagcaacaaaattctctaggcgcaaggagatatcgcatatgctagctgacatcatatacacaagagctgttgttgttaaggtgtctggagctggaaatccgaccacaacaagaatatcagcgatgataagcgccgtctgcaggtgtcaaattgatgatttcgcattgctccctttccacccaaagatgttcattgccatcttcatggatgccgatctgcaggaagaactgtctgaaagagctttcaaaaaggtatcgttcaccttcaaggcaactcgcctcacatttgagcctttcaagatgaatcttggtagcactgtaaatccactgcgccagcgggttatacttgcgctagaaggcgtgccaccagaatcatggaacaaagaagctatatcagagctcatggacagttgttgttttgtagaggagttgtatggagagcaccatatccaagaactctcaatttttaagttagctgcctggacaacagattgtgaccttatacccaaggtgataagctggaacattgagactaaagaaggtcgtcgaggatcagcaaacattagttggatgcacaatgcagctctgtcagttgtgctggttcatatagagaagctgttcgactacactgacgaagacagcgggagtgatagcgatggagaagttcttagggaatatgagcagcaaaggccccgtgtccctgttgtcaaaacatttagctgggtgcccttgaagattgatctaaacaacggaccagttgaaggcggtacaccagccatagctccacgccgtcttcctcttgaagttcgcaggcgttgtcgcctaccttaattacataaaacactgccctctgttatgtatgctttaaagcctaacattttcacctgcctctccatgctcatggatcatgcgaacagctgcttagtgttttctctacgtgttctgtcagtttttgttttcctaacaattagcctgctgagcaaggcctaaacttccagttcagctaaaatatgattcgtatattcctcttagcaatttactccttttacatcactgaatatgagctgatagggcgccgcgaagcgcgccgcaagttctagttggataaaggacctgtgcagggtggagtgtgcaggaggggcagggcttgaagcttgcagagttgcaggggcgcagtgtccttcgagcgcttttctccatacacggacaaaacggagcccttcccatagaactactccgtaccttccatggtttggcttggccttggtgctgtgttgcactagagctttgttggctttgcaggacttctgcttttcttctcaccgcggcagagattgatcaccgccagatttttgttgggatggtgaagcaaaggatgtggactggaagttgaaaaaaaaaggggacaaatacctttttgagctctctttggagaaggaatttgtcttttctagtatatttttttctttttcgtacttcatgtggcatcatattttgagttttttttgtgtatgtgtgtggtgctactagtcgtagtgttgcacgtcttataatttgtttcacatttttttgtgtgttgatttgatggacgttttgagtttggtagcacggtcgccttgtgcaatctcaaattctcaatactagcaatcgtagcatcggaacgggtagtgggcaacttgcccagccttgttcacctgtcatctccatggcagcctttgacaagaaaaagatttgctcgaaacgcgaacctgtggaattcccttctcaggatgaaaaaagggtaaacacggctaaagtatcgggacgtacggcgaggagcacaccgtgcactcgattctgcaaattaaatggcagtggcaccacgacgcaccaccacgacatacccaacttaattacttaatcgcgactcttagtgatccagcagttgaaaatttggaatgctggcactcgcatgacataacgaattaattacacagtgaaccgggatatgaattaatctctcgaggagatttccacttgtatatatatttttgtctcagattcgatacaaaatggttgtaaaaaagtttcaaaaattaacaatatagagtataatgatgtctatatctgtttaccaaaatcaagttcaaaatcgatctaacacattgaggaaaagaacatattctaaagtgactgcctgactagtactaccattactattttggatttgtaggatttgcatttttttccttcttgatgtatgatttgagttcaagcttaatttttttattgccatttccatattctgctaatggtgtcaacattttaagattttatttaagaatttaatggtgtattcgaacaaaccttgagggactaagggtgtgtttagttcacgtcaaaattggaaatttgattgaaattggaacgatgtaatggaaaagttagaagtttgtgtgtgtaggaataatgtgatggaaaagttggaagtttgaagaaaaaattaggaactaaatcaggcctaaaccagtttccccattaaaccatgcaatgcatgaaataatagacaataattccacttagctaacaaatgagagagttttgcaaagagtgaaatacatgggtgttctctctaaacttatgcaggtgtatcatctatatccttaaactcccaacatgtatttttagaacactaaacttgtcgtatgtaatatataggtccaaacgggttttaacttgcatcccgaacacagtctactctgcttatctaggtgcctgaatgcctgaaaatttaatctgctctcccattcctagacgcgtacgaatccggacgacatcctggacggacgggcggggcaggcgacggtggcgacatggtccggcaagcacgcgcgcgctctatatatattgcccgcgcgcggcggcgtcggcaaccgcggactcgcgagcggcccgtggcacagagacgggcgcaggcgtaggccacctcgcaggccgcgcggcacgcgcgcgtgcagccggcccgggaggtgtcattgccacaccgacgtacgcacgcaacgcaccgtgggcttgatttgagacgtttttcgccatgaacgccgtgcgggctagctgcccgcgcgatcgccgtttcgcgcgcggccgcgtagcggttgtacgcccgcgcacacgtgattcgccgtgcgcggtaaagacgtaactcccccggttggacgatgctccacctaatgcacagtgcgtcagttcatgtgacgtagccgatcgatcaagctggagggcgacgctgctacgcctacgcactgtgtgctgcatactactccgtatgtatgtggagtactcgcctttggagtcgactagagagcgtttctacaggtttggccgtgacgccgtgtgggtccaccgcattggcgagatgctgtttctacagcatgcatcccgtttctttcatggttgggccgttggactaacccaaaccattaaattatgtcttcttaaacttaaataatcgaatttattctttctgcatacatgttcatctctcttgggctaactgtgttccaacttcttatatcttccatatataaaaagaatcagtcctagttttgaaatttttgaaattagatatatgcatatccaaattaatactcccgtcattagatgagatataatagctaggagttactcccgtcattagatgagatatatcagtacaatgcatctagacagagtccgtgtatcagaatatgttccatccaattcggttgctatattttgggatagagagaatattttttttactgtaggtgttaatgagccctattatatatttgttatcggtcacatctgaatgaaaaatgaagtactagtagagtactacatttatttgaaaataagttaatctattacagaatatgacatattataatattataaatctggacaagtacatgaatctgtccaaattcattatattaggatatgttatatccgatactagatcaattcattctaagactaaggagtactctttccatcctaaaaaaaacttaacccagtatgaaatgagacataatttagcacaacgaatttggacaggaatctaactagattaaccaggaatctaaccaagattatatgccactaattatatttttttttggggaatgagggagtggcatatgccaccttccagtcaaacaaaccaagattcggacatgcaacagattcagtgtcgcttattgttcggacatgcagcatatactccagtagtactccttttttattataagtactccgtataaaaataagaaatgtaaactgggaacagattcattgtccaactatacgaaggcaaactagtagtactaatttattaggaaaataatgagcatttcaaatgtacccaagaaaatgtcaagaaaaacacacataaaatttgaccaaacaactcagtcatgtaatctgaccggtatgtgctgtgcatttgttttaaccaagaaatagcatggtggcccgcttagattgcgcggctagcatcattatattttctctcatataatagcatatatgttttttcaatgtattattcaaatatattaaaataacaacataattttaaattttatactaactttacaaaactactaatgtgtaatattcatattgtattttatatacgtgttggttattaattatttttaatattaaattttagtttttttaaattatattcctatatggactctagactcgtctttcaatatttcttttttttaattccgaattttcattatctgtaaattgtatttctatatagagtctagactcttcttccagtattatttatttttaactctgaaattttattatttctaattgtatttctatgtgaactctaaactcatctttcaatattcattgatttttaattttgatttcacctacttctaaattgtatttttatattaactttagactcttcttcccatgtttctttttaatttcgaattttagttatttataaattgtatttttatacgaactctaaactctacttttaattttattatgtttattccgaattttagttaattttaaatttctatatgaactctatactctacttctaatattccttatttttaattccgaatttctattatttcctaattgtatttctatatggactctatactctacttctaatattctctatttttaattccgaatttctattatttcctaattgtatttctatctggactctgtactctacttttaatatttcttatttttaatttcgaatttcaattatttcctaattgtatttctatatggactctatattctacttctaatatttcttatttttaattccgagaatttcagttctttcctaattgtatttctatatggactctatattctacttctaatattccttatttttaatttcgaatttcagctctttctaaattgtatttctttatatggactccagtatcctcttctaatattccttattttttaattccgaatttcaactatttctaaattgtatttatatatgcactctagtctcctcttctaatattccttattttttaattccgaatttcaactatttttaaattgtatatctatatggactctgctttttctttttctccgattaatgtgagaatttctaggccatgagagcgaacgtggaggcttctttttctattcctttaataatataatagatagatagccaataacttttttttccttttgagaggaacattacaccacttctttttttttgtgaggaacagtacaccagaattttttcccatggaagtgcacttgaacagagcaaagatcaatgaacatcaaacttgaaattcagtatcaatatagactagagaaaaaaaagatgcgagtatgatcatcaaggatgctggtgcaactactgatcaataaaacagccatgatgagcatgcatatgagcagtaacacattgcaagacagtgaacgttaaaaattcagaaatgaagaacaatggatgaagtaatccggtcaacctattctgaatgcagttacagtgtttagtgttagcacatcagagcgcatctctcccgccattgccaacaggaggcatactatctaggtgaattctttggcaggtaattcgcttgctgaagacatacgtgttccatcaaatttgccgactcagttgctcaagatagagtagtaaaccccccacaaaaaatcaggcacgattatgcaacaaactcaccagaagctagcacctagcaccggaaggccggaatgttcttccaaagacgcacgaatcgggacgagtggtaagccatcggcgggtgcagcatctcgaagaactgccactccaggaccctgcactggcccagatgcacgccgaacagccgcgagtgcaggaagaagtaggccacatcgccggggtgctccgggtggatgagcgccaccgtggggatctccggcggcagcatggtcgccttgtaaccctcgtcggcccagatcgccttgaagctcgcctcgcagtcgaagctccacgtcccggcatcctcgtcgagcagcgtccacatgctgacgatcgggccgacgccgtcgcgctcgtcgatctccacgtaccgcagctcaccgaagttcaaccccacgcaccggctcttctcgaggtcccggccgcccgtgcccggtggcagctcgcggccgaccggagcgggacgaagcgcagctcacggtgggcgacgctgagatccaaggcgaggaagccgtacgagagatccacccaccagatctccttgggccacaccaccacgccattgccgccccatggacggtcgcgcggcgggtagttgagctccaggttgctccaggctccagaggcagaggagtacaggagcagcgtggcgtggtcggcgccgacgaccgtggggtggagatcggcgacgaggtaggcgtcgcgcgagatgctggcgaggcaggcgttgccggggtggaggatggggaggccggggtcggggaggcgggtggacttgtgcgtgcgcgtgtcgcagatgaagtacgccttggggagcaagccatggcggtgatcgccgtcgccgagcggccgacgatggtagaagccgtccaggacgggcggctacggttcgggcccctgcgtggcgcagaggaggaggcggccatggcagtcgccgccggcgacgtaggggtggtcgtcgatggtcttgcggcgcggggcgatgctccggtgcacgacgaggcgggtggcgcccgggggtaagcggaacttgaacccgttgtcgaatcccggcttgaagtagccgtcctggacgacgtgtggcacgcaagcgaggaccatccatagctcgctcccgtcctccgtcacccactgccccttccaccgcttccacgccgccacgtcatcatccattgcaagcgtgggtttgggtcgttggagaggcgtgtgcgcggagcgtggagaaggggcgaaaagaattttccggcagtttggtggtcacgttttgtgctgcggctgtccccgtcactcgtgtacttatatagtggcgactcagcgtgcgtggcgtggtggtttgcagcttgtgagatggcgtccgtggacgacatgagacacggccgtacacgatctgtttcgtttcgaactgaaagtacagagaacgcagttggttgcagctttgtgagatggcgtcgtgcactcgtttggaaccccgcgcgcaccaatgcacgagtacgagggacagcgccgctgaggcgcacgcgtgacaacgtgagtagtacgtacctacgccacggcgaaaaatgcgcgcacgggcacggatagatcggctgatcaagttcttctccttgcaccgctgcaactgcgtgatggttcaaagacggaccaacgcgccgcgccgagcccatcgcagcatgtgacgctgaaatgatcagcgcgtctcccgtactggagcggggatgtttgtgacatcaacacgctgcaccagatgtaacgtttccgacacaaggatgtaagtggatagttccgctacctgcataaaaacccgtttgttagtctattttttatatggtaatataatttttttttaaaaaatgaactagaagtgaaataaatgggaaaaaaaaggtccggttgcccgctccgcttgcacccctctggacatagcaacaattaattgggcataattctcttgagcaagtggcaatctatcacccagacttgtcgataatggatctgcagactgcagttgcacgatactacgatgataatccacgagagagagagagagagagagagagagagagagagatctcgcaacggggattcggacaacatcgttgcagctttccaccagctttccaagagattagatgcaaacaatcgaagaaccaacaaatttaagacgattgacaatctacatttaggaaaaacaaatggtgctatgaaatatcccaacataggtccacgaaatacagaatgcataaatgttccacttaacgatactcatggtcattagatcatttgttcaacgatcagcaaatcatcaggacaaagtcatgaccggccggtgagctagacttagctgaattcctcgtactcaccggaggagcacctttttttccccccttttaatcgtcataaccttcaaaacatgcacaaatgatggaaatgttacaacaaggtaaatttacttccatgaaactaattatcaatttttaggggaaaaaactttcatgcatgtgtagtttaatcgagagttatttacactaattactaaggtagtttacacgttgtttgttatctaaaaaactttcacacgtccttatctaaaataaaatggttcacatgcatctgtagttacctcctcaaatacctagaaactttcttgattgaagaggtaccgagaggtgtggtacctcgtcaaagtatctttaaaaattaattttcttgactgaagctagcactataaactatattttagaaaataaacactgcaaactattgcctcacaaattcccttaagttagataatgcatatgtacatgaggcttaatatatgagagtagcgtgacatacttaagtcttcaaaaaaaaaagcgtgatatacttgaatatgttcacctttgtctaattaagacgcgcggatccctcgttcgctgggcgcgtaagtaccttttttctgattgttagaagcttcaagacaagcaaacagatggaaatgttaattcaacatttccattactcttatttatatttacttaatcaccttaaagagttcacaagcagttagcaggattttattgctactaggtaagaaaatgcatcttgtcatataacaagcatgtgcagagttgaaaaatgattccaatgttcaagtatcttgaaaaaaaaaatcttcattagattgtttgtggatgaactccttaaacctacacaatacatacgtacgtacgtgaagcttgattatataagagtatcatgtcaaacttggaagtagttgtgacattatccctacattcaggtttaaactgcctttgtactcggtccaaacaaaatgcataagcagattactttgtgcttggctgactaaacacgaattaaaactgacaaaaaaggaaatttgtaccacgatatgataattaatatgacgatagagaatcttgcagctactgatcattaaaacaaagacatgaccagcatatatatgaacactaacacagggcaagactgggttggaaaattgaatctagcattcaccgaagtactatatcattatatgtcgcaatgagtgcttaatccgcaagaaagaacttgcaaaactgtgaactgcaaagtgccatatagtaaattcagtgaaacttatcgctccaaaaatttaagaacactagacagagtaataccatcaaccgcgtgcatgaacatgaagttgtaaagctagctacttatatcacagagtgaatgttgactaggcctagctaagtgaatccttaattaggtgttccatttgcatgttttttttttgagcaaatttgcttgcttaattaagagccaagacaggcatgttccatcaaatttggcgcgattcatgactgacaccaaagtactagcagctcacaggggtagttaacacaaatatcaggcaagattatacagtcacgtaccagaatttgagactgggagacgccaggcacgcacgaatcgggacgagtggtaacgcatcggcggattcagcatcgcgaagaactcgcactccaggacactgcacgcgcgcaggtcgacgccgaacacccgcgagtgcaggaagaagtaggccacctcgccggggtgctccgggtggatgagcgccaccgtggggacctccggcggcagcttggtcgccctgtagccctcgtcgttccagatcgccttgaagctcgcctcgcagtcgaagctccaagtcccggcaagctgatcgagcgtccacatgctgaccgccgggtcgccgtcgcgcttgtggatctgcacgtaacgcagatcgtcgcgcctcagccccacgcagcggcacttgtcgaggtccgccgtgcccggtggaagctcgcagccatcggggagcgggatgaagcgcagatcgtgatggatgccggggacgacgcggcggagttggtcgaaggcgaggtccgcgaggaggccgtaggagagatccacccaccagatcatcatctggtgcacgacgacgccgttgccgccccagggacgatcgcgcggagggtagttgaccacacggtccttccagactccagaagccgagttgtacatgaacaggatagcctgttggtccccgggcgtagggtggagatcggtgacgatgaacccgccgctcgcagtgccgacgaggcaaacgttcccggggtggaggatggggaggcggcggtcggggaggcgggtgcacctccgggtgcgcgtgtcgcagatgaagtacgccatggggaagccgtggtgcacgccgagcggcccacggtagaaggcgtcgaggacgggaggctccggttcgggcccctggctggcgcataggaggaggcggccatggtgatcggtgctggcgacgaagtaggggtggtcgtcgatggtcttgcggcgcggc

SEQ ID NO: 2427 - DNA, 12533 bp, Oryza sativa
ctttaggcccgtttgagatatggaatgttatctcaatcaagcctaaagttgtggcccgtcactgatatgtgtcatccgtgacgggcttaagttttatacccatctaacatgtctgtgcgaccatatcttaatcgggcacttttcggcccgattgagatgacttccttgtgacggcccgctatttctaagcatattagagcccgtcacagatagaaggatctgtactagtgtgtggaaaatgctagaatgatttacattgtgaaacggagaaagtaatactaaaccgagagaatatatatcaatctacataccgaaatatacatgctgttcaaggagggcgcagcgtcaagtaaaaaaagagtccagttcaggtcgcatccgttaaagatgttgcggagatgcacgtctctcaggcagggttcactttctcgccggtaaccgcgcggtaaccgcggttaccgggcttaccgtgggggtcggtaacgaaaaccggcggtagggtttgggcaaattttgctcaaattcaaaaatttaaaaaataatcgaaaaaaatcaaaaaaaaatcatggatgtaaagcttgttttgtatgttgttatggtgaaaaaatttcatcaaaaagatgcaggtaaattcaaatttgagcacaaaacctattgtgaattataaaaaagaaaaaagattaaatggaatgggccaagtatgcactgttcatgaggcccaataaggcccacaatgggaggaaaatatctttggaagcctctgcttcgtttctctggcgaatcctaccgtttttcccctctttcgcgtagctgcgctcaggaccgaaggggcgacggcgtgcgcccgcgccagatccgccgcctccgcgccggcgaggccggttcccgcgcggtaagcggtggtaaccgcgcggtacgcgacggtaaccgcctgggtcgacgggcaagaggtaatccctccgttttgaaggttttcgcacggttaggagcggtaaccgtgcggttttgtacggttaccgtcggcttcgtaatctatgagacgatatacgtatgtgcagtaatcgtgtgaaaaccgtggtaaccgtccaccctaccgtggttaccgtggcttgaaccgtggtatggtattttttactgtgatatgcatggacatatttggggatttaggtcaatagaacatatttttaccaatatgcatgagaaatacattgggaatatgagtttatttcggcatttggttgcccgtgcttggctaaaaccatgcatgtgaagtatatttgattgctttggtctatgtacatataggttaaattaaatacgtcatagtatggaagaatttggatgcatgcttaccagtgtacatataattacgtcgtattattgcataatgggaggtatgtttataattagcagtgataatttctcatgcatttgatacagggtggagatgtcagatagtagggaccctgtgtgggagcacggggagaatatcccacctggatggcgctgtaagtattgccatacaaagaggggcggtggtggggcaacaagactaaagcaacacttggctgcaagagggaagggggttacatattgcaattcagtgcctccggatgtccgtgagttcttctgccgtgagttggacaggataaaagatgcaggtgaccagcgtaagagtgatagcggaagaagggttgaagcagcaagggtcaactattatgacctaacaggtgatgccgacgaggaggaacaaatggaagcagccattgcagcctcacgacaagacgaaaactttaggagggatgttgaggagcgtggtggcacttatgagcatggcggtgggagtggatccgcttagccggaggcacggaaaggtagaagtaacccaattaccaatatgctacgaagggctacgtctcatagggagtcacctgctgtgagagattacaacctagcatctgccaaggcccctgtgcagccacgcattgacacaggattcttcacaaagaaggggaagcaagctaggcaagccattggtgagtcatgggcaaggttcttctttaccgccggcattcctggtagaaacgccgataatccatactttgtgagcgccgttcgggagacacaaaagtggggtacgtatgcatctattaaggaacttctttttttctaactcattgcgcactacttatttcatacgtcaattgtaggtgaaagtgtaccttctccaactggtaacgagatagatggaaaatatcttgattctacagagaaggatgtgaagaagcaatttgataggttcaagaaggattgggatgagtacggtgttactataatgtgtgattcttggacaggtccgacgagtatgtcggtcatcaattttctgatatactgcaatggaataatgtttttccacaagtccattgatgcgaccgggcaaagccaggatgctaactttgtgctgaaggtatgtatggttcatgcaacaaattacttcatcacctgttatcgtcagtgttaggggcatggactaatttttattatgttatctaccaatgcaggagataaggaaggtggtacgcgaaataggctcggagcatgttgttcaaattatcactgacaatggctctaactacaagaaggcgtgcagactactacggcaagaatacaagacaattgtgtggcaaccttgtgtggcacacacagttaacttgatgcttaaggaggttgggaaaatgccagaccacgaaatagtgattgagagtgctaggaaaatttgcagatggctatacaatcataacaagttgcatgctatgatggtcttagctataggtggtgaactggttaagtggaatgctacaaggttcggaacaaactaagtggaatgctacaaggttcggaacaaactacatgtttctccagagtttccttaggaagcgagatcttttcatgcaatggatggcttcctctgtcttcatgcaaagcaaatttagtgggactttggaaggtagatatgcacatgcatgtctatctagtctgtcttggtgggagaacttagaggcagtagtgaattctgtccaacctatgtactcattccttcggtttgctgacgaggacaagaaccctaatttgagtgaggtacttttgagatatcagttgctcaaaatggagtacgacagtctttttgcgaatcaaagggacaagtttgaagcatacatggagatcgtgaacagaaggatgcacgacctaaccaatgagactctcatcaatgccggtaaatattggtcataacataatccacatggcatattatgtaactcttacttaacctgtgccatgttttgtagctgccgcattgaaccctaggacgcactacgcgtattctccaagtgctactgtcttccaagacctccgacatgcattcgagtggatgacggatatcgatacggctgccgccgctttgctggaggttgagatgtaccgacgtaagacgggtgaatttgggagggcactagcaagaaggatggccatagatgggaaaacttcacctggtatgtttctaatcatggaactatgatatatctaattgatcttgatgtattcagaattatgaaatgacatgttacttggcttttgcagcacaatggtggtctatgttcgcctcagacacgccgaatttgaagaagcttccgttgcgtttggttggtcaatgttgctcctccagtggatgtgaaaggaattggagcacattcgcattcgtacatacgaaggtccgtaatatacttacccacaagaagctcaacaagctagtgtacgtgaactacaaccttcgccttcgaattcagcaagcaaatgcccaaattagggtggaggacgatgatccccttcaaagattagcggacctctcattctatgaaactaacaatcatatcagtgcctggatggacaatgctcgctctaatgcttgccccgaactagatgaagattcagctgagagtgacgctcccctgcctagtcaacttgtgtctgacctagtcaacttggatgacctgggaaggaccacgggagcttctagtattgctgagtgggctgatacgaatgtaggtgacactcatattgggaaaaggaagactcgaaagccgccaaaagcacgtccatctaaaaaggtaaagggcaagggtccacgatcgactagtgttgatagcgatgaagagacccaaggaagcccagagtaccaagagtccaatgatagtagctcaagaactgaaacagatgacggcgacgacgatggtcaaggaggccaaggcactactaatgtgcctcctaggggtcacacccaacaatcagatcaccacagccccgttcaattcactggtgtgatataattcagttgcaatttcaaccttcatcttccaattcagtactggataattttcttgcaattttttgatttgcaggtgagggcgacttcactcatgctactcaggaccaggatcatggtgctccaagctctcaacgaactaccattgcaccgggagtccgacaacagcaacaattcagtgacatacaacaggatagctctagctcattcagtgtctctagctttgaaagtggctatccaacgtatgtgtacaaccgtccccaagcttctgattatcctgctactacatgggtgtatgaatggcaagagcctcagtggtatgctcaattgtacgctcagtggcaaacaacatcatcatggacaggtcaaagttgggaggaatacaaggcggggttgctacattcacatggcttgatgctcatgtccacagaggagtacaatatggcatataatcagtggaatgcgtagctatgcatgtccttgtttatttcctttcattcgaactagaattgtaatcgtggacattatactgtggactctacaatatagagtaggtcatgccgaatttttctgttgtataaccacatcttaattaactaaaatactcacattttagtttttttctattatttttttcatttttcttatttcagttccaacataaactaaaatactcacattttagtttttttctattatttttttcatttttcttatttcagttccaacatatcgcggttaccgtcctcttaccgcggttaccgtaccaaaccgtgcggttaccgtgtccataccgtggatttttaattcaaaaatttggaaacgaaatttgtgcggtttttcgcggtaaccgcacggttatcgcggtaaccaccataccgcggggggtcggtaaccccccaaaacggtaaggtgaaccctgctctcaggttaccgaatataggagatagcaatttcgggtcttccggtttaacccaaatctgcaataatgaaaaaaaaaaggcaaattaaatacagcgcacgtcaacagactactgaattcagaacatatttaatattcaacaaatgaaaacccagcctgtgacgtactttctgaccacggaagttcaggtacaaaatcgacaagcttctagcgccagaaagccactggcttagaacgaacggctcatgccaaaacaggcactcggatccgaacgcgatgttatcaaggcaaggaacgtagccgaaccgcacctacacgcgccgaagcttgggcacccggatcagatccaccctccggaagttgcagtggtgcagcttcaggcacacgagctgcgagcgcggcgcgtcgatctcgaggacggcgtcgtcgaccacgtcgctgtgcctcagctcgaggaaacgcagcctcccgcaggtgttgacgagggtcgggatgtcgtccggtccgctcaaacagtcgtccacggtgagcctcgtgagccacctgaaaacaacgggacacgcttggaagaaggaccagaagcgtcgtcccagcgagaccttgtgctcgtcggtcaggtcggcgacggcgatgtcggcctccacggtgaggtccagttcctccgtgccgccgccaccgtcgatggcgtgtccgacggctcggccgatggagtgcaggtaagggtctctcaagaagaatgccaggtcgatgctcttcttggtcacccgctgcggcgttgtgatcgtcggctccaggagccacctcgccgtggcggtgtacgccgccattgtctgatcaacggtgtagccggcggcgttgttgtgtcttccgccggagccgatgtccggctgcgtgaagtcacgggcatggagtctgatatcaggaagcatgtgcgggaggtgtctccatcttctcgagagggcgctggccctgacaacggaacgcaggtcgtcggcgagacgttggagtatttcgagcaaaatatcatcaaggagtgcgcttagcctgtcctcgctagttactccctccgtattttaatgtataacgccgttgactttttaatcaatatttgaccattcgttttatttaaaatttttgtgtaaatataaaaatatttatatcatgcttaaagaatatttgatgataaatcaagtcacgataaaataaatgataataacataaatttttagaataagacgaatggtcaaatattgattaaaaaatcaacggcgtcatacattaaaatacggagggagtacatggcaagaacgcgaagaggaatccacctccatcaggccggattttctggaggacaggattgtgcaatactgtaaattaaagtaagcgaccgatcaatactggacgtacgcacacaatggtcttgcaccctggaatcaatatatatttctaacgcgatggctaattcttaggaaaaacggatcggatttccgtttccccccgcacagtgttaaaccgccctccctaagggcggtaaggggaccgcctgcaaaatggcaggccccctatagccgaccgttaggcataagccaacggtcgtctgccacgtcacgaaaaggcggcaggcgactagttttgtaaatttttgaaacacaaattagttttgtaaatattttaataaaaaattaaaaataaaaaaaaaattgtccaacgtgacttgcagcataggcgggccggctgtgccgtattcggcaccaatccagcccatccacaggccagcggtccggtgcctaaagacttgatgaaggccggctgccggtcaggggtgggtagatcggtgggggaaatgtacatatgaggtccctcatcttatcaccgaattacaaaatcgtacctcaaccgggaatatcttagatccctcgacttacaaaaccggatcaccctgagttcttaggtggtattgatcccgattttgtccgacgtaacggatgagttagcgtgggactcacgtgtaccccacatattagggtgaccacgtcataaccctctctcttctccttgtttgggtaggctacctaacggatgggaaggaggtcagcgggacgagacgggagaggaggaggtccggcggcttgcgacgatgcaaaaggggagttccgctggagccccacgagagccgacacgatgcggagatggagatggccgtcgtggcagttggcgcggaggtggtggctttggtgacctctaggccagcgggggctttgcggatggtgcccgaggtccaagacggctggtggtggtactcccagggcggagggtcgggcctcgctgagcgtggtaaagctctagcgtttgccacgaggcgcggtggccgacgagagagggcaactgccatggcctaccgtggagtggaggcggaggtaaccaacaatgtgcgatgccccggcggggggacttggcggaattgatgcgatagagctggaggtgaacagcaggggtgaggtggaggaggacgccgccgccgcagtggaagagttgcgtatggctggttcggcgtgggcgccgatggtgacggggtgaggacggattggttcgccacgtaccagggccacgctgtgctggcgctcgtgaggctctagcggaactccgtcgatttctccgccatcaagacggcgggatcctccaagcatgcggcctctgcaaccaccgcctcgactgctcgtcgtcgccgtgtcacccgtcgccagccgccggacctcctcaccgacttcctccccacccgccggccgacctgcccatatgaggagaagagtgagagagaggaggaagggagagcagaggggaaagagagagagggggggtgatgacgtggtcaccctgacatgtggagcccatgtggatcccatgctaactcagccaccccgtcagataaaaccggggtcaataccacctaaggacctagtgtagcccggctttgtaaattgaaggttcccatatctggttttttggttgagggatgattttgtaattcggggactacttttcctacatgtggtccgtatgtcatgagggcactaacccatgttggcccatgtgggttgacccatatagtgtttgccccatagttcatgcgctgggtcagtgggtagctgggtcgacctagcccatctgcattcctaggtgataccgccatgccaacgagttgtctaccacgcccagagagcaaagcagtggtacaagaaagagaccgaagaaagataatagattttggaatgatcgattttgttgcatcatatcaagccaacagttgagcaccgttgagtgcattattaatcagagatcaactaagcttgactcctattcagtccagcaacagacatttcaagcatgcattacagggaacctctagcatccatgttcagttgcagcagtaagtggctaattgaatagtgaactgctaaaaagagtagagcgatttcttggcatttcgctgacaagttcacatccatcgactgtttctagtgcgacgagtgaattgaagatgagtaatctagaggagtgggagcctagacgagtgaattgaagacgagtttatgctatatatcggaatcccgttaaaaaacgggacgattctggtaccaatatggcatcgctcttagcaactgtcgtccgccacctgcgtgcattgcagcaaaacatgaacgacgaccagcactcgccaaacgccggcttccctgcatctcagcgaaacctcctcggaagcgcgcgcctccacgcgcgattcctcgcttcctcccgctggcgcgcgcaccgtccgtcggcttctccgcatcatggcaaatcctcctagaaagcgcgtgattcctcgcttccttccaccggcgcgagcatcatccgccagctcctctacatcccagtgaaacctcctcggaattgcggcgcgcgattcctcgcttctttccagcggaaccctcgccgtccgccggctcttctgcttcccaatgaaacatcctcggaatcgtgttttgcaaggatatgatcttgcaatcaaaacaatacaaggtttagctgagaaagcttgcatcaatgaacttgacaccaaagcttgcatcaatgaacttgacaccaatgggaggacaacatgttgagaaggcccagtctaaaaatcgaggtgatatgcaggaaaaatttgtgaatgagagtaacaccatcaagacagtgagtatcttggctgctatcatggtgactacgggtttcatggatgatacattagtagaatcatgtgatacctgggaggtatcacgatccttctcgatatcatgaaacctgaaggtttcacacatgatccctcgctaggtatatataatcttgtgtgatacctaaaagtttcatacatgatactgcaaagtatcattatgtgtgatacctgtgaagtatcacatgatcctacttaggtatcatgtatgctatcatggtttctgtgggtttcacatatgatacttgaggatgatcatgtgatacctgggaggtatcatgatcctcctcagtatcatggatggtattatcaggtttcactgatgataccttaggaagatcatgtgatacgtgggaggtatcatgattctgctcaggtatcatgtctggtatcatcaggtttcatagatgataccttagaaggatcatgtgatatgtaggaggtatcatgattctgctcaggtatcatgtctggtatcatcatgtttcatagatgataccttagatcatgtgatacgagggaggtatcatgattcttctcaggtatcattaggtttcatagatgataccttagaaggatcatgagatacgagagaggtatcatgattcttcttagtatcatgactggtatcatggttcctgtgagtttcatagattatacctaagtatgatcatgtgatacttgggaggtgtcatgatcctcctcagtatcatggctggtatttactccacaaaaagtctaccccatgtaatacacttcatttgttcatatatggggaaacgatttttgcttccgtcaacttccagatcaaatatatgtacagggagtggacatgaataagttcatatcagattcgatcgatgtatcgtctatgtgctcgtaccaattcatgtcaccgattttcttgacactgcttaaagcaagaaaatgaagaacctcctgttgatggagaccgtcaaccgaagaaaacacggtgggcgctggcgtcggcgccaccaccacgctcacgccgctctcccacactgacctcgtgcacttcagcggcgacactgaagaggtggagctgccgccgccggcggacgcgagcaggtgccgccgccggctcctccaccgccgccgtcgacgccagcgagatctcacgcgccatgcccacggtgagagaattgtgagtgggactcggataagcacaagaaacgttctgtctctcttgggagtgggactcggataagctcgtgatgatttctgatgattggtaaaaaatttgtcccgtcccgaccgagcccaaacgggataccggtgtttagcatttccgttcctttcttcattctgaacatcgtcaggcagttgctcgaatagatcttcctccgccttgggaactacatagaacagattaagtgcaagtagtcacgagccttgttgttgatttacaaaaataagaaaagaactaaaatggaacaagtgcacacctcgatgatatttcagctgaattggttcactttgacttagtacttgaatcatgccaactgcacaagtcaaaagttgtcatgcatcagaacgtagcacacaaggttaataaagcaaaactaaacaggtcagcagcttaatacatgcagaacattgtttgtagaaatgtagtacgtagccatgtacatgaaccagaattactaatgagcacatgtgagaggtaaatggcaatttggcatatgtgttgaactgattgagatgtgcagtcatgttacttattcttgccttgttgtaatagttgtgaatcattttgatcgatccaaaaattgctgacatgcaagtcacatactcacatgacagtagcaggagcaattaagatgcacaacaacataaaacacggataaggaattaaggatgcatgaaactgtgatactagatgaatcagcagactaatacagtaccatacatagtttaattaacaaggttgttgaaagctacagaaacacacattaattaggcaaactaattttaatctacacacatgcaagcacagaataatgcagtgctagcatgacagtagcatcatcaattcagattcacagcagcaaatgacacattaaaggattcatggaaacgccataccagatgaatttgcagatgtgtcatgttgttctgtattcagaggctggttcagcggccatgaatgaaagaagtaggaggggttgcagtgtgtggcatgaagatctgtgcacctaatcatccttcttgctttcacatccactgtgaataggttcttgccgtggcccgtggacgaagaagagcatccctgtatgcacaggatgcgctgccgcaaccatgaggctcttcttccttgtgatcctgcttacccatctcctgctccagatctccgagaagggcaaatggcactcacaatcccaggtcgcgtgctccggatctgccagcacccatacgctgatgatcggtacgccaagtctgctgtgaatctgaatgtaacgaagcttcccaccgctgctagtaacgcagcgatgcttgatgaggtcgttctccgtgccggctacaggaggcacgcacccatctggaagcggcacgaacagaaggtcctggtgctccgtgaatggatcgcacgcgaggaggccgcaggagagatcaacccaccagagcttctgggcatgggagatgacggcatcgtttgcccagctatctggatggccaagcccggcgtacttgacctccttgctgagccagagaccggtggcgctccagtagaggcggagggtggcgtggtcggtgccgagcatgggcacgagctcagcgatggcgtacgaactccttctcctcctcctcctccaccgccgccgccacccgccgcgcaaggtcttgagattagacccaccctatggaagtcgctcagtggaccaccgacgggaggatcggggacgcgggaggccacgccagtgtgcgcgtcgcagaggaagtacgccgggacgcgggcg

SEQ ID NO: 2428 - DNA, 8078 bp, Oryza sativa
  unsure (1)..(8078): unsure at all n locations
ggccatacagttcattcatgcttggatggagtacgaacgtcgggtggaaattgcaagcttagactggaggaacaatccattagggttacctaaatggtccgagcgtccaaagtgtgggtgcagagatcgctggcaggtggctacatcctttgctgaacaaacatttcgaaggagatattttgtctgccccaatgtagacaacgatttcgttgtatgtctaaccatttacaaaatccgctatgatttgcacaaaattactacccaaactgaataacattactatttttacagggcaatccaaggatgggtggatttactcgatggatcgacaatgtcactccatcatatcatggccagaagataacagagtcagaaacacaagtagagtatcaacgattgaaggaccacgagaatgcaatgcattctgaccgacctagaaggggccgataggttaccgcatgcttgattcgtcgggatcgacaaatttgtaccgtgtatcgatggcacttcttatctatcttatcattacaatgtttaattatggtggtgattttttgtatgcgtaagactaagggcctatttggattgctaccaaaaacataccctaccaatattttggtaatttgaatagtacttgtgtttgatttcgattgaagcctattcattggtaatacgtaatctagatttgagattatgtataacattcttcactacaattttacattttggcagcaaaccaaatatgatcaaatgcaattttaccttaccaaatatttggtagtgccaaaacttgcttatattttggcactaacaaaatatttgtacggtaacattccaaataggccctaaaaataataaaattgtattttaccagtcttggagattttaatcttgtatagttttcaatataaaaagatttgataactattgatatttatacaaaaatataaagcacagtataaaatcgccctcccccagggcggcaagggggccgcctgcaaaattccatgccccctcgccgcccatttgcaggcggccccccgcacagtacaaaatcgccctagcggagggcggcaagggggccgcctgcaaatttcgttgacggccgtcgccgagagcgaacggccgtctgccacgtcactttcgccgccctctgggatggcaatttttaaaaatcgccctcccagagggcggtagacgaccacttctgtcaattttcaacatgaaaaattatttttgtaaaacatttaataaaaaaaattaaaaatacaaaaacctccaagagaagtcacctactgcttcaggtttggaggaaacgcctaagctaatccggtgaggtcgaggcagagtagtgtattgacacgtcgtccaccggtaactcttgtaacaaattccttgtaactgcttgcctcaatggccactggcataattttgtgtactgacccatatgtaaattttgagtgtataaactttagataaataaaatttagataaactttaagtaaatctctacttatctctatctctagtatgataaaaattgaaaatgtttttgctggtattttggtacgtcatccatgtttgaatcagtttttaagttcgttcgtttctagaaatacagtttgtgtttgagttggattttaaactcgtttgcttttggaaatacaagaggaatcttataagaaatctctttaaaaaaaactcatgctaacttgagatggaatatggactcctaattacagctcatgattttctaaacgagaatgctaggggacgggatactgtcccccaacgggatagctcctctccacaacgcgattcgcatcccccgccgctgccgcacccgtcccccgtcgcctccgccgccaccgcgcccgtcctccaccgccgtcgtcgctgtcccccgccgccaccgtcgccaccgcggcgtccgtcccccgtcgacgctgccgccgccgccgcgcccatcccccacctgccgctgcgcccgtcctctgccgccgccgccgccgtcctcgtctacaagggatggctgcagggggcgaccgcgcgtgtcggggtgctcctctcccaacgggatgcccagctatatctagcaggaatcacctgatatctggtaagtatcatctgatacctcgcaagtatcacgtgatacatggtagaaatcgtctgatacctcgcgagtatgacgtgatacgtggtagaaatcgtctgatacatgacaggtatcgcatgatacctcgtgagtatcacgcaatacgtggttgaaatcatctgatacctgacaggtttcacatgatacctcgcgagtatcacgcaatacgtggtagaaaatcgtatgatacctgataagtatcacatgatactttgcaggtatcacctgtaacgtgtgtagaatcgtttgatacctgataggtatcacacctgatacctactcgggattatcctgttctgtagaatcgtctaatacctgataggtatcacacctgatacctactcgggatcatcccgttcgaaaacgggattccgttatatagcagcccccttttctaaatgaaatattcaagcaaattccatggtgaattttatcctaactaaaccgtataataataataaaattaaaatagcatttatccgttgcaacgcacaagcattttttttttaataaaaattgaagatgtttttgccggtactttggtaggtcatccgtgtatgagtcgatttttaagttcgtttgcttttggaaatacatatccgtatttgagtctgagtctttttaagttcattcgtttttggaaatacataatggatagctttaaaaatattgcatgctaattttagacgatcagactcttaactgcagctcatgattttctaaaaaacatatatctaagcgaattcctacagtattgatgtactgcatacaggccatataaaagaacatttctcaggtgatcgcgactaaaagatcatgactatatagatggcatgcacaaatattcgctttgcggtggtcgctggtggcgccgttgtgatcagcgacgtttcattcgtgggcctctcctacgccaccgtcttcttcgcgtgcgctccctacgtgcctcttgtacttccggaacacgtacgtacgcttatcctacggaccacatgccaaagctgttcaagtggtgctacgtctcggtgcctatggccgttctgctgttgtcccgcctcgtgttggcggcacggcaggcaaccacgctggacatcaggctcgtcgccttcaccgccgtcatgttgacagtagacgttaccgcaattgggtttctcgaatggcgcagcaggagggagatgccgaagcctcgtggtacacgtgcgagcgcgtcggagatcgtcacgtcgtttttgtgatggtttgcttacggtatggctgtatccactggtggagaaaccatctttcgtcggtcgaccgaattccacaatagtcctggatgcaataaaaaccggggctaaagatcagctaaagatgatctttagtcccggttaaaaagagtaatgggcatatttgatctttaggttcaaatgctgttagggcctgtcaggcccctccgggataataccaactgggactaaagatcgtacctttagtaataccaaccgggactaaagatcccgggaatctttagccccggttggtaacaccaaccgcgactaaagtcccacccttatatatatatgttttcttcctcctccagctgcccgagcaagcttcaaaatttctttaaaaatgatgggaggtcatgccaaaatttttagtgaatttattttggtgattacatacaaatcggagatgcctaaaaggtttgcaacttcatcctccaatgttttttttgtcatattacatttggagctatgttttgcacacttttttatctccaaaattcagttataagttgatgagagagaaaatttgtgtggggaagaaagaatatatagaaaattagttgatttgctaaagaaggttttataaaatagttgagaaggaaaatatagtgaaagttaatcttaaataatagaaaacaaactaaaatgaaaattaaaagaagtaaaacacattaatataagtttaaaactttagaaatagtaaataagaattatttggtgtaatattttatgatttttatatgaataaagatatgtcattattgtctgactgttcaaagagtttgtaattattttataattattgtatgactgtcattattgtaagaataattatttgtgtacgattttttttcatgtcatgtagatggatcggcaatggatgtacgctgaccggcggtccaaagagtttattgacggcgtgcattattttttgagagtggccgaagctaacaggcaaaagggttttatttgttgtccatgcaataagtgtaagaatcagaaggagtattctgcatccaggactattcatttccacttgtttgagtcggggttcatgccaagctataattgttggacatcccacggagagcaaggtgttgaaatggaagaaaatgaagtggaagacgacaatattccggactttgctcagtacgttggatttgaaggaaatcaaacgggcgaggaggaaagagatgctgatggtaacgacgttgcggatgatcttggtcagatattgcaggacgtcaaggaggactgcgaaagtgaaaagggggcccataaattggacaagatgttagaggaccacagaacgtcgttgtacccaggttgcgagcaggggcacaaaaagttggataccactttggagttcttgcaatggaacgcaaaaaatggtgttagtgacaaggcatttggcgatttattgaaactcgtcaagaacattcttccggagggaaacaaattgcccgagacaatatacgaggctaagtatatatgattattnnnnnnnnnnnnnnnnnnnnnnacatatgttaattagagtttttaataattaatttactatcattcatatgctaattatatatgactattcaaatttttaaaagttttaaatcatgcatgtggcatttacatatgttaattagagtttttaacaattaatttaatatcattcatatgctaattatatatgattattagaatttttattaattttaaatcatgcatgtcgtatgtatttacatatgttaattagagtttttaacaattattttaatatcattcatatgctaattatataagattattagaatttttattaattttaaatcatgcatggcgtatgtatatacatatgctaattatagtttttaacaatttaatattatttatatgctaagtatatatgattattagaaattttattaattttaaatcatatatttgcttactacgttttatccacttaaattactacaaacaacaataatttttcgaagtaattgtcattattttttcgactttaaataattttaatgcattattttctattttagaaacacatatgtaatggaaattaatattcagtgcgcttatcagtagtcccggttcttaaccctaaccgggtttaaaaagaatttggaaatagcgggaaaatgtctttactcccggttgttctcatcaaccgggactaaagatctaggggtatatatattcccaatgcgcgccctcgtcttctccatcaacacttagaagtttttgccccgatcgatctctctcggcttctccttcgccgccactgcctagggcatccccgcgccgacgccgccgtcgtatctcgccgtcgtctcgcgcgcgtcgtcatcgccgcctccgcctcctccgccaccgccgcatctctggggtgagagccgccgccgcctccctctctagctctctctccgatctcgatctctctctctctctcggttgccgccggccgcctcgttgccgacgccgacgccgacgtcgtcgcggctgaacatgactccgccgcgccacgacgccgcggcggcacgacacgccgggacgccacgacgccgccgcgtcacggcaccgccgcgccgccacgcctccgccgcacaacgccaccgccgcgcaacgctgccgccgcgccgcgcgctgcgctgccgccgcgctgcacgccacaccgatgccgcgcgcgccgccacgccgccgccgcgccgccccgccgccactccgctgccgccacaccggcgctccgctgccgccacgtgaacgaacgaattaacgtgaacgagcgaatgaacgtgaacgagaacgtgaacgaacgaaacgtacgtgaacgagaattgaacgtgaacgaacgagcgtgaacgaacgtcaacgaatgtgaacgtgaacgaacgtgaacgtgaacgaacgtgaacgtgaacgaacgttaacgaacgtgaacatgaacgaacgtgaacttaacgttgtatttgaacgtacgtaaacgaacgagcaaagcaaaagcagggaactaacttgtgcggctactacgtgtgcgagtattgccactgccttgcaaaccaaatcatcaccacaagagagctcgatgtacgtacaaataaattcaaaatttcattacgtatcgatttgttgtttaattactaattaatttcatacattcatatagtttattcgcatgagggataactttatcacacacaaggaatttatcgcggcggttcaaaaacaactcatgggatttatcaacgaacaaatccttgatcccaagggtgaattctactacgacggaaatacagttcataggtccttagtttctgagatagcgactactactacgtcgaaatcgtagctagctaggacataatggattgtaattaatacatgtctatttttctatatacatgtgcacattttgtataatgtaaatatatattttggtcatatatatatatatatatatatatatatatatatatatatatatatgtatgtatgtatgtatgtatgtatgtatgtatgtatgtatgtatataaatatgtatataaaccatgcagcaacagggccatgcaaaaaaaaaggttagctcgatctttagtcccagttggtgttacgaaccatctttagtcccggttgagatcgatctttagtcccggttatttcacccgggactaaagatagcgatctttagtcccggattggtagtcccggtttaaaaaccgggactaaaggggggttacgaatcaggactacaaacgctttctccaccagtgatctacacgttttctacgtcattggcaatggttcgcaaagatggttcagttaatcggagtccaaaactatcagtaacaaattatgtaataatgcccgatctattgcttttgttttagagacattaccattagtcatttttagagaaggaactgttaatcagcatagtcagtcgagcaaccgaattttattcaaattgaagtgatatcagaatcagcattgcggcacgtagaatgtactgcctactggtacacgaatgagaatacgtcatgttccatgtgcggcatgtagaatgtactgcctactggtacacgaaagagaacacgtcatgttccatgtagcaacaatactcatggtcattggatcaattgatcaatgctcagcaaatcataaggaggaagcaaccggcctttgtcttcgtcgtggatccttagactggcgagactttacttgaatcacttgtactcgccagaggaacgccttttttctgatcgtcagaaccttcaacacaagcaaaaatgatggaaatgtcacgcaaggataaaagcttctaggaaactagcatttcaattgagatcgtttacaagtttgtacttaaaaaaagagcaattttacgatccttgaagaggtaccatgaggtaccgttttttctattgtaaatttggtacctcatagtaccatgtaccaagagataccaaattttacactaatttttttggtacctcatggtacctcaaggactgtagaattgctataaaaaagtttgaactcctaaaaaaagtcacatatccttatctaaaaaaagttcccatatcgttaattatctttaaaacaaaagttcacatgtagtaagaaagaaattaatacttccaga

SEQ ID NO: 2429 - DNA, 552 bp, Oryza sativa
aataatcatatatacttagcctcgtatattgtctcgggcaatttgtttccctccggaagaatgttcttgacgagtttcaataaatcgccaaatgccttgtcactaacaccattttttgcgttccattgcaagaactccaaagtggtatccaactttttgtgcccctgctcgcaacctgggtacaacgacgttctgtggtcctctaacatcttgtccaatttatgggcccccttttcactttcgcagtcctccttgacgtcctgcaatatctgaccaagatcatccgcaacgtcgttaccatcagcatctctttcctcctcgcccgtttgatttccttcaaatccaacgtactgagcaaagtccggaatattgtcgtcttccacttcattttcttccatttcaacaccttgctctccgtgggatgtccaacaattatagcttggcatgaaccccgactcaaacaagtggaaatgaatagtcctggatgcagaatactccttctgattcttacacttattgcatggacaacaaataaaacccttttgcctgtta

SEQ ID NO: 2430 - DNA, 671 bp, Oryza sativa
aaagttgaataactcatcaagatctaaaacttttattttggtcatttcttcatacgacaaagtgatagtaacattgttcacaaaattgacatatctcttatctggttttataaactataatacatatatgtaaaatttgtgaataatattactaacatttcgtcagatgaagaaataacaaaaataaaagttttagatcttgatgagttattcaactttgttgttgatgactttttcaattgaaatcatttagtatttgaaaatgttgtttgaagttgtcatatttttaaattcaaattcaaactgttcaaaaaaatgttatattgaaaaatgaccaaactaaaagttgtaaatattgataagttatacaactttgttgttgacattttttccatttgaaatcatttactacctgtaaaattatttttgctatagttaacttacaaatataaacatttcatatgaaaaatggaaaaatagtcatcgatgacgggctttagttaatgcccgatagagattaagtatatagcccgtcactgatgagtcatctgtgacgggcctagttgttatctcaaacgggcctcaagttggtgcacgtcacagatgatggtcatttgtgacgggccacaacttgaggctcgtttgagatatggaatgttatctcaaacggg

SEQ ID NO: 2431 - DNA, 16149 bp, Oryza sativa
  unsure (1)..(16149): unsure at all n locations
ccctgcacctcagctccttgcccggcgggagagggacgaagcgcagcgccggcgcgggggcgaaggggtcgcaagtgatgaggcaccaagagaggtcgacgaaccagagcctcccggagtgcgagacggcgccgttgggggccaactgccggggagggaacgggtaggcgacctccttctcgacccactcgccgacgtcggaggagaagcagacgagcgtggcgtggtcggcgtggaggatgggctggagctcggcgaccacgtagcggccgccgccgtcgggggaggcgaggagtcccatgtggcccatgtgcatgacgagctccgggtcggggagagcgaccgcggtggccgtggcggcttcaaggacgaagtagcccgggacgaactggcgccacatgaactcctgacggccggggcggtcgatgacggtggggcccttggcgcggccctggtcggcgtggaggaggaggaggccggaggggtcggcggccatgacgctggggaagttgtcggacgtggtggcgctcgggaagatccgctaagggatggtgagcagcgagacgcgcgggggcgccttgagcgcgagggagagatcggcgcccgcagggatcccgcccccggcccccttctcgtcggcgccgcagacgcgcgggatgctgcccaggatcacccacgtcgacggcggcggcgacgcggacgccatcgtctcggctggcgacgaggcggaggaggagaagggcgcgcgggtgaggcctagcggttccgcgtacgcgtatgccgcggcggctgcggcggcggcaacggcggcggaagtggtgataccgtgtcgaggcgtggaggtggaggtggtgcagaggcgcagcagcagcagcctttgtagtttgaacatcgcggcgcgtcgagtcctcgggattctctcctcgcgtcgtggagcgtggccaaataatgatccgagccgtaacgatcgatcgatcgatcgatcggtgccgcgtgtcgggtttcgggagctgagaggatctctcggccgtaggggtgaaaacggagcggatagtttccgtccgctccggtcaaaaacggatacggatagtgttcggagcagatttttttcggatagttcgaatacggatacgaatacggatattttttctccggatacggatacgaatatggtaacgcagtttccggcgaattcgaatacggagccgaatatccggagattaagatgcgcggatatccgcgtaacgcttgatgtctctccagcctccagcccatcccttcaatttcagcacatagttttctctcggctatctaaaccctagctgccagatgggcgacggcggcggcggcggtgacgacggcagcggcaagccggcgacagtggcggcggctgtcttagatctccttggctccttgctggagttgctgggcattggccttcaatccccctagtgcttgtttgtgcttcctatctccctaaatcgtgggacagtgggaggctaggagccgtcaccaccgtgattgtagaggagtatgctaaatataaggtaagcaagaatgggtcaggtgacactgtgattgtagaggagtatgctaaatgcaactagtgctcatataaacgtcggtgtgagagtaattgtggcacttctgttttctggaatcacttgaataacaagcacaacatcaagtcaggtcaacaacatctacagatgaaaaagagtgaagatggtactgaaggagctgttgagacatacaggtatgatgagacggttagcctgaaaaagttctataggcaatcatcatgcatgagtatccctttaacattgttgagcatgattactttgtggattttattaagtctttacgccctacttttccaattaagagtcgcattactgtgagaaaggatattctaaacatatatgaagaggaaaaaagaaattgtggcagcatttgcttacactctcatgccgttttagcacaaccatggacatgtggacatctaaccaaaataaaagttatatgtgcatcacagttcattggatagatgacacttggaagatgcaaaagaggatcattaagtttatgcatgtagaaggacatcattcaggaagtaatatgtgcaaagagttttatgacagcatagttgattggaatcttgatagaaggcttgttggacttactttggacaatgcatcgtctaatgatgtttgtgttaaggatgttattttaaaactccgtaaaatctctcctttaatttgcgatggcatcttctttcatgtgagatgtttcaatcatatcttgaaccttgttgcacaagatggtttgaaacaaatcacatgagctgtattaaagatcagaaatactatttcaattctaaagcactcgccactgcagtttgaggcatttcagaagtgtgccttggaagttagtttggataacacaaagggcctttccatggatactcctacaagatggaactccacatttctcatgttgaagaatgctatctactacagaaatgcttttgataggttgtttcttcggcatggtagaaagtatgcaaagtgtgctcccaccaaggtagactggtctatggcaatagcactatgcaagtgcttgaagccatttcatgaagcaactgaactattctctggtactacatatccaacagcaaatcattttttcggtaagttttgttccatcaagctttatattgctgattggtgtaacagtacagatggaacaataaaaaccatggcaaacgccatgcaaactaaatatgataagtactgggagaagtcgaatatggctcttgctgttacatgcttccttgatccacgttacaaaacaagttcaatagagtactatggtatgaagatttatggtttagaagctgcagaaaaatttgatgagttcaatggggttatcaaaaaattgtttgatgtttatgctactagtgcgtgtgcaacatcaaagaagaaaggtgctgaaatgcatgtgcatcaacttcaaattcaacctgatcctgttcataatactgatgagtttgatgatatctttaatgagaatgacagtagccatgatcatgagcaacattttcaaagatttttgcttgagagaagtcagccaatttgtagtgataaaactgagttacaaatttacatggaacaaccactgttactatggacttccaaagatccatttgatattttgtcttggtggaagctcaaacaagcagaatttcctatcctctgcaaacttgctcgtgatttcttatgtattcaagtgtcaactgttgcttctgagtcggcatttagtgctggtggccgtgttgttgatccatttcgcacccgtcttgatccagaggctgtgcaagctttagtttgcaccaaagattggattaaagcagctaacaatagtacactttgtgtctgtgttcattgcttatttggccattccttcttgtatatatcaatatatgtatagctgatccatgatctgatctggcatcattcttaggttataagactcaggctatcatcaatgaattggacattgaaagcgtagagaggcatctggcaaacttattgatagtggtgagctattttcttattttacctctatgaatatttttcttaatataacaacaatattattcgactcctgtaggaaaaagaggagaataatgatgacatggaacaggatgatgttctgatggatgaaatggatgaataatgatgttgcagttttcatgcatcggactgcaagtgtactgaaaattgctttgggctaattactattttgatcttatctgtgttacctatagaactcgaactcaatatgtgttgaacttttcaacgtgtttcgatttgaacacgatacactttgtttaatctgtgatgcgtcctacaacgatgatatttatattaaattagataaatatatgtggtgcatttgtatctacgagcagtttgagtggtctctatattccgagaaatattcgttttcgtattcgtgtccgatcatattcgatccttattcgtatccgcgataattcgtattcgtttccgtatccgagttattcgtattcgtttccgtatccgcctaacaatatgaaaatggatacggtaagagcattatccgtccgtattcgctccgttttcacccctactcggccgtagtcgtcatctccgtgatcacgtatcgctcgctgctttttctccctttctctgcgctgctttttctcccttcctctgcgcctagtgctcccttgaccagacaggaaagagctgaatacgagtagtaaatacatggaaatcaaaattgtgtgactagtagcggtactctacttaaattagagcttctttaaaactgtggattttcaagatgcatgggaaatacccctgattagagtgctctaacatcttttattctacattttgaaaaaaatatagaaataactatttgatggagcgtatgaaaaaacacataattaaaagagatatagacaaaatatttatccatgaggaattcctcgataactcctatgttttgagccaattcaaaggtatttcatacgatttttggatagttatccttcgatccaaatggctatgtaggaaaacttttataggactaaaattcttcaacctagcccttatacatactctgacccccttttttctaattaagatacaaattttattttgatttccgttaacacattttaaaccgctccacgataaacttcgtgcgaaaaatttgtatgtagtgcctgtttggtacaactctaactcctaaatttagcttcaggagttgagtctggagtagagttgtggagctgcctaaagccctaaacctagctccacaactgtagttcattttatgagagagcttcacctagctccgctcccagttttggtggagctgaaactatttggctgagctgtagctccaggatgggtggagctggagctagagctaggggtgtaagtggctaacccgcgaaacccacttataagctaaaataagccgcgaacccgattatttggacctacaagtgggttcgtggctaacccacttacacctctagctggagctgtgtcaaacaggtccgtataagttgttttaaaatattagataaatcaattttcaagttcataataattaaaattcattaaatatgaactaatgaattattttcctgtcgtaattttatgttttcgtgtcctagtacctctgtactctgtacgcggtagaggtgaacaagggaaaacaaacatgtgtagaagcaagccatgtgtagagagtggcttgctactcctatacagtactgtacaccaccagtacagtatgcacagcagcaagccatgtgtagaagttgcacaggggaagagaatcctctctgacatcggggaaattaaagacaaccgcgaagtgctcgcaccacagcgctccgggcgtttttgggccggcgtgttcgcacctgcttgtgtccacgtcgccctatttggtgtggctgtgttgtgtgaacccatggctgtgttgtgtgaacccataagcgtactcgcaccgtcactgctatgtggggcagggagggatgtgggttgctgttcatggtcctatcaatgctttcgttgcctgtgcgcttagtccattgccttaggtttctggacctgtctctgcgtgccccacttgcagcttctttggttcacagtgcacatggagtacagggtttttaacaccctgacatgcttgaccaatggtgcagtttgcacggctccctaacggcatgactctgctcctgcctacctgccatgcgtgctccgccgaatgcttatatgcagcacctggtctaccgtgctccaggtagagcccttcggcctacggtgtgcatgcgtgatggaccaggcccacggctattttggtctgctacatcgctttgatccgctgtgtattccgttgggcttgcattgaaaaaaagtcaccacacaacgtctcctctgtaaaccctctgcgggtgggctcgctgttttgcgctgtcccacatgccatatgctctggtgcgccaaatagattgcctccctgctgcacggcgccaaatagattgcctccctgctgcgccatgttttaatgcccaccgcttgcaccggcccgctgtcaggtgaggtccaatcaacgtcggcgtccgccataccagcgtgcgtgatcatcaatggggcaatgtcctgttttgccttcagcttcttcctccccattgtgaggccctgtttagatgggactaaaacttttaaatccctatcacatcggatgtttgaaaattaattataaatattaaacgtagactattaataaaacccatccataatcttggactaatttgcgagacgaatctaatgagcctaattaatccatgattggcctatgtgatgctacagtaaacattctctaattatagattaattaggcttaaaaaatttgtctcgtgaattagcttttatttatgtaattagttttgtaagtagtctatatttaatactctaaattagtgtctaagacagggactaaagttaagtccctggatctaaacaccacctgagagatttgtttgtctcctccgcttttgctttgctctgctctgctgtttccctctcctgctgacttcttcagccatgccgacagcttggtgggttgctacctccatacctagcagatgtcttcctcatgcgatttggttggttggtttgacgctacacggttggtgtgcaggtctgcgtgtgggatttccgccagcattgctgcgtaggatttggtgttctcgcactggttagttgcttccttgatgtgctgtgtcctggatggtcgattcttcatcctttcgttttgcttgctgtgggcaggggcaggggaggcggtcgcattgctctaccgcctgttggtcgctggcagttcacggtcgagggcaagttgatctccttccatcagagtgtgcctgcaccggctcgaagaggttgctgctcttttcttcgctgattttccccctgcttttcctttctatttgttcttatgtttgcccttgccttttcgtctgggttcttttctcggtggcctctgttgtgtctgccatcctgctatgttgtgtgcgtgagaaaataatgccagttggtgcctcacagattactgtgcatgggcccgtacaggcccgcgtaccagtactggctgcctccctcttcttatataacccaaacttctctgggcacttgccccttgcgtagaggttgctcttgctggtttttgaccaaccttccagatcttcctttctaccactcacctaggccccatctagcagcgccatggttaatgtgggggtctcatttgtctctctgttgaatgccgttgcttggcattgtcagctcccgctggtgtcctatctttgggaaatagatgggaatggcatgctgctagcaggtgttgagcttgcgctcccatcggaagacatggccggccagattgttagcaagttcttttgggtctgcgcgtctactcaaacaagtgactcgcatgaaatgggcgcgcatcaggctgttaggttcttgcaggctaggtacggctttattgtccacgattacaatcttcagatgttactttcctaccggagaatagcagcgtctacagtagatgcagctgttacagcctcagcgtgccttgctaggttccagtcacgatatgctccgacagatctatcgtgtgctggtgttgtccagcgatgtaacactatatggttcaattttcttcatgaggaccacatgtttagcaacatgcacaacctttaggggtattttgtttcctttagagggtgttagtgtttttcgctactgagtttgtctgcaatgagagtgtgcctttatgatgttattacataatgttttgtattgtctgctttcgatcttatgttcttcttttgtgcattgctttcggttagttcggtgctctctttcttacgactgatctgacgacgaaaaaacagctccccttttatccgctgtgttgttgcctctgagctatgacgagtaatccctctccgcgagttcaacgggcccgtgagagccgtttgcgacgccgtgcttctattggccagggtttgtgcttcttaacttgatttagaggcgcttcttgggttagatcgataagtttgatcaaccagatagttggggtttatagcatttttgcaggctcctctgttcggcggcgtaaatcctgtggtctctaggggaccaaatggttcgccaaatgctggaatagatgtggagcagtcggttcctgaacaagctctggcttctgatgttcatgtgcggtctcaggttgcctttgttgctggcacaggtcctttgacccagaattccataaccaccgctagcagtaagttgagcgatagttgtcccatgggctccataactcctgacaatgtcgattatgcttagctcctttgttctcctcattgcgattaggaaagagaaccctactagatgtgccgcgccacactgctgcagcaaacagggaaaaacgacgcctcaagaggtctggttctcagccagaccacctggtaagaaaaatcctagaaggtatggttaaatataccttttgtttcccctgtgctcgcttagtgtggcagttatgtctgctaaccatttttgctttcaccgatgcttgcttcctgggatttcgaatgcataggtcccgttcctacagtggatgacatcttgcctttacctaaggattacattgcgtccttaaaaggtttgctcggtgtctgctgtcttacatagcttcctttctgtcaatcaatgcagttgttaatgcttgcaaacaatgcagctttgtgcccagagcgatcatactatggtggcccttcgcatgagtgtccttattgtggtgccgttttttggtaccaggagagggtaaagagagatagtgctgtttctcagagaaggattgtctataatctctgctgtaggggtggtaagatcagcctgcctgaactaaaatacccaccggatatgttagcgaagcttctgaaatttgatggtgatgcacaatcaaagcgtttcttacgccaaattcgatcttacaactcgctttttgcattcacttcattaggggctgatgtagaaaagtcaattaacaatggaaccgcaccatatgtctttaaaattaacggcgttgtgcaccatcgtattggcagcctcttgcctcagcgtggtgcgaagcccaagtttgctcagctatacatatatgacaccgagaatgaaaccgctaaccgaattaacattttcgatagagaaaactcaaacgatgagcctgacccatcaattgttacaggacttggcgctatgctcgaccaacacaatgatctggtcaaatcgtttcgctatgctagagatcgtttaaacgagcatggtaatgagcagattgcacttagactgcttgggtgcaatgctaaagatgaagtccaatataacctgccaacgagtggtgagatcgcaggaataatagtgggcgacagctcaaacgatgcgtacacgtatgatgtggttgtccagtcttcggataataggctgagacaagtctctgctttgcatccttcctacatggctttgcaatatcctttgcttttcccctacggtgaacgagggttccacctcggtataaagtacactgatttcccgagtattgctggaacatcacggcgatacgtgacaatgcttgaatactatcgatatcgctttcattataggctaaacaaaccgaatccatatacatgttgtggccgtcttagtgactcgatatgtgtggatgcatactcaactgttgagggatcgaggctgaaatttatacatgaccaccaacctgagttacgttcagagtgtgttcaagggattgtcgatgccattgaccatggcctcgaatctggtgattctgttggcaaaaagtacgtcttgccatcaagtttcactggaggtcgtcgctacatggtccagaattaccaggacgcaatggctgtttgccgcgtgttcggttcgcccgacctattcgtgaccttcacgtgcaactccaaatggcaagagatatacgatgcccttgtgtttgaaccaggccaggtgccgagcgatcggtctgacatgattgtacgagtctttagcatgaaggtcgatgaattcatatccgatattaaggagggaaggaccttcggtcctgtgctggcaggtagacgtcatctagacatgttttttcctatatcattttgtcatgttagtactgttcctgctgatatccatgcttccatgtagtgttgtataccgtggaattccaaaagcgtggtctcccgcacatacactgtattgtgtggcgtgcagcagctgacgccgaatttagtgctaccgctgtggacagtttaatttgtgctgaaattcctgatgtgtttagtgatcctttgggctatgccttagtcgatgagtttatgatccatggcccttgtggtgacaagaataaatcatgtgtctgtatgaaaaatgggcattgctccaagcatttccctaaaggcttccaagaagagacgaccatggatgagtttggctttactgtatataggcgtcgaaatgatggacgatatgtggttaagaatggaattaaacttgacaatcgatgggtcgttccatacaacatgaaattactgaaaaaataccaagcgcacattaacgttgaatcatgcaacaaatccaacatgataaaataccttttcaagtacataacaaagggtggtgatagaaccaaactatactttgaaacaactggcaacacaccaaacaagactgttgatggtactgttttgccaccaaatgagattgatgagtacatcaatgctaggttcctctcaacctgtgaagccttttggcgtgctttcgagtttgacatacactatagagttcctgctgtggaacggttgcctattcatcttccaaatatgaattttgttcagtacaaaaaaggaaccgacctaaaaaaattgcttgacagtcctgctgcaaaaaaaacaatgctaacagagtggttcgagtgtaataaaaagcatccaaatgcacgaacactgacctattgtgatttcccaaaacaatggacctgggacaatagcgcccgctgttggcgcccaaggacaccagtcgaaaaaattggtagaatttattatgtcagcccagccgctggagagctatactacctgcgcatgctgttgatgacagttaaaggcgcaaaaagctatgctgatgttcggacctttgaagggactgtttacccaacttttaggcaggcatgtgagtctagaggccttcttgagaatgataacgattggcatttgttgtttgatgaggcgatagtttctgcgtcgtccctgcagttaaggcaactatttgtgactgttgtaatgttctgctctgttggaaacgtccgatcattgtttgataagtattggttatactttactgatgacattcagcatcgccttagaacagcgctctcaaaccctgcttatgttgttccacatgataggttgctgtctcttttgattaaagaattacactctgcatttgcaaacagcggtggtaacatagatgactatgacctcccgcgatcaacgatacattcagatgatgaatttggaaatagaatggtcaacgaagaattggctcttgatactgctgccttggctgctcatgccagcctgatgataccacgactaaactctgaacaacaaaatttttttgacacaatagttagccgtgttagtgagtcgaggcctggatttttcttcgtgtatggccatggtggcactggcaaaacgtttttgtggaacgtgctcatttctaagataaggtctgagggaaatattgttcttgcagttgcttcctcaggagtcgcttcgcttcttctccctagagggcgcactgcccattctaggttcaaaataccgattgatatagatgaaaatagcatatgcagtataaaaagaggaacaatgcttgcagaacttattcagaaaacgtcccttattatatgggatgaagctcccatgacacatagacgatgctttgaggccttagaccgaacgttgcgagatttgctttcagaacataacccttcaaatagtgtgctgccatttggtgggaaatttgttgtcctaggtggtgatttcaggcagatattaccggttattaaaaaggggacacgcaattctatagttgacgcatctataacaaattcaccgctttggcaacatgttgtccttcttaaactcactgttaacatgaggctcttccagtccggtctttctgagggacgccgtcatgatcttgaacaatttgctcgatgggtcttagcgcttggggatggtatgctaccagtatcaaaaaggatcgatgagtctgaggcgacctggattgatatccctgatgatctactaattagagcttcggatgacaaaatatattcaatagtaaatgaggttttcccatgttatgtgcatagatacacagattcttcttacctagcatcgcgtgctattgtctgcccaaataactcaacagttgacgagataaatgactacatggttgctatgatacctggtgaaatgaaagagtaccttagttgtgacactatttcaaaaacatccgaacacatacctgacttcgacattttgtacccaactgaatttttaaactccatcaatgccaacaacttcccgacgcataggcttgcactgaaaaaaggcgcaacagtaatgttgctgcggaatctaaatcaatcccttggcttgtgcaatggaactagattgttggtcctttctctcgggcatcgtctcttagaatgtgtgatcttgactggatcaaacgttggcgaaagagcattcataccaagaattgtgctcagcactacgagttctaagtggccttttgtacttcaaagaaggcaattccctgtacgtgtgtgctatgccatgacaattaacaaaagccaaggacagacactttcaagggttggggtctaccttaaaaaagcagttttcacacatggccaattgtatgttgctgtatctagatcgacctctagagatggccttaggatccttattaaggacgacgatggcgcgtgtagttctaagactagaaacgtggtataccatgaggtgctggaggcagtcagattaatggtatattctcgattgttgatttccacgtgacacgaaccatgtttatccagagtgctgggatatattttaaggtgctaatttcattttaaaatgtaggattctggtacctagaaccaagtgacaacgtccatgtttgctgctgctctgttgttcttggtggctattttatcagctctgttatcgtgttcttgtgcaaaaatgtttctctatgttctcaggatcttttgctgtaagctttgttctctgtttacatgcagctcctacttcttaggagggccttcacactaatgagaaacttttaccttgctttcagatggcctacagcatgctctctaagcttgagttaggtgctgacaacccacgcatctgtgttcgtgtttcaaggctatgggagttcgctaatccaaatgatgagacacaattgctccaccttggtttggttttgattgatcaggaggtcagttcttcagagcactgagcacccagctttctgtagaaacagattgctttactaatgtgcttttgaaacagggcactagcattgcagcacagatataccctccctgcgatctgcagttcagagaaatcatcactgaaggcaaagtgtactatcttgagtactaccgtgtgagggaatggagcaggcgatacaggccagtcaacaacagcctgtcaatttgttttacaaggtggactaaagttgaacaggttgcagatccggcagctgatttccctttgtacacttactcactcacaccatatggtggactccgtcagcgtgtcgataggaaagaagaattcacaggtattctcattgtgttttgggtaataaaagcatgacgtacaatgatataatgtccttcagatcactgacaagttgcttcctcttattgtcaatacaaaaaaaagatgtcattggcattattactgaggtaacatctgttacgacagttcagacgcgcatccgagatggtgatagcctgaagagaagcatttacatacgtgatactaagttagcctcaaaccttatctattatcttcattcatgtgaattgcatttccctagatttgttgatctgtttatgtattatgtcagttgactaaccagctatctccagctgtactgactttttttcttcaacactacacaaatcatacccatagaaactatatgctctaacataatcatcgtgtccaacaaaccacacatgcgagatttttatgcacttttttactacatccattccatagcgatacaatcttaaatgtggcgctatggggagaacgtgctacaagctttcctgtcgatgaagtggttgctgctggtcagaaagaaccacagatagcgatatttgtgggcactcttgtgaggggctatggtgagtgggctctcaatgtgtccaaatgtgtttntagactatgactccaattgttttacatatcgtgcactgacacatttctttcataggcgacatatctctatcagcaactcagcttgcaaatggacattaatgtgaacactcctgaggtcaactccttcaaagaaaggtttgttctaactttcatataattcgagtagatttggtccactcttttacagattcccatctaggctcatctgtgtgttttttacagcatacagggaaaatatgaacctatcaaaatgattgagctcccagctgttggagctgttcgtactggcgccgaacaaaagtcaattgcccagatcaaggacctcaacccttttatgtttagggtatgttatatgttctgtgtatttaactttgctatcttatagatccatgacaataagctccagctaacatataatcctttttacacctagaaaaatgaattcatggttactgtcgtcattaagaagatcgacacagaatcatcctggtggtaccctgcatgtgatacctgcaaaagaacagcaaaaccatatggaaagtcatacaggtgtggcaatacatcctgccctgctgtggtgtcagcatcacctaggtgagtactgcatgtcatgagaactggatacctaaaaccaatttagagtctaaccatgtttggatccctgcaggatcaaactcagcctcattgcaggagacgacacaggtgacactaagtttgtgctctttgggcgcacagcacaacgcattatcggtcgaccagtcgagatgctgatacagaacaaccctgctggcattgagttcataccaaaggaaattacagatcttcttgagaaggagtttacttggaatgttgccttcactgaaaacaccctgtcttccagcactgtttcgttccaagtgaatttgatcgttcgaggtcctgacaatccctgttcttcagccttgcaatccccatctgcatctcaggcatcgtctgcagtgccttctcaggctttatcaccagggctatcacatggtctctctattgggcagtgttcggcagcggctgatccatctattggatttgctgatccaacagctggaatagacagcccattagccgcttcaatcaagcacaagaaaccggagactgagtatcagtcaaaacctccagctgagcttcctcaggacgaagcagaggtaatcgagcaggcatagtctgaatttttgtcataaagcatttctatgttaaaagttaacattgctaatattgtcgtaatatatataggatgatgacaaccttccactaagccagatagttgctgacgatgctactaaacatagcacgtccaagtcctacaagaaaaggtaccaagctccataaacatgtttatgttacacataaggagcaatagtttgttctatatgttctaactgaatttgccaaacagggctaggccatctcccggtataggagctgctaagaagttgttcaag

SEQ ID NO: 2432 - DNA, 648 bp, Oryza sativa
aagattcagctaccaatttaaggatacctgtagagtgtacttctgcaatacgtgatggtcttttttctgcctcaacttatgaatatgcaaactttcaccgtcttgtttatagcatgaatcacaaaagttgcagcctaggcaaaccaagcaccgccatgccaagcattgatccatggcacggtgacaagaagaacaagttgaatcatgtagatgataaagaatcatcattgtggaatgttttgccctccggagagtatcaaactggtattgattgtcttgacaatgcttcaggaaatctattctgctgtcaaagtacttgctttccattgttggatctacatcatccgtttctggaagaggttcttcctctatctgtcaaaggagattagtaatctggttagtatttccatgcaggcagattgtagctaccttaaatagatgaattcatatacgtactctttcaaatgcatgcttttgttttggtgtagctgggtgcctgtccttcaaaggggtattcaacttctcagcataacaactacgaggacaaataagaatggcattataaataatgggtgcccttaccaccaagagttattggataacaaccaaagaggtggaatgttgatcattttgcaatttgacacgcaa

SEQ ID NO: 2433 - DNA, 532 bp, Oryza sativa
agcagatactactaaacaacgcagcaaaccgcaacaacatgcagagtagtaacacgaaacaagagcagagaaaaccgtacctgaattcctctgtaaactgattctggtttgggtgctgtgcaattgggggcacgcaacgcaggtgatcggcacggaggcgagggcggtgtacaacaacgggcaggcggaagggctcacgttctgggcgccaaacatcaacgtgttcagggacccgaggtggggccgcgggcaggagacccccggcgaggaccccacggtgaccggcaagtacgccgccgtgttcgtccgcggcgtccagggctacgccctcgccggcgccatcaactccaccgacctcgaggcctccgcctgctgcaagcacttcaccgcctacgacctcgagaactggaagggcgtcacccgctacgccttcgacgccaaggtggtgacccgtcacgacacgttgttctgtcagcaaatggtctggctaattgggtgaccctgccattgacgaggctctgagtgatgcgat

SEQ ID NO: 2434 - DNA, 1053 bp, Oryza sativa
ccctgctctatataaataatcccccccagttgctgaagaagatgaagcggatcccgctgacgaggagttcttccaggagcaagccggctacgatgagttttagggtttcagcctagttcccaagtcgcgcctgtgatgtttggtccaagtcttggcttccgcttcccttttgtaatgcagttgtaagctcgggatctgtccgcagcccaacatgactgtactcctactctataataaagagacctctgttgctgtgatattctgtcttcctgtgataccagcactgtttcctgggactgttatcgattaacaggttaatttggagcgtcacgggctagttccggtcgggactagttcggggcgtgacaagagatggtatcagagcacaggcttggccctagggcgaaacccgacatttaggacgaccctaaggatactaagttcaaaactacttgcgaaaagctaaggcttcttttggtttctttattttcaatagtttgtttctaaaatggttactgatcttttctccctccttcaaaattgtagatggcagtgaacgccagcttcagttcccacggttttggtgagggtcaccacgtcgctcagcttcgtgacctcgcccgcttccttggcttttcgtgtcccgagtacacggggtactccgtggaccgtgttccccctcgctgtgagctctctgtgtacctttaccctcgtggaggtatacacggagctggccttcgcccacaccacttcactgtggccaggcccactctccagatcgcgtaccaggacctctcctgtcgcgaccgagaaaaatacattttcccgaaagctagtgtattaatccccgtcccaggaaaagccggggtacactacacaaacatgatataaaagacacatctttattatatcgataatatttacattattacaaaggcacttaaggcctgacaatcaaaaataaacagcagcgaaaaagcgggcctacggctccatcttcacaggcgctcaactggggtataagccaggactccacctaagacttcttctcca

SEQ ID NO: 2435 - DNA, 2085 bp, Oryza sativa
gacgtgatcaccaacctcgtcctcgccgggcgcgagacaacggcgtcggcgctaacctggtttttctggttggtatccggccgtcccgatgttgaggacaatatagtgcgcgagatccgcgcggtacggcgtgcgtcctcgagcaacggggtccaagcggcgcggcgttcagcccccatgagctgcgcgacatgcactacctgcacgcggccatcaccgagtccatgcggctttacccgccggtgtccctcgacacgtacgtctgcaaggaggaagacttccttccggacggcacgttcgtcgggaaaggatggcaggtgacgtactgcgcgtacgccatggcgagggtggaggacatctggggcacggactgcgaggagttcaggccggagcggtggctggacgaggcgggcgtgttccggccggagagctcgttcaagtacccggtgttccacggcgggccgaggatgtgcctcggcaaggagatagcctacatacagatgaagtccatcgtgtcgtgcgtgttcgacaggttcacactccggtacaccggcggcgaggggcatccggggctcgtcacctcgctggcgctgcgcatggagggtggcttgccgatgcaagtactcctaaccaatagggggcaagcagtgtcgtgctaggccagctgttctcgacgacttcattagtcctgcttttgttgcgtcgctctcggctctcgcctgttcttctactgttagtccttttatcttctccgaactacgaattgttcacatttctgggagctagcatgagttgcatactgctgtgcttggctctgccatactaatactagtggattttaaacctcgagggaatattttcttattatttctatgtcacttaagtagttataaaaaaaataaaaagtaacaagatagattaacctgtgatatattactttacaaacatataagctaaaattaaaattttacaagttataataaaaacaaattaaactatatggtgaactaattgtcggtattagttccgagattgagatgttcaccgagtgggccggaaaggcactcagacggccacaccctctatttctccaattacgtgttcaactgtcacatctcatgcccctgtatggctgtattcatcgccggatcgccccgtcacgctcaatagtcaatgttattgtttacgagtgaccagtcacacatacagatttcgcgttaacagaatcaccagctaatgacgttattcgctcggtctcaaaattaattaagcactttgtttgatattgcttgaatttttattacgaactttttataattgtttgtttaagggttttttttttctgaaatgttttttttccaaatccattattgtttaataaacatgttctatttgcacaataaagctcatgccctctaattagttagctttttgttgcatacttattgcagtctaatcatataagaactaaaaaatgatgcaatgcttatgctaatgggtaatacctttatatatcaacatttttacaaatatgaatcaacttttgtgtaaacatcgatctaatactaaaataggttcctgttgtttatttattcatggattgaggggattcaaaactatgttaaatacatatacttgtagagtccaattctagtgtgcagtgtaggagacaacccataagtgtacgaggctagcgagaacacaattattggatggctaaatataactacaaatatatgcggttatgttgagaggaacaaatatatgtggaaacttaagatgccgcttaagattaagatctttatgtggtacttgtttaaggggttgtgttgaccaaggataatttggcgagacggaattagaatggtagcttaaggtgttgcttttgtatgaaaaatgaaactattcaatatctcttcatagattgtcattatgcaaaattcatatggagagcagttcagttttcttttggttttaatcttccaactagtatatttcatatatttgatgggtggcttttgggggttgacaagaaaaagagtaaactgatactggttggagcttcttccatttgttgggctctat

SEQ ID NO: 2436 - DNA, 650 bp, Oryza sativa
aaggcctgtcctacaccttagcttttgaaacggacagggataggaacgcagcaatcatgcttgctcgtaaattgcctcaaattgcaatgtaagtgcttttgccttaaaattgcattttgtttctaacgataatgtggtcaagaatccgtttcattcacttgatgttaggaagcaagttattttatacccttttgtttgctcaatgcagattacgctcactggtccaggtgatgaagttcatgctggtagctgaatttacagtgttcacggtgtgacagcaggagtatacatgtaggctgtgaattgtgtactgtgtcagtttgtgttttcgagagtagaggttgtacactaggctttcctctttcagcatacattctcaaggcaattctttttatttgcctgccagcagctgtttgtggtgttcgtcaaacatgctgtgcaaaatgatgattattcttgagcattatatctattaacgttcgaaaagtgatagtttgcttagaaggagcttcccttgaataatcaagaaatgtacatataatcacttccatctatggtgcgtaactggtcgcacgaagtcagtggtgattgtgttgtattcaaaggatcaactattgtgttatctggcaagtgattctaatagggcgttt

SEQ ID NO: 2437 - DNA, 633 bp, Oryza sativa
acggcccaaccagatgttcagatcagtgctgcgacagcggaggcgtctggtggtccgaagcagcagctcagatgaaaccaattccaccaccgaagagaaggtatatccacacgaccacacgcctgatgaattgaaaaaaaattaaagcctgaacccaactgtgacgaccatgttttgttcacagacgccattcggatacacgaggaaggacgtgctgctcatcggcgtcggcgtgacactcttaggctacggcctcaaatacgggctggaggtgacgtctgttctttctctcttctccatcactactccagttcgctgcttcttggctttgacttcatcatcaagtacacttcactgacgaacatgtatgccttccctttcacatccttgccacaactgaacacagctggtcggagtcgatcccttgcaagcaggaaacgccgtccagctgatcatcgtgctcgggatgacggtggggtggatctcgacgtacatgttcagggtggccaacaaggacatgacctacgcccagcagctcagggactatgagaagcaagtcatggaggtttgacacttgttcattctagtatgcagtgtttgttactaccaagagtatgagtgactgacctgaag

SEQ ID NO: 2438 - DNA, 1508 bp, Oryza sativa
cggtcggccaccacggcacgcgcgcgcggcttgcaacgggaggcgcggcggatttgagcggcgcggcttgggcacgcacgctggcttgcggggccgggcggctgcgcggctgcagggcggcagggcagcggggccggacggcgcggacggcgcagacggcgcggctctcgcgcatgcgcgcgcgacgcgcgggcagagcggagggaggggcgctgggcgtggctctcgcacacgcgcgcgcggcgcgcgggcagagcggaggggaagggggagagagagagagcgcgccgggagggagggggagagggagatgggccgagcgagattcggcccatcgaaccctggggtggcaaaatagacttttgcggaggaatttgatttggaaggattggattcggaattaaactcgacgatagatcggggatttgagatcttgagatggcacggacactagacgacaagcgaagaaacaaatttcgcaattagggtttttaggagataattttcccgctaggcgccacgacggaacgggcgctacaggttgataggtatgattcggttctttagccaccagtaccccacttacccatgggtaaaaaaaaggtgtgcctaaggtaatagctctaatccagtttatatgagattgatatggaaaaccatatagtacaaagacaacagatgaatccggcgttactgacgagatccttgtcgagatggttagacgagatctcccgacgaatctggcttcgtaaactatggtgggtatgttagcgctataattcgatgatctgaaccccttagggggtgtgtcttttataacgtgagttgccttagtctccaagtagatcttggagagaatgaaccctacacgatatagaatagacccaattctctccgagtaggactctgttaatcaccggcctatgaggatattttctataatatcttatagatttcccttatcacctacggtcgtatgaccgatggtataccatactcgtatattccgtaagtcataggatatgaggtatgccttatccgtaaccagtcgtatatgacataattcttacatgattttttacttgcttttgaatgttaatgttaaaactaaggttgcctaatatgatgttggtgcttgccatcgtcatcatcggattattgtaaaaaatttaagtgctctaaattagtgtagtggtatggatatccattacctgtatgggtatggtttggggagaattttgcacccgcggttagatgtgggtattagagcgcgaacttttaatcataagtttgagtatgaggtaagaaaacttgcagtagaattatagttcatgtggatcaatttatttgtgtactgaagagaagagagttgtaccaaaggtaacctagtaaccagattatttgagcaggcgaccaggcatgaggcatccactgtctagctttagtagtactactattgatcaagtcaatgtaacaatatgtttggtagcatatgatgtattcttgat

SEQ ID NO: 2439 - DNA, 679 bp, Oryza sativa
acgacggtgacggtgagctcgccgtccgcggccgcgaggaggcggcacgcggccagcatcgggttgatgtggccgcggcccgggtacggcaccgcgaccacgtgccgggacacggctgtcgacgccatgctaatctctatcggactatctctgctggaatttgtgtcttcttggtggaactaatataaaggcagcacagattggagagcttttgatacactgtagtacttgataagtgatacatagacccagctgtgaattgggaggtcagagcaaacaaaggagaacaaattggcttgtcatttcttctgctcccaccgtcgtagcaaccgacgatccaatcctatatgtccaaattcgcagtggttgctacatattgagatgaagagagtacaaactagttatataaggtttactttgttgagcccaaatatcgatagttatgtgaggttcactttgtgggacccaaatattagtggggtggtgcttgtgactctgtctagcgaacatttcttgcttccatatcccaaattacatgctattccggagttgaactccattgttgctcttctagtgaacaattaacagcaaaattatagcccttaagggtttattcggtttggaggggatccggtttggaggggatcgaagagtattagaggggatgtggaataaatct

SEQ ID NO: 2440 - DNA, 2455 bp, Oryza sativa
caagttcagcctgaagtgcaggaaccaaaacagaactacgccaaattcgtaccctcatttcaaaatcatccaatgagccaatgtaccaacggcacgaacgtacgattacaaaactactatcatctaaataattaaaggctgccactgccacggtcctgcaacatgccggatctaaacgtatcgaaccgtttgaaccccatccataaaaaccagacaataaagaaaaggttaaagacaagccgaacaacaactcaacaagcgtttgaatctcctgggctcacaggggaaaaaaaaaacctccagtacagtaattactccaccaccctactgtgccccccacatgcgctggcccaaatagcaaatccatactactcttccgcacaaaatataaaatgtatatagaggtttatatatataggccatgtttagttcacaccaaacttttcccaaactcccaattttccagcatatcacatcacattcaaaactttcctgctcacataaactctaatttttttttctaaactaccaacttttcccaaacttctccataattttaggaactaaacacaaccatatgtattacttctattagaaaacgttccatcggattatattgttccatcggattatattttaagactagcacaacccatttctaaatcatgagagcaagtttaatagtatagcccactgctaagtgtctaggtccaattcatttatagccaatctaataaccaatttataaaatagttgtttcctatactattagtatatggttctacctgtcatacatacattacgtctcgaagtccgtgctgcagctcgctacaaatatgtagcccactaatcttctctctcatattctatcttaataaaatatgtttatatagctagctaatagtctgctattgtatttgctctgagccactccgatgaccaaatcttgacacgtgtgacgatcccgtcggccgccgacgctgttgctgcgccggcctcccgcagcggatggacgcgtgcacctctgcctatctttccgcgctcgatgcagctcggtcaacttcgcggcttgccccctgaagtttcaaaatattactcctacgagttcggggggtgaaacttgaaaagctttgcctcgtggatgccgcgtggcccacggccacaccgtcttcctcgggccccggaagtttttcaaatagagggagccgttgcgcttgcgcagcagccacacggagagagaagggaagcagagctgcgtgcgatctgagtgggtaggcggtgacgtcggcgagctcgctcgggagtcgcggcggcgatggcggcggcggcggagggcgggaggcacgatcaggggatggcgctgcgcaaggccgaggaatccggtgagcagctgttcgtctcttctccctctccccgtctctcgggtgtggcatttttctcgctcgcgcgatctgcgccttgcaatgcgctcgtgctgtgcgtgtgtgtgtgtgtgtgtgctggcgtctggatcattggatggcgtttgaggcgagacgcggcggcgcgggcggtcacctcacctggtgtactgtgctgcctgctctccggcgcgcgtgccgcgtcggcggatgcgcggtggcagcgtgcgagatttgggttgagatcattggtgtgatttgtttagtgcgctacttgttgcaattaaggctcctgcatatggtaagactcttgcatgcgccatgagtgtggttgaagcattgagcattgacctgggtggtttgcgtttggttgaagttaactttgagatgcatttagtagtacacgcgacattctcgtcggtttaatcaataatcaggagttgcatttggtcatttggtaatcgcgcaaagcatggtggaaaaagaaatgcagctcgaattcaggatccccaaaatctccgcctcttctgtttccgattgactcagaattcaaaaagtaaatctgcatcacggggggagagaccatgttcatcttctgcacgaatcgcgaggcaaactgcccctgttgccgatgtggctttccgctgactctgttgtgatctgttgccgcagccgcgcggaggtgcgaggcggcgcgatggctgcggcagatggaggcggcggcggcggagtccctgccggagaggccgtcggaggaggagttctgcgtggcgctgcgcaacgggctcgtcctctgcaacgtcctcaaccacgtcaacccgggcgccgtccccaaggtgcgttgcttaagagttcaagacccaaacaaaaaatcgatcggattggaagtcatttttttttttgaaatttgcaccgtatccgtggtagagttggaatctaacgagtgctcgtttgcggacaggtcgtggagaatcccattgttgcggtgcagtcgtctgatgtggcggcccagtctgcgattcagtatttcgagaacatgaggaacttccttgttg

SEQ ID NO: 2441 - DNA, 14789 bp, Oryza sativa
attcctgcagcccgtctggaatagaacaaaatctgaaattaatctccagccagggttccaaaagttttgataccacagagagtcagatatcactatgagtagagaacacaaaaatggcatgctttatctattggttgatcatattagtagcatattttatctattaattggtcacgaaacgttttaaatattatcataccagtagtatggaggtagaaatgaaaaggggaagaaattgaaaccttttcgtggaatgaacggtttactccccacaatttctttgcatatactaacacggaacttttcaaccattcaggtccaacctgaattttggatcttccaaatttcatctgaggtttctttacctcttgaatacatatgttacatattagatccagacagtgaagagctgataataatgcttcacttgactgagcatcaatagttgactttgcaaaaagttctgaaactgagacctctacagaattaacgagaatctggaagaggttttgaagcttcattaatatattggacatcgcaaatgctcctgcagtgcatcaggtttataagacataatatcaagcctgtcttaacttaatggcacaagaaaagaaataacaagtactccttccgtcccaaaatataagggagtcagtccaaattcatattactaggatgcgtcacatctacccaaaatcctttatatttttggacggagggagtattcatgtaggatgtgcataaaacttaaaaaagcgtaaaagatattttataatacaacagtgtcatttccatatagtattgttcttccactgtattctaaactaaaccaaacaaatttccattaacaatcaattaactattctgattaaacattttccagtccacataaccaaaaggaaagtgcaactgtgacccccccccaaaaaaaaaataataataaaataataataaataataataaaataaaataaataaataaatcaacagttcattggagatagtaaatttgttgtttagtgtgttgtttcatgaaaaagctagcaagctagaaatgcatggtaaacaaggctaaattgtaaatgaatatagattaagttgagtggtctgatatgtttactgcagagctttctctggttatcttacaaatgaatttgaatttaaggaggcgtagcaacataaattgaatatcaaattagggaccaataaaacatgggaaacatgtagaagacttactacttcctgagttatcttcatcaagagtacatttccaaagttccctaccagaaagattatgaacctgtagacgattagaaaatattctgatcattccaatatgacaaagaaggtgtttgatacagatacattgctgaacatgcaaattttctgtttcactaagttagttgctatagctccaactaattttaagagtaaaataatataaaatgatgattcaactgtacaaaccagtcgatttgatgcatcaccattttctgttgcataagcaacctgagaaagacactgcccgagcccactaaggacactgttaagtttactcttatcctggagatgaatcctgtcattgctcagtacagcaagaaagttgttgaagacctatcagaagaaataatgaaactgagattattactaggtatgaatgtgctaaatctcacataaatcctagcaggaattagaagaagtttcaatagcatatgccttggtacatataattagttgatgaaagatagactatgaaatattttatgttaatttaacacctcccatcttctgtaaatagagataaaaggaagaagggcacatgtcaggggcaagtagccaccaatacattgcctcctaacacaagaaccttttcaactttcaaaacaccaatacatgaaagaaacccattcacctgttcagcgtatcctggaaaggaggatgggaaattaataacaacaagctccaaaaatctgaaagacattaactggatatccatggatagatgggtcattccgttcaaaatattggccatcagcagaaacagtgtactgcgtgtcgatattgcattgtcctgccataaatagataccaattgtctcacatatgcagccaatagcatagaactagaaaatggaaatgatagaaggaataagatatggaaatccattagtagctagaagagcccgtatggtcagcatgatgaaactaaaatagacaattgggggaagaaaaacagtgatcaagttaccaatagcttgtgaatcatagcaacctcgtgagatctctcacgaattcagaaataactggcaagaagtggggaaatacctctttcaaagatgggaagacgagagactgcagtatactgaacaaggattcacgaaccaccttgtcagtgtcacatattctttcctgtagcttctcaacaattgcaaccttgtgaagtttaagctctgatggatgcttagcaacaagatcctttatcccattcagcgcagcttcaacaaaataacataacaatgcagcccaagttagctagtctcatcaagcacaggccgaatcgatcgatcgaatcaactgtttatctggccatctgggtggcagtccgcgcagagactgcctatcggtggctcacctcggcgcacattggcattgtagtggcccgtctgctgcaagagctcccgcagcgtgagcccgcgcttgttcacggccatgccagccctctccgacgccatgctctgctccggcagcacgatcgctgcaaccacacacgcgcacatcacaatccgaaaccctaaattacgcgccctgctgcgaaaacctcaggccaccgagggaaaaaaaaaaaaaagaggcgcccgcagctcacctctggacttgatctccgtgtcggtggcattcttcggcggcggcagcttccgccccaccttgtgcttgtacttctgcgagccacgaagagaaaaaaaacacacacacacccgaacaccagtgagctcgtcggagcgggcgtcgcttcagttgggggaggggagggggggaactcaccttgaagtcgacgccgccgcgctgcttcggcttcgccttgggcttcttcgacgaggaggaggacgccgcggcgccgcccttcggcctccccatggcgcgggcgcgtctctctttctctctctctccgggcagcgcttgctgacgagacggcggcggcggcggcggcgtggtgggggttttgcgcgcgacgggcggtacaagggctaagcccccgaggctgcgggccgtggcggagacggtctctcgttcatgggcctcggagacgtccctccccctcgtgtactcccggccccagaaaccgacgccgaaagaagcccacgttagagtccggccttctgggtcgctcagaaacccagccgagcagtgtactgggctgggccacgctagtactcaagtcttccctaatactgggaaatgtttctaatagagtcagggtaccaagcagtaaatagatcgcctgttaggtttaattattttatgattgatgaagattttatatcccatagatcctacttttctgtgtaggccatagcagcacactatagtgatgagattggtaggtataccgtatacaatgcaaccaaacttacgcaaatagaaaatacttatagaattttcacgtactaactgtattaggaaagtttgatgatatgcagttggggataaagacacatgccgagccgaagcgcggaatcgggggtggtctcgccggtcgccgccgccgttggccaaattcgccaattcgggctgcgttgaaccggcgaaaacaccggtggagtcgcggagatacgccgcttcaccgagaaaatcacagggcgcgtttatttgtgcgatcgtgccaatgccacggacgcgcgagccaccgcattgtgagacggccgcgacgacacccgtacgtcggccgtcgccaccggtgacgcgcgcctgattttacccaaccgctcgctctgaaccggcgtggaggcatcaaaccaacgggtggcagtgaactcaatcaggcgagcgcacggtggactccatggggagtagcaagaatccctggtagtgaaaagtctccggcaaatcgcatccctgaccctgaggctgaacaagtgaacaacgtacaaacctagctggttaattaactttacagcgattttacagtgggcctctcggttagtaaaaaaaagctttgccttacgcagaaccacttggtaattagttcttttttatccctgtgagatctgtacttctctactcgtgttacgtgagtgcgcgcgtaattctttgacgaccgggacgaggggtgtggggttgggatcggcagccgcgcgcgcgcgcgtcgtacgatgagcgggcacgtggccgcgcgcgaggccggccggccggcggcgacgacggtgcagcacgccgacttgccatgtctgcgtgcgtatgaatacatgtggattcggtcgcgcgcgaactcgtcgtctcgtcgtacgtccaggcgcgcacgcagcagagaggcagcgagctcatctcccgaaagccacccaccaccaccatgcaccaccactcgtcgccagcaggttggcacttggggacttggggcagaacgcccctcgtgcgtgtgcatgcccgcccccgggccccggccacggccactgctgagtgcacacgaccgtaccctctccggctctccctgtaacaaggctgtaaattgcaccaagttctctatcttcaaagtcacgtgattttatcactgacataattttgataatttagagctattttggattgataccaaaatatgccctaccaatttattagtaccttaaatagtaatcatataggtttggattgaagccaaattgttagtcatacctatgattaatttgtcactaatctagaaccttcttctctatatcatcaatacttgtcatcatattggtagcaatccaaacatatataatgaatctctacccaaccaaaaaattgatagtaccaaaacatgtcaagaatttggcactaccaatgatttggtaaggtagagatctaaacagcctcttaaagtcgtgtgactttatcgctgatatgtgaacctaataaatactacatccgttttttaatagatgacgccgttgatttttctcacatgtttgaccattcgtcttattaaaaaattttatgcaaatgtataagatataaatcacacttaaagtactatgagtgataaaagaactcataacaaaataaattataattacgtaaatttttttgaataagacgaatgatcaaacatgtgagaaaaagtcaacagcgttatctattaaaaaatggagagagtattggattcatatgtcagtgacttgtgactttgaaggtggggtatcttgatcaatccccacctcaccaactgcagggcgggcaagcaggttgaaaaagaaaaatacaaagagaacccaagtaatcaagtggtaatataaccgtggtctgagtcctctgataggtaattaggtagatatctgatgctaccggaaatcaatctgcaatctggcatgcggagcggacctcatcattttctcagttaagtggctaattaacgcctgatcttttccgggcatttttatctgaatccgatcgataatacgcacgatgcaattttcacaggtactccacagtgtccgtcgatcggcatgcacgtacgcatgaatcaacacggcagcttttcgatgggtagcatgttaattaccaccatggccaaccgacgttaatttgcatcaaaaggggttaattagctgccagagtgacacgtcgaccactgaagctgtgaagactgaagaatcatcccgctccatgatttgccgcgcccatcgaagcttttaaacgtacgatcgacaaggctttgctttttttttgggtagcgatacttcaacgagagagaacaatacttccatcgttttgttttcccacatgatgatgttttgcacaggtattcagaaatgatgcagagcaagtgcagaatatacaatataatgcactcttggatactttggtgggtgtagccttgtatatatatgttcagaaaataatggttgatacttacctccaggcataatcaggaccatgggttaaactattcctagggcttggtaaacaaaaccatgacagatgtacgggttagaagagatgtctttaggccttgctttgacagtttgactgcatatcaagttatgaaccctatagctaagctagctagctaaacctgcaatgcatttgcactgtatatcttcttctataaaaggcctacaacccccaacactgcatcctctcccctatccgtcttcatactaacaagagtacgtacaagatttcgtatcgatcgtatagagagatcgaagtcagaaagagagaagagattataagttaatttcgccatgagcagcagaaggactagcgcagctaatcttcttgcggttgccctgctgatcatctccttgctgttgttgcctcttcttcaccttcccgttgcccatgctcgccatggtgagttcaatcttcattctctcatgagctaataaacccatgtgtcctagctatatcgtttgctaataatccgtcgatcctgtgctgattgttcctgcagttgctgtgctgaaggctactgacagttctagtgccatcagcatcagatcgggacatgtggtcagtgaacacacacacacacacacacatatatatatatgcctcaatatcttgattttctagtaggcatcgcatctgtacgctgtactcatcgatcctactgaactttttgcattttctggacgaatgcttgcaggagcccaccccggcgagcggagcagtgcagaggaggccagctagctccggtgcaagtaaccgcggcggcggcgggcggcggcggcgagcggcggcaagcagcaggagtacggtggagatgcgcgcgtcggcgtgggcgaagcccccccgcgacgaggtcgccaggatgcacgagatgctgaagagggactacgcgtccaaggcgcgccgccgctcgccgatcaacaacggcgagccgtcgctggaggaggaggacctgccctaactaagcttcagctgcatattcgtagtgtagtgtagcgtagcttagctatagctcctctgaaagatctgaactgacacacataggtagtacatacagttattactagagctgctcttttagttagcaaattagcaggcaggatagtgtagttactcctatggaataacagcctttggtttagtatagcatccaagctggggcgtcatttgttagccctgagagtcagagagccatgaacaaacagtctgaaactgggcagttttgtccctgatgatgctcatgcttggtgctagctaaagcttttagctagcttcaccctgtaacatacataaatgtgcaccagtgtgtcaggtttgcagttttagcttgcagatattatgtcacaggcttagtgatttacatgcatctttttgtgcctcctgccttgctcacatggtcacagagagagagagttacagactatggcgatttgtgttcttctgaacagggtaacacagtccagtttcagttttacagtctccagggatgctcatcagctacaatacttttcaccaagtataccttcatttctcactctcaatgcaaattacaagccactaccgaatccagacaagccattaacctgctatagatgagtaaaaaaaagagagagcaggacatggagggaggggggcagcaagaggaggggtggtggggaaaggggagaaatgagcaacattttgaatgaatttaacacggctaccacgacgagctcaggggcgcgacgcgaagagctgatctcaaaaagaaaagatatgcgggagcatgcagattcagaatttacagcagaggattctataaccccaacctcggtcccgtctcaagcgcctgcggtccgctttcgccatcttcacagggctgctgttccactctgtctgtagcctgaaaaattgagaaagaaaaggaggagcttgatccattagcttcatggagtatatgggaagcataaattctgaatgttatgtggattggccaaagagaaaataattcaatggttaatctgcttttccagctaagatctcagtctgctgtgtttagataaaaagaataagcagatgacaccatttggatgtgaagagaactttgaagctgcttatagagataggaggggaagagtgacaacctccctataaggttgccttcctagaaaacctatgtttcctagcttctgacttctagttccttttctagattctatagctatagattcctagaatctgagtgacaatctgtactgtttgggggagctagaaattccgggagaagctgtagcagctaaaaactccccaacatggccatatactatttacctcaagagttttcttgtgcaggcaaatgaatgattccaattaatggaacagattgggtggaaaatttatgtgaaactaacagaggagaggaaatgcacacaaatgtgtaagaaaacatattaagtaatggttttctttttcagaaaggtccacagaatatacagtacgatccattcacagttggctattttcctgatctcaaagaaaaaggccgtccattttcctttgaaatagaggggtggcagcatgactgttataaaaagcaatagcaatgcaggcaagggagctactctactctgagaaaatttaattgaagtgcatcttcacttacactggaaatgcgaaggaccgagtacttgttgtgctgctatccgatcgaagagaaatgtttccagaataaggtatatgacctgatggtgttagtggacctgatataatgctaggtccagaaaaacttgactcaaagggattgcggataacatttcgagctgttacttttgcactgtcagcttcatttggttgagctacagattctgtttgcatggtcacttttgcactgtcaggttcattccgttgagctacaggttctgtttgcattgtcatctttgcactgtcaggttcattttgttcagttactggtcctgtttgccgtgtggaactcttactatctttgttgtcctcacttatatttgtgccatcgtttgcttctcttgggttgaaatcatgtccgtcttggacactatcgatctcgcattttggatcattctcacttttcgcatcaataggctctgtcttaccagttaacggagatgtacctgaactcgtcccatgtgctgcatcagttctaattccataaacgaaattatccacctgatcatttctatcttccgaaggttggacatacgacctacttggacttgcttcagtagagtctaatctactgtcttcatttctcgctccatctgtttcagtagaactaagtgccctgtcaacaggatcactcaaactgtctgaattttcaacaggacttctctgatcaacaggaatttttctctcatcactcaaaatgtcatcacttcttgcttcatctttttcttcagatgcttggacatcagtcatacttgaattttctacaacagaatctaatgtactgtcttctgcaatggattcaccagtttcaagaaaattaaatcctcgcagtgcaccatagacgatatcactaaaactgtctgtcttttcgacaggacagggcactgaataaacatcatcaacaattgtaggtagggagtacttggttcccacgtgtcctctaatgatccatatgcgatgaagggattatagtgattaatttggttgatttctgtcttatttagtgccacaccagaaacaccatcttcagtcaccaccccagagtggccatcagcagttgactcaactgataaaccattgacgttagtgatcgcagatgcaatactagctccagtttcatgggaatcatttgatggaacctgtaataagagtatcatatttagtggtccaattgtggagagaagtcatatgaatgctaaaaagatcatcattcagtgtgcaaactcatattttgaatcaaaaaaactcaaatatagactacagaaccaaaagaacatatagtcttatcataataaagatgaaatccaatcaatgacgatgcatgctgatggcaacaatgagttttaagaactaatgtgacaaacatattgatgattttctaagtgtctgtaatactgtaagttgcagtttacctgatcaactggttctccattgagatttggcccatgattttcactgctctcagaaacatctgcacccatttgttggcaatattctgcattgtcattacttactaattgtttgggcgtcgatttctcaacatttacaacagtcaatccatctacactactgttgccttcgagatcatgcaatttgcaaggatgattttgttccacagtatccccatcagtaacacatgcttcgggcaggacaactatttgcgattttaaatcattaacagattttgcaggttcatctgctgtttcttttatccgaataccatttgtatctccctttgaagaattcaggttcagtgacaccttttctgctatagccttctgatcagcaagtactccctcatcaatgcagacatccttaacaaactgaacgccataattagaagagaccattatatctggcaatttgatttccacaacatccttgtcataagaaacatcctcaggccgtatctggatggctttatctacattttgttgcccggccttcataaaactatattctgatggattggtttgttgtaccattgtatcaagcaaaatatgttgtttagtttctctttcaatttctccatctactttagggccgccattggatacaagctcatgaaaaacattactatggtaaggccttccatcatctgcaagcatacatcaaaatcatcaaccgttgagagagtgaacagagaagaacatgatttcacaacatagcaacatgtacaattctcaccattgattagttctgatttagacagtcaaacagtaactaaaactatacttgatgtctaagtgatgagacttttttccaaaaaatttttgaaaaggagaccttttacaatggaatgagcaaaagagaacctggttacttctgctgtcatttctctttcatttcagttgtactgtcatttttactcatttgcaaacacggattcttttggctgtgactgactcaaccatcttactgcatcataaaggtggaacataactgtgatagagacaaagctgtcttgttggttaagtaaggggttgttggtattattgaaagaacgtaataaataacaacccaaaacgttaattttgggatgaaattgacaatcttcctaccaaacatatcaaggttcaacaaatcaaatcatttattttgggtcacaatcaagtcaatttgatgaatgagaatttaaatgaaatggatggataatgcagccgtcagtagtcagtactgatccatatcatacctatcaataaagacatctgtcacagcaagtcactgaacgaatacatttttcatttacaaaacaagatttcataaaatgaatcatctactaattcttatgagggcattaatctccacaagtccaaattcacctcagaacatatcccaacgccatagtgtgagataatgcaactgtaaagactagaagctacaccgtagaaataagatcagctctttaaagccgcacaaactgtgtatcatctttaatcttctgttgatgaatgatgaatagtaatgttacgttcaaagcaaaccaatctctggaatatcctacaaaccaagcaatcaccgtgcttaatttctacagctaagccaatgtcatacagatacaaaatactcctataaggtagcagaagattgataggtgagagattcccttaccaatcttcatgatctgcattgtgtgcttaagtcctagtcatgcctcaaacaatttccttgaaaatagagctgcttatttcctgccaaaaaataaaaaaaaatcaatcaagagtcaatgcattgcatccggcatccggcatccagattacattaaaaagaaaacaacacacagacctaatgccgatgtccatctatcgacaaacaaatgccgtgctttgcgtaaaccagattccctctagagagaaaagccccccagcatcctgataaaaccacccactttacacaaacctttatacgagaagacagtacaccccaaaagagaggaagataaaaaaaaaataagaaggaagaaacaaaccaatctcacaaaacacaatgctagaaaaagaaaaaaaaaaggtttctgatgagcaaaggcgaaattgtgtgacgagtgacgaccagtctgtctcaccaaacgcacataggtacagaacacagcacgaacaccgaacaagaccaccactactagagactctgctacagagcagtacaaggctaactgaaaccacaagttttttttttccttcttttttttacacggcggagcagagcagagcagagcagagaccgacaggtatgcaaaacgcagcaagctttactagacgaagcaaaggatctctcttcttttttttctttttctgccccttctctgtcacgaaaggggagcgaggggatcgacgacgggcgaaatcagcggcctttgcaccgatctcggcgtcggcggcggaagaactctgacgcaggctttaactgcgcgcatcagatggtgtcgccatggggagtagtaaacgggagcagtaagacagtagcagtaggaggagaagaagacgacgactttgagaaaattttataatctttttttgttgctcttgccgttggcgaatggaagatgaaactctaatcaaccaaaccgctgatgtaaaaaaattccacaatccgtctcatcagttcataccgaaattcatcaaaagaatcgataagggaaaaaaacagcagagaaaaaacaggggaacacgaacacgaacaagatagccactctagcagccatcagccgccatgggcggcgaaggaaaacaaccaacaccgagaaaaccaaaaccaaaccaagaaaacgacgagacgaggaagaagaagatgaaaaaggagaaggatcaagaactgacctgagttcacttctctctctttctctccctccccggatagcaccggcaattcacttcacttcaccgcgtcgagcgaaaaaaaaaagtttccgggagaatcgccgggagcagcgggaggccaggccggcgaggagaggaggagtgggatcgcgtccgcggcgagcccgagaaccaaaaaaattctcgaaatatattaaaaaggatttcccgggcggagggtggagactttaataagcggcatgaagaggcagctcagtgcaataaattttcatggggcgtttttacagaaaggggcatgtgatttccccatatttgcagatgcatccctctaggtagcaacaaacaatgcccctttggatggagttttgtgggactattttcatcctagtgccttcgtttacaattctgagggctgttcagattgatgttatttttaattattttatttttgggtaaagttatcaaaaaaaatctacatttagtttattgctaaatttggtaaatacataagaaatcctgtcaaaattttggttatattatcatcttgccaaaattttagcattgctaaaatttgataaagtttattttggttacaatctgaacagacccttggcattctcatggagatggattattcaaaaggatgttttttaaattcataaacattgaaagggttttatgaaaatgatactacctgggatggatttggatccggtgcagtacctagtgtgactgcaacataagcagtcacactaggaccttttgatgcaaatcaaggatccaaaatctacgaagtactgttcacatctgaaaaaactgtagaactactgtagcatcaacactgtagtatcagatctagaccgttcattgaaaaaatggatggctgagatgatgtgcagttcctaacttgcagtcacagttaggactgcactggatctcaattcacttgggggatttggatccggtgcagtacctatatgcttatagtatgccttgcttggacacgagattttcgcgggtataccattgttttggaaacaacattatctgaagatagcgtgtgccatttccttgatttgtttcaagagcaacaatttcttaagctcatttggaaatgatttacaagaagtgattttttttatctctcttggaaatgatttgtatactactagtgttttctcaggtgtacactgcaaaacagggaggacaattaagtgctgaatcctggagatagaagagaattgatagcatttcatcagtaagaaatccataagatacaagtgcattgatagcaatggcgtcagttatactctacgttatacattgccacatcaagggacaagctaactacgtattgatggcataatctcaacaaaatacaccaaaaaggtgatccatcaaatatgaaatatcccaagacttggaccagccgaggagtggcatctgtcaagatctccctttcagaacaacactgaaaccgaaagatatcaagaaggcgatctctgaattttcagaaaggtattaaatacctttaccgtcacacgatctcatctagaatcatggtaagatagcatcataagaaaacatagcatatgacatcgactccaactaatagtaccctaatactgcactgaatattgttagtaca

SEQ ID NO: 2442 - DNA, 16906 bp, Oryza sativa
aggagacagctcggcggcattgaagtattctaaagcctaaactacctctatggaccccaatttattacacacacaggatccaccatgcttcaatttacctaggataaattgaagaaaaatacactagtggtagcttaacaagtgtgatcgatttacaaataatccttgtacgtgtttctagctctaggttacatcagggggagcaccgttaaagatttttagaaagatggaaaaaaatcctcattcatatgtgagtttagagaggttttctcccataatttgttgtagattttctgtaatttttcatttaaaatgggggttaaatgaaattgatttgtctgaataggacaaaaaaaagtgagaaaaatagatattccgtacccaatgtcgctatctaactataataccgttagaacacatatgtacaacggttaaagcgactatcatcgttatatattttacactataaatctaatatatagaagcaacatgaaaaagagacggcgctatggcgtttaataccactcttttttttccttcatgtcttatgcgcaacccttcttttttttctatttttttctctcattcttgtaagtaaaataagtgttatgagacgcctctttatatcaattgatattatatatgtcctcattatgtgcagtccacttgtcaatatgtaggagcaataggtttggaaagagttgtacttgattttgcttttgaattcctccttttgaaactataaacgcctctttcagtgacatacaaaccaagtacgtttatctactaaacacaatctgtcatggtaatgagaatacaatatacactgaactctagatgaaaactagagcatacatacaagtgacatgtcatttcaatagaaaaaaggagagagaatctattatatatggatagttctaggaatatatgccattgactttgcctcttttccgaatatgccatcaagcttcttatttagtctgcaatgttgaaactaccactagttttcccggtgaaatgttcttttacaaaaggggggcaaatgtctccccccttctatactcatagtcacttataaaatccaccaacttattttttttctccgataactagcataacgatattacaactttgacaaacttttttttaagaaatgccaaagtgaatatatatttcaatgtaaaatattactatagtaatttcgactacaaatcaaatgatatatcattgatgctaaatatttatattattcaaaataccgttgatcaaattagttgactctaaatagttaaacttatggacggacagagtatcatactaggacatcagagacgatcacatataagtaaattattaattccagaaatcattttgtggtgcccccaaggacaaggaggcccttttctgggggccaaaaagaaagggttgagaggaaatgatgccattgacttgtgcacctctaggcaagaggcagaagcaagaagggagagagcggtggtgcatgtaaacttggatgattggctgctgccgaggccactatggagtggcaacgatgaaacagcatttgcgctttctctggactcatctgtttgacctcagatggctcgccatgatgcagggcatcatgccatgctcccagcttggttttctgatgtgtgttccagcctacaagggcaggctccctggttccctctttcagggatgcagggtttttttttttttgggtgattgccatgtgtgtccatggtgtagacagtagagatgatctatttctccctgcatgtgtgctgttctatctggaaattggaactgtcccaattcagtgcttgtttctgcttattggtgaaaatagctccgtttttttctcatatgacctattatatatgctaaaaaaatactactggaccgtcttgaaatatagatgtataagatctttacatagttcgcaacattatattttgatcattagtttgttatatactccatattgtcaacgctataaaattaatataatataataatacattcaaatatataatgacatcacatacatgacaaatcaagcatatatataattattagtacaaggttacgaatgttttttctcttaaaataaggatgctttagtattttggaactgaggggttcagaagattgaaaaatcaccacaacaatcgagaaaacatagagagctgtaacattatttattgttggtggttataacgtaccactataaaccaggataaaatatcccacgctaaatacagttcagaaattccccgcaaaaaatacagtttagacataattaagattcgaactaaaaatacttttgcaacgatcatcatttttccatcgaagaatatacatcgcgtggagtaatgtaggagaccaaaggatcaataatttttcttttgaaagcagaaaagaacctactacgactactgcccccctcctgtttcttttggaaataggaataatcccattgagagccacagggcaaagcaaggcactactctagaaacagtagatccttttcccctcttgcggggacagcagaggggtagatctaagttctagctagggcgagctgagctgccctggtctgtgcaagttgagggcgagttgattggcactttggcacggcaggcaacacctcaaaaggcagaaattggcgcaagcatgcctgcaggatcgatggtgctgtgggccattggcataatacaagtgcaagcatggagctgatagcagctgttggacaaggaagcatgcatatccatacaattttgtgtgttaataatttcctcctggttttaaatacagatggcattgtcaacttttgaattaatatatgctttgatcattcctattatatatatcgtgtaaatatgtaaaatgataagtaatacttaaagtatacctttagtggtaaccaaaatacaataaaatatatggtaattacatacttttctatgagaggaatgatcaaattaatatatgtacagaaatcagaattaatagatattgatttgggggaagaaactaagaaaatgaatactttttctttctttttggcgttggaaacttaggtgcacatttggaataaaagtctactagatagttatgatgtgatatattctaatactacgaatctatgaatcgggataagaattatataaatttataatactaagatatatcacattatgtgatgattttttttacgaaagaagtagtatatttttcaaggttcagaaagttgaaatattccaatatacagtggaaacgtatggtttacgtggttcttttgttacctcgccacgtaattttcagtacctatcagctttgtcattcttttttggcatagtccaattggtaaataacctagcaacctccactacgtgcgattcgaacttgtaatttttttagtagtcttgcatacgcactggacacacctcgtcatcagttgtcacgttgctagctagctagaccttttttgacacggaagcgcatgcggatgggtgttaacgttgcgcacgtatatacgaaatcacacacgtacgtgacattgtgacaaccaatctgtggtacacatgcatcattcatgacatcaggtttacaaaactgacaataaccatatacagagttactatggtactcacgtttataccattaagacatgataaattttaaaaccaccgtaaccacactaaaattttaatagtaatttaatttttttaaaattgtacacggtttcttacggtttaacacgattacccgtccgtgacatacttcgtcctcatatactacaccaaccgtcgtacgtcatgacacatagcgataggtgtgtgcgtttgatcgatcgatcgatctctctcgcgcgcgcgggcaatagacttgagtactcgacccgatccgtcctttaattcttccgatcgccgggacaaagatgtgtactcatgtaaggcagtttcctctctacatctgatcgatcgcgtacgaactaccagccattgatctgtttgttgcccgcctaattaaggaactgttcctgcacggccaccaccaccattattcaccaacctacaccgctacaccttagatgtactagctactgctgtagaattgaagctagctagattgggaggacaccaacaatcttaatttcctttgtggaccaagcaattaatccaaaagaaaaggaaagaaagaaaaaggcaaaaaaaaaggggagggtaagagtggtgtggtacactacttagagcaagtttaatagtgtagccaattattggctccaaaacaactatagctaatataatagcccattcatacaatacttaactataaaaatatactacaccattaatatccggtcctacctctcatgcacacataatgttttggagtccgtgttgcaaccggttacaaatctgtaccgctttcttctctcttctattttcttctcgatatgctattatacctgctcttactattggtgatcgaatatcgatggatggatggacggatgggagaagtgcagtgagagtctgagttcagcagagcagcagcagtatatggctgcatgcccctaatcgagtagcagtcgttagtggtgcggcgactagagaaaaggctcctgaaaaaaaaagggcttcgcgcgtcgcatgccgctgcagatgcaggtgaggccgtgcggccgggtgcagggcagctgcacctcaccagagtccaccggccaccaccaccgcgcgcgcgcacgcacgcacgcatgatgcaacggcccgcgcacggcacggggaacagctttgctagctcgcgcgcggtcacgaggctggcatgatggctagttggctacgcgcgcccgcggccgcgccctcctcgcccgcggccgcttttgcgcgccgccaccatcgctggacgtacgctgggtttggtttgtttggtttggtggggtgggtgtggcccgtgtgggttgggttgggtggcgcgagcgcggtggcggggtgggcgcgggacacgggtactctctcccgagacgcgcgcgcgcatggatcgccgcggcacacgcccgccccggccggccggccggttaattcagcggtttgcacgaaaccatcgatagagtgactgacgagatctggttatggcgcgcagctggggcaaagggtatccaatgcttaatgccaagcaacaatagaagtgcaaccgacaatatgtaatcaatctagtcataaaacccgacgtctctctttgtagctacacctcaccttgcccaccttccttttttcctcttttagtaaaatcctagcctatccggctattgtacagggtttctctcttctttaatacaaatacaccccgcggggtttaaaaaaaaattagtggtttgatgcgtggaagtcgaacgggtgtatcagttaggattagagctagctaacatcaaaactaaggtggtgcattaccattgattggaaacctaggaaacttcaatctaacattgtgcattccaatgcttttaaagtgagaattcttggctttagataggctcctgtgcaccatataagttgaacgtgactttgcaattgttcctcggtctaacctaggatcaggcgaaacgtgttactacaaatttaaatataggactttttagattattagtagtaagatatatgtctcatccaataaagggggtactatattatgggatggatgaagtaattagttgtacgaaataccatgcagtatgctattagcatatgattaataaattattatttagtgtaaacttttaaaatatatttatttgatttttttaaggaaacattttaaccatataaaattttagcataaaacgtactcacgttattaaacgtggattagcccaaaccaacgcggccgtagctaggtgatctcgctgcctgcctgcctagctagctgctggcactctcgcgcgtggacccaaaattaatcaggaccgtacgtacgcgagagggaggaaaaagtgcgtcgccttttttttcccgatcgataatttcccaccgcccgtgccgatctgacgagagcgatgtgttgcgctgccattagcgatttcagcatgcgggtcgaggttgattgatcgaacgatcgggtattcgggtgggtggaaccgtggaagacgcggaagagatcgatcgactgagtgcgtgtcacagtcggattatcgacggatctgatggaaattaaaggacagtttgaatagtaggaataaaaaaacaaagcaatagaaaaacgtggaaatttaatttgaatgaaagtataaaatacaagaaaaacacgtgaatgatagtttgattgaaccgtaagaaacacacaggaatcggatgagatagactcaaagagaattttcccagagcctggccagagctttaatcttttgctaagtttcctttaaaatctctatagtattactcattccatatgaattttaatggattggatatgatttaatcatttaattcaaaaacattcgtaaaaattttctatagaattaaaatccttcaaaattcatatgtttttctccctattaaaggagttctaacgataacgattttggcgttgattaaacatgtccctgtcatgtctaggggtgattcacaggatccatttcctatgaccataaaagttgttagctaaaattttggacgtttatgtgccagttcggtgctgtgtctgcaggtctgaagaactggcatgtggcactgtcctctcgttcatcggccgaggctgaagccgtgtgattttttctcctttgacaagtgacgacatatgcctgcctctccaggtcaggcttaaagaagatggcattttcttccttaaagaaagaaaaagaaaaggaaaagaatatgacattttttttcttccaaacttccagttcagttatgctgccttttcacatggacacgcctttgcgtgaccacgctggtttcaggacacaggtgctgcagtacagttgttcatggagtgctcgcaaagaaagaatccatggctagctgctggccggctccggacacagcatgcattgcatgaaacatgcagtttcttgtgatactattcattgtctcattctattgtgatgcacctgatacactgtccggtaaaagactggctacgtagcaatcgcaagaaaaatccctcccttgatgacccataagtcagaacacgtccagaatcgtataagaacctccaacagcctcgtataagagtcaagaatcgcaaatgaatagtctaatttgcatttcactctaacggactcttttttatgtactatccaatctaaatgtgggtcccacctatcagcctctctactatttaaccccttcttcttcaccctctcctctcttctcttctctgctgagccactagccgaatccgcacgaggttggtggcggtggaggccgcgtggtgccattggtcgctgttgccaccaccgtccttgtcatcttgggcataggtggtggatgccgcatgtggacaggggacggtgacatggattcgagtgaacagcggtgacgcggattagggaagacgacggtggtgtggatttgggcggacggggcttgtgcggcaggggcgacgacggcgttaggccgatgaacaacaatggtggtcattcaaagcgtcacttcttctccggcttctcctgcaaggcgtcgctgccttcggagatctcactgccggctcactactccgaggggatcgggtaccacacctttgtcgggtcgccagagatctcgccatcccggggcttttgctgacggccaccagctctcccccttagccacgttgctcccgaatgaaggaaaagtgaataagaggtggtgggacccacatattgcaagtaggataggctggtaaagtttggcaaatgagggaaagagtttggccatccgtatggcttggagagtaagatgaagaggctgttggagtcggtcatttaaagttgctaaattttggcttgaagagtgggatggagagactgttggagatgctctaagcacatgaatcttttccttttgtctccctcctattagcgatgtgaggccacaagtgaggtaacctcgcctcctccaacacaactgcctccactacccaacacgctgctcctcagccccattggttgtcctcctccccaagccgtgcggctgtcgaagacgccacgccaccttcgtctcctaactactccgtatctaatgcaccacaatcctccaccgccctactatagccccgcggcttgaatggcgacacaaccgcccaccaccattcgtccaacattaggaaacctcaaatcctaatccataggttctttgcgagagttggggtgtcgccaacatcgaagaagacagggagtttaccggggacagaggagaaggagtccgaacatgaatcttgctgtgcggatacaaatggtggagaaatcataagaaatctccctctgtccacaaatataatggagtttgagggtacaggtttatctgcaattttaaggaattttgagtactacttgcatcactcaaccacccttcatttgatttttatttaattatattcctaattgtttctcatttattgagagacattatatccatttcccttaaccttaatctcctaaaaaaactaaaatgcattatatttgtggttgtaggagtacatttaatatatatccgtaccttttaaattatttgtaacttaattgaaacctatatatagagactgtctttcaaaattaaaattcggctcataaaaatcaacagagctagctagtaagttctaaaaaaaaaactagtgcgtccttactaattagtacttctagttaataaaatggtacggcgcttgattttcgttagtagaacgtctgcttccagaacatgctaggcataattcgatggggatgcgcaccatcactcgacgcagtatcaaaaaactctaattgagaatcgacttgtcaactaaaaccaaaaaggtttctgctttcctccctttcaagacatccatgccatttctttttccttatgagaatatatatatacactttagttaattattagcttctcctgattgaacctgttagcttggatagagtgactagtgaatccaacttgctaagtcaacacagcactatatgcttgacttatttaattaattgatttgtcatatgtgttcacatgatatcatgatagccgttaagcaaaccatgcatatgaatctagctacccggtcccaagtaattaacgaaaaggataaggtaaggcaaaatgtgctcactagctagatttgatctgagcaatcatttaggtatggatgagatgataatgttaattagtatattggtcctttgatcctttaattttttgtgaaaggtgtattaattagcactaatcttgttaagcagaagatgtcagtacgaccttaatttaaaacctttctaaaaagagaagatatcacagagctgatctgaaatgttgcaactattactactagtttttattcttttctctctaagtagagtgtttcctatccaacttttcacaaatccaaatctggctccacgcactactacaatacccattttccagtggtgtctgggaaaatcgcgattttcgcatacgggtgcttatatcacccgcacgtgaaaaacaaaaatccaaaaaaataaaataaaatttcacaaaaaatgaaaaccctagattggcgcggcgatgccgccgctcccggccgccgccacctcgtcgtcgacgcccgcctcccaccggcctccacgcccgcctcgtcgtcatcaccgcccgccggatcccgcgcctccaccgtcgcgctgtcgtcgctgtcgccgcgccgccgccgtatccgtgcggggacggccgccgcccgccagatcccgtgcctccaccgccgcaccgtcgttgctgtcgccacgccgccaccaccgcaccaccatcgccgtgggccgccgccgccgctgagaggcagtgagtgcagagagaatcggctgagaggagagagagagaaagagagagaagactttgggagctgaagagacttttgggctgagagaatcagccagataaaagagagagaggaccgaggcgcgcggaaaaacggtaaattttgaagtgggtaggaggaaaaagagagagtactatttttaggtgcggctcttttaatagatccgcatgggaaaatcggtttattttcccgtgcggttcatttaagaggaccgcacggaaattttcccgtgcgggcgatagcccggcgccggtccgcctatttttccgtacggttccacttacgaatcacatggaaacaaaagagggtagcgtccaggaaaatcaatccagtagtagtgacggttgaacagtacgatacatactccactaggaccgtactccactggttccaaaatggaaccaacttagtacggataaaacatattctagaaatacaaatctagacatgccacacatatccagattaatagtattagatattctcatttcgtaccagtgttatattttgggacgggatagatatagattgaagccatttcaaacaacctttgagtgtagcacatcttttgtgctagttcgaaaatatagctagaaatgtaattaacgctgaaattagcagatttaagtatttaattactccctgaaaaaaaaagcagtatcattcacatcacgccctattgtgaacatggagatttcagtaacagagaaaagcgtgtggacacctaaaatgccagccagccacagaggcagtatgtaggactgattaacaagggttaattattaggaggtcctacagataaaatggtccatttagtaaggccattggaggatggagctctcatcgatcctaacttcatgttacttttaacatctagaagttcacttcacttccaaagggcacaatagaaaaacgaagatgtaggcacataccacacgtacgtccacactcagattgccatgtgaggcgatccgtttgaccaattaacttaattaagcacaagagcttaattaaaaccaaggcctagctagctaggcataaactaagagcaagcttaatagtatagccaactactagctctaattcatttatagtcaatataatagccaattcatataatagttgcttactatactattaatacatgatcctatctgtcataaacacattacgtcttggagtccgtgtaacagctggctacagatatgtagcccgctgctcttctctctcttcctttatatctttaaaatatgtttatagctggtttatagcctactattgtacctgctctaattaaacaaagatcacccaaattgcatgcatgtgaggctggggcaaagtccaaccgggggaatgcagcgtgtgcatgcgaagagggacgcagcccaatcatttgactgcatccgtgcccccactgcaaggcccaagatttgagaattttccaaggatctgatcgatcgcagtcgcaggcaggggagccacttgcatcctctggaatgcccactttgtttaaggaaacaaattaagcagtactagttcgttaaacgtacacggtttcaggcctacccgcatgtacttgtttcgatcagagagacacgtgagcttagcttagcgttgcttaattagttccttgtggtttaatttaagaagccatcctacctagcatgcaatgcaaccggtcagttcttttcagctaacttcaattcaaataggttattgtcacggattatttcctcaacatctttagaaatgtggttttgtgttaaacaaatgtcttctacaattctactactacattgcttaagcacttgttttaagctattcatttttatatttctaaaaattatataatttatttctataattaaatacttccttcgtctgtccagatcgatccgttgtcctagtaaaggtcaaaatcccattgtaggtgacaatattttgagacgaagaaaatagataaaccataccaataacctaaagaaaaatttgttctgtacagcgtggagtcgctgagagaggaatggactgagcgtactgtggaggcacatgagagatgatgagatgctgtgtggttaaagttgcgtgaagcaacaacccccccgtgttgtgtgcgtgcttgcagttgcaggtgaggtcggtacggtgctagcttggcctctccgtgtttttctttcttttttcttttttttttctggcagcgtggcgcatgccgaattccccgagaggaggcaggttgggtttgggcgtttggctaagggattacctattcatttatcgataaatcttctcttaaaacggttcaaaaatcaacaaattccgaggaagaaatttgccaacagatttatagcaaaatagtttgggcaaaatatgacgatcaccaaccgagcgcaaagagtgtttatgggcgaaaaaaggtttgtaagcgagcttagaagcttactctatctgttcacgtagtattaaaatatggccctgtttggatcctatcttaaaattttttatccgtcacatcgaatgtttgaacatctgcatgaagtattaaatataggcttaaaaaaataactaattgcacagattgcaactaatttgcgagacgaatcttttaagcctaattgcttcatgatttgataatgtggtgctatagtaaacatttgctaacgacggattaattaggcttaataaattcgtctcgtggtttaccaacggattttataattagttttttcattagtacccgaacaccccatgcaatactctatataatacctgatgtgaatgggggtgttattataccctatataacacccccatatatcacatctcgtattaatttttttttgttttgtgatggaaggagcacacgagccaaggtaggcgccgacagtaaacactttacagcacaggtacgtgtctgtaggtagccaggtgggtacaccggtacaacctattccctccgtcctaaaataatacaaaccctgtgtttccgtgtacaacgtttgaccgtccgtcttatttgaaaaaattattaaaaaaatcaaaaagacaaatcacgtataaagtattaattatattttatcatctaacaacaatgaaaatactaattataaagaaaaattatataaaacggatagtcaaatattagacacggaaactcagggtttgtctttttcttttttagacaaagggagtatatatacacacatacacggggttcgtacgccggtacgcgtagcagcagcgtgtacgtacgtacgcgcatgcagtgtctgaatctgaagactgaagatgcctgttttggctgtatggtggtgccagatgattgaagaggaacggaagaagccaagccagccgcgcatgtgggcggcggtcatggaccgacggaattaataagaccccgctcattaaatcggagcgccagctgctgccgttgcctgccgctgctgctgctgccttaggagggtctcgttcggtataggtccggtgaaaggcaagggttcacacaaccgatgaaatttcgcgataactgattagcttttatgaaaccgctagatctcggtttataaaaaccggtcaatattgaccaaaagttattggtttttaccggttttcaattggatttcggcaaaccggtgacgagtggtttttacatcgaaatcgaaaagttaaacctggtgaaaagcactgaaaggtacggcgcggccggcctggtgctggtgcgggtgctcgctgcgcccaagctgatgatgatgtgccaccgttagcaatcgccgcagcctgtttgcccacatatgtactctccagcgaaatcaaggcccagcagttatggaccaaaatctccatctgccgattaaccggcgtaaaaggccagcgagcccacggcccagcagctatggcccacacgcacacaaggccatagggcctctgtacatagtacatgaaacaaagctgattgccacattgccagggcagcaagtcaggagctaatgaaaggattctgccacttcttttgcaagattgaaagaaaagagagagagattttgcgaggggaacagttattagtactaatagtttgcttatggttagtatttctggagtagtgtaacattacaccaccacttcatgtcataagtaaggtcacccaccactcgaccgtctttagagtttagattagaggggttctcaaaatgtactgccataagttatgtttaactagtgctgaatatataaggttcttcttacttgtgtcattctctgttccttcagttaatagttgatacggctaagcatggtttctacagttactccggggggactgccggactggggagcggaagtaattgtccaggactgaaaaagaactgataatttatctgcatatatgaataagcaaagtcagcatatttgaccaaatcaacactcaaaaatgaaactgagcatattattggtgttccaattatccagtacaattggatccagcaaacaaaattagtgaaggaattgaaattgcaatgtaaaatttaagtcgaacttcctagcagacatgaagccaagtctgccttgaatatgcagataagcaatatcgtcgattatatctcatatggagaaaaggagctagtggcataaaagcttcattccacacgctactagtcacatctgacaaaaactaactgaatctgatgttttttttttagtatgtcaaactccacattcctaattttagaaaaagtgtgatcatatgctgcatgacatggcccaaacatgtctgctagatactgctaagatcaaatgctggaaattaaagagaacaagaacaagaggtatctgattctggctgatgaatttcaggggtattagtaataagtaactacttgcaaactcacatgtttcctgacaccgtccatgaacaggaagaagtcttcatttttgcaggattagcatggagtaaaaacacttagccagatagaaaacagcattccaataaaaacatcaaacagaaaaaaagggtaagaatataagatgtggccaacacatatggtgagtaatagtacatggaaattacataaaataaataaataatcaaacaaaatactgtgagatattatgattcatgtttaacattatttccaaaagaactgaaaatgatataataatcgactacacagtaaacaacaagttgcaactattacagtttagttcaaaattctaaaatgaataagcaggtcccctgctcattgtcaggaaaagagcaaaagacacctaaaaaaatgcacaaaattgtttgtcacattgactaatgcatcataatggctattggttgagtaaaaaagaaacagatatgacaccatactaacattttgaagagaagcaccgtaaaattaatgagatgatgcataagcctgagtgaaaacttccataaaatccacatttcttccacaccataaccttgtgaggtctgttgtgacgttttgcttccatgttcatccaaaaccttcctatgtttttggtacaataaaacatggactaaagggtactaccaatcaaaggagcttctctatactgttacacaagaatatcagaagaacccctatacatagttgcaaaagtctaacagaaagtgtcaaaactaaattacaagttagagcataatgaacagtttctccaaattagtgcctgggtaacacaatctcagcgagtaaacatcagaaagagacactgagacactgcttaaactacgtagagaagatatataatagagaactgttaataagagaatgcttattggagttttaattaccatttggcctgaagacgataggaagtgcgggaaatcagcaatgccttcctggatgatcatcatcatcaccatcccttgatgaactccgtgacctcacccggcctctcctctcgaagtcacgctcaggatactcctggtacctcctcctgtcacctccataacgatcactctcatcccaattcctttcatgctccctctcctcctccagcactcgcggccgatatcgacccctctcctcatggccatgcttcctggacagatcaaacccatcacggccacggccacactgcctcctatctggataacccctctcattgccattggcattgccagtgtccccctcattcctaccacctgcaggtcttccccgccgcgccgtgccacgcaccgttccatagtctccattgcggttgggctgctgcattggcggtttttgctgatgccgcggcatcccgtaacctccaaaattccatggctgctgtccaacccacatgccggtcatccgctgatcataccacatccctgtgccacccatcgccatgccgctggctgccaggaacgctgggttcacatggggcgacatcaccgatggcatcatgctggtaccaatcgccgcattgcactgccctatcatcggcgcgaacccgccgtagccagcgccgccgccgcctcccaacatcccaccaccgaatggaagctgaggccgtggaggtggagccagagccggcggatcaccaagaggaggccccacattgccccgagctgtcgtcgagttgcccccgtggccgccgcctcggcctcggcctcggccgcgcgcggcgcgcggggcgtggacgtgggggtcatcgccgccgccgccgccgccgagggggagcagcgtgggcgggcaggagagcgaggcgacgcagtggcgcccgtcgaaggtgcgcccgtggagcgcggcggcggccgacgcggccgcgtcggggctgaggaagtcggcgcggcagaagccgcgggacttgccggtgagcttgtcggtgaagaagtggaggccgtggagcgcgccgtgcggcgccagcgcgccctccacct

SEQ ID NO: 2443 - DNA, 3217 bp, Oryza sativa
gggttttgggaggggacgtcgggtagtgggagggtggcgagagggggaggaagccgaggtcgacgtcgccgtagaggtcgtcgcagtcgtcctcggtggtgggagagggggcgtgggagtcatggacggcggcgatcgcctccgccggcgggaatgcggcgtcgacggcggtgagttcgccgccggcgtccatggggggatgggtgggtgggtttagcgtgttccgtttggttgggtgattttgttgagtagtgtaaaaaccagagtccaacagaccaacaggggaagaccagtgtagaaatatcaagggtaaaaaaagaccaagagtagattaaatactagctcattggcttactcaaatcatttctcaatcagtaaatataactaaatactttctttcctccagaataaaacaatctcataccggatatagcacatcttagtatgatcaatctagacatacttgtgtatatagattcatcgtactaaggccctgttcgactgttcgactctagatttggagataaatttttgttgcacacaaaacaataaatctcattagcacctgataaattaagtattaactattatgaagttgaaaaatagatttatttgttttttaaaacaactcctatagattttttttttaaaaaaacgcaccatttaaccgtttgaaaatcatgctaatagaagacgaggaagttaaagtttggagttgaagaataaaacagtgtctaaaatgtatcacataccgtacgaggttggtttattctggaatggatggagtaattcttattgaaatcatttcattcactaagcggttaagagctaaaaaatgtgttttgagagaagtaaaaagggggagtattattgctttatcatgcaaaacttgtgcgttcaatgagtcctcaccatacacaaactgcatgtaaatttcgttcaacggaactttcaaaaaaaaaaaaaagggcgtagaaatggtatgtcataattgagaactgccatactttaaaggattcaactatagttgttctttttaggattgtatttctatggtgtacaacatcttaaaaactttcctttgatttgttttctttttccgttgatattgtcaaagggtcttcgttgtgtttccctatcctgcatttaaaatagagccttaatgtgacaaaatatcggcttacacagaatattttggaccctttaatttatctagggaaatttcttttcttggtttaaaccgaagaatacgtagaaatggtatccaacaagaaaatgagaaaggcactgtccagattccagaaacaaccacccttgtaaatgagatcagaaagttttttttttccctttcatcagtaaaaggttctgtagcctacagtgcaccatgtgcacacaataaacagcaatcttggcatcctgccaagtagattaatgaaataagatacccatcaaaacaattgttattcagagcagacaggcccaaggagaaggcaaaaatgtaagtcatgcgttactcattcgtttgccaactgatgttttgccatcctgtagcgcatctaagatatcctggtatgaaaaatcatcgtcgcctttattcttggagccagacttcgctcctcctgactgctgcaccgaggcaggcacagttccatcaagagcactcccgtatgctccggatccatcagcagcattgcactccttgaacttggactcgctgtttgaagttgaacaaaccgcttcagcttgatccgcgaaggagaactttgatacagaggagcggcaaatatctctgtaggtatcatattttgccgctcgtgttttgcctccttccagtatagttgacaaagggtgcaagactgaaatagcactatctgcactctctaaggtagccttcagatccaagaaatcgtttacagactcttgtttgctgaattgaacaagaaccgcagtggaatcaatcgggaagactgatgtaacagaagctcgaccaaacactttgcagatgcagtcctttatatcctttggtctcaccttagactggaatccccagataagaatgacgttgtcatacacggcagcaggatatctacgcttataacctgcatctggtctctccgtgccagtactcaaatcaagcactgttccactgttccagcatgggggcagcagattgatgtgtttcttcagattaatgtttgttgctaggtcctccaggggagagagttgctcaaatttaatgccatgataagcacagagctgaacaaaaacacatccagtcatgaatgcatcataacctgcttcatgcttagcacctgaagtgaagcaagataacctgcagaataggaaaaaaaacaacaaaatagaaacatcataaatagtaccagttggtaagacctactagtgctactaaggatgagtataagtgtacatgcagaaacaataattacattatatttcaagaaataacaagaaatcatacactgtttcatctgcctcgacttcaattctcacagaaggaagggtggatgacttctcatcaggtgcatgaagtgcagggcacaacaatgaaaaggctgacgaaagtgatttgcttttgtgcctcatacgatactgaaccgcgtcattaacagacataagatgcctggtatctgccatatgtgggaacattctgttgatactcaaggcaaattcctccatggatgaaggaagaggaccaacaaatttgctgtagatttgtgcaatatctgtgtatgcaaataaagatatttagtagaagatcaaaacttatgctagacatcactcatcaattcaaagttggtcatctaccagagcaaattccaatacattcaggagaactgtgtgagagagagagagagagagagagagagagagagagagagagagagagagagagagagaacctaggaaacaactatgaccaacaatcaatttcctttctgaggcaagaagatcaatgacatgacggatccctactgctgatttgacttttgcttccctgctttttagtagatcttcccgaacatttttctgtagcaaaatagccagggtgattattgatcattaaaaatatctcaaatagaccatcatacatgtttagattggtgaagtaatctaaaatcaaagaaaaatacaaatgtaaatttcaaatgcgacaaggcatcatttgattctcagtcaaatagtaagcctggagcag

SEQ ID NO: 2444 - DNA, 1109 bp, Oryza sativa
cagctagaatatcatcagaagggatcaaaatggattgaaaccatgcaatgatgcaaagcaaccaaaaaatgtatactaacatgagaagttctattgatgtcggattctaatcccaacccgaaccaaccatatatgatccaatagtattttgtgctttggcttctgtctttccttcctcttggccggcaatggcttgccatcattgctaataacgactgagtggagagtgaccatgatattcatttgataaaggtagaacaatcactttgaaagaaaaacaatcctgtctttccatacatcattccataagggataagctaaatgcatagaggtttgtgtctcttacctctgccctttcctgtattatcttttcttttttctgctcctgagaattgtatgcaggatatgaaatactgctcggatgcctcatcacggtggtgattgttggggtagtttcaatttcgtgccatcttagaagaagagcacacaacctgaaacgatccaagaaagatattggtaatttcactaatcatgcaacccctttgcacatactggtttcttttactcagtaatatcgcaatatagttcatgcatccttcttgcagaggtcactgctgtatctgttgagtatgaggaggttacctgcaaacagatgtgtaccaaagagatttacgacgcaactgaaaacctgagtccactgaatgtcattggtcagggaattgcaggtaaatgacaatattagtcagttggacttgaaatccttattccatcatgcagatgcaatacataattgtgatgtgagaaaatgagatatgtaagataatagccatgtttaacgggttatttcttgccctgaaagtgggatgtatcttctttattatgtgatttttcagggaaagtgtacaaaggagtgcttgcaaatggctggcctgttgctgtaaagcacatcgttaagaacgagcatgcacactctttcctaagggaagttacaagcctctcacatgtgagacatccaaaccttgtgtcactaagaggttattgcgatgggcaggaggaatgttttcttgtatatgagttatgtatcaacggtaacctgtcacaatggctat

SEQ ID NO: 2445 - DNA, 647 bp, Oryza sativa
gcagtagctttaataaaccaagtagcacagataagagaaagcaccttcacggaagcatgtgttgaaatcaaactggtactttgcaaggaagtcaatcgatgtggtctgacacagaaattcatgtgttgaacaatcattcaggggctcattccgagaaaagataaagaagttatgcctggtaaagtgagaagaaatggttatgtcttgggaaagaatgtcgatggcagatctgattgcgaaacaaacaaacaaagagatattttatggtgcttcaaatgtactagaagtaccttcactttcagaaatatcaaaggttgagatgttttacgtgttcttgaaatgtactagaggtgcctacactttagagcgataaatggctgatatttcttcaaagtggaagtaactctagtaacttgcaaggaccgtaaaacatctcatcaaattattaaaaaaatgcaaacctgccataccaaaactctctccagaagggatatggagagttatagtttataaaagaaatttgcctttctagagagcactcattcaataaccattctaggttttctgagttcctgatcaatttttcttgggtgttgtcttactccgtgctctgtgagcataattgttgaataccagttaacttctca

SEQ ID NO: 2446 - DNA, 560 bp, Oryza sativa
aacccctttattcatcctcctcctccctttcctgcctctcctatactttctctacctgtaccaggataccaagaagcagcctgcaggttccaatggactcaagtcctaccctgtagtcggcacgctgccgcacttcgccaagaacaggcacaggtttctcgagtggtcgaccgacgtaatgaagcgcagccccacgcacaccatgacgttcaaggcgcttggcctcacaggcggcgtcatcacagccaacgtggccaacgtcgagcacatactaaagactaactttagtaactacccgaaaggcgagctctccgtgtccttgctcgaggacttgcttggccacggcatcttcaactccgacggcgagcagtggctgtggcagcggaaggccgcaagctacgagttcaaccagcgctcgctgaggagcttcgtggtggacaccgtccggttcgaggtcgtcgagaggctgctgccgctgctggagtgggcgcggcgcgacggccggacgctggacgtgcaggatgtgctcgagcgcttcgcgttcgacaacatctgccatg

SEQ ID NO: 2447 - DNA, 736 bp, Oryza sativa
caacctaatttggaagccctgggctcctcgcaaatgcaaaaccttcgcctggctggtcattcagaatagagtctggacctctgatagactatgtactcggggatgatcaaatagatccatatgtcccttatgtcgtcgggtccaggagacggctctacacctcctcgcaggctgctgctacacaaagagaatatgggcaaccctagcggaatggacggcgtgcaacaatattcaccccaaccattgacggcaggcttcgtcggtgttagaatggtgggatcaaaccacaagtgtaaaagaggcacccaaaaaggctctacgctccctaacgctcctagtcgcctggttgatctggaatgaaagaaatcgcagaatattccagcataaggagctcccaccgagtggtcttctgacaaaaatcaaggacgaggccgagtggtcttctgagaaattggcttgttccttagttgactagggccaaaggtcctgagttttttcttttccttttcactgtacagttttctccttctatattcaatgaaattggcggctcgccgattcgttaaaaaaaaaaatcacgggccagtttcttgctcctcgtccagcaccgccctatcgggcaagggtggcagcctgcaggtactacaatagttggagctcggcacagggctatgcattggctgaggtggagtccatgcgggcgtcaaggccgccaccatcgccgctagcacatttt

SEQ ID NO: 2448 - DNA, 4879 bp, Oryza sativa
atataccctttcttcaacttaatccatggcaggccaaattttttggtggtttcctgacggcagaagctgtgatcagaaagatgaacaagcttctgggtatcccagaagacaccgaggaaggtgctccatcgaataggaacccaccttggatatggtgttgcttgaagtcttaccgtctggacaagaacgatccctggggaagcagaaggtatcggatttttggcacagagatcagggattgaataggggagaaagatttggagcaacttggaaattactgtgtacagtggcatttgcttgtggtacagacacgcaaattgactgagttgtaacagctaggtgacagcctttcggttggtgctactacctacaatgttactgtgatgctgttagcatttggtaatgccagatgatttattttagtttaatcaaatgaattatatgtatcacataaaacttttaattgattttattaaaattatcaactggcataaacagaatttcctctctcccaatctggaaccctaatagaacaactctttcaggaatttgaaaagaatactagcagcaattcagtactcttcttaacttaaaatatactacctctgttttatactccctccatccctaaatgtttgacgccgttgacttttttaaacatgtttgaccgttcgtcttattcaaaaaatttaagtaattattaattctttttctatcattcgattaattgttaaatatacttttatgtataatatagttttacatatttcacaaaattttttgaataagacgaatggtcaaacatgttttaaaaagtcaatggcgtcaaacatttagggaatgagggagtattatttaacactttgatttttcttaaagccaaacttttttttatctttgaccaaatttataaaaaatatatattaatattttccacataaataaagaaactatcaaaataaaaatgctataaatgttgctatatttttctataaatttgattaaaattttattaggtatgattttaaaagaatcaaagcgacttataatatgatgaagtggagaaagtagcaatataggttcagattgaacacaacctgaactacgaatttaggtaagggacatattcaaattcttaatgaattcagataggagaaatattcaaattcgtagtgttatatttaggataaagggagtaaataacagtataacttccatagtaatagagaatttttcgtaatctaaggctggaagtaatgtcgaagacaatgaaaaaaaaaaggctaaaagcgatactagtactaactaaatgcccgtgctttgctacggttaaacgaaaatgtattaatgtggtgttcatctttttgctaaagggaatgttcatcttaatctaatttttttgtgtttatccatttagatttgaatctgttttaatactaagaagttcaagtggtaacttgcaaaatttacaatggaagtaggtggggtgacagattcactgccaccatcgttaccttcttttaaactactccctccgtttcaagttataagatgttttaactttcgtcaaagtcaaactgattcaggtttgactaagtttatagaaaaaaaaattcgatccaagataaatttattataaaaatacatttaattattaatttaataaaaactaatttggtaatgtaaatactatatttgtctataaacttagtcaaatttgaaacagtttgactttgactttaaccaaagttttataaactgaaaacaaatatagataaatgcaagtagcgtccacttcacctctcttctttcgacgcggatgcggccgtccactggataactcacggacgtctggggaaataactaaccccccgtgccgcctaaacaacggctaacgtccaccccaatccacgcgacgctatacctcgcggttctcccacttctccttcctcctccataaaccgcgaaagaaaatggaagctctcgctatcggatccgcacctccccgcccgccgggcctcgcactcccacccctcacccgtcaccaccacctcctcctccaccgctccaaaaccctagcccctcgccgtttcgtcgccgccgcgcccatggacgccgccgccgccgccgccggccggggcggccccgcccctccccgctgcgcccgcgccgagacggtaattaagctacgatcccctcctccttgccgcctcggagctggatgccactcggagaaaatctgtgagaggtttattaatttgggtggcttaacttatcgttgcaggattcggaggatgcggtcgcgacaacaagctcgccgcacttccgccgaggccgcgggcgcggcggagcagggaacggggccccggcccggtggcggatgccgccgacgtcgagggggttgacgggataaggatccggaggcgccccgtgaccgggccgccggtgcactacgtggggccgttccagttccgcctcgagaacgaggggaacacgccgcggaacatcctcgagaggatcgtgtgggacaaggaagccgaggtttcacaggcacggttcatgctttttttttcctactctccgaggagcaaacaatgtgtgacagtgtgtgtgtgtgagagagagagagagagagagagccagtgtacgctactctcggatgtgaatttctggaaatttgtggctctggcagatgaaggagagaaggccactgtacatgctgaaggggccgctggagaatgctcctccggtgagggatttcgttggggtgttgaaggcgtcttttgatcggactggtctgcctgctctgattgcagaggtcaagaaggcttcaccgagccgcggtgtcctgagggaggacttcgagccggtgagtttggggggatgaaaacacatgctaagattaggtgtatggatctttaaatgttaccctgtatgatatcggaattcacctgctagatggatgtgaatcatagttggtacactatcattgcagcgagtgtttgttttactaagttatctgtagaattttagcaatttaaatctgatatttatttagtgaactggttattacagcctgattggtaacgattgatcaatttatctcctgtcatacaacagaagggtagaaatgtcatggtgactgtccttttatttactttaagggattggaatcgatcatttcaaactttacacacacatattagctgtgcgctcgctgaaatgttgcagaatagtcattgtctttatgttgaataacatatatttataatggtcatagctctatggcattccccctgataccgacttatctcaatcttcaagcaacaaatttttactatgttacatagaatttcatgatgccttccttttatcttttagttgtgtacttatggcactaccactttaattgcgtaactaccagttagtgatatcttcatttgttgacattctgaataaagattcatgcttttgtcttaaagaaacaacttggttacttttcatgtgtaagaagaaaatgcacctaaatagctaactgatgtttgtgggggacaaacaggttcagatcgcccaaacatatgagaaaaatggagcagcatgcttaagtgttctcacagatgcaaaatactttcaggtcagtaatcttttcccttttgacaatttggctactcctctgatgcattacgaaattatgcatgctgaatttgtttccgtttgttatgtaatcagggaagttttgactatttggatgctatacgcaatgctggagtacaggtctgtaaatttgctcatatgttgtacttccacttacagcagtcaaggaaattcagttgtgtggttcgaatgtatggaaaggctcattctcttgaatttctaaatgcagtgtcctctgctgtgcaaagagttcattgttgatgcctggcaactttactatgcgcgtttgaagggagcagatgctgttcttctgattgctgctgtcttacctgatcttgatatcaagtatatgttgaaaatatgcaaaatacttggcatggctgctttagttgaggttagctgagttatttgtgatatgttttacatgtcaaagcacttccaactctcttatgttagctgctttggagtcattctactagtgttgcaacttccaattcattttcttcttccaagtaaatcaaatgcaacctcaatattcaaattttgatttaataaacaagctaaatgtgttctgaaggtgcatgatgaaagggaaatggaccgtgtgttagggatagatggtgtccagctcatcggcatcaataaccgtaacctcggtatgttattcttgtttcacatgtttagacaagttactttggcacatatattatataacaatgtatggattcaactgccagtgtgaccacacaattctttgtcagatttgttccctataagtcactgtggctaagctatcatggtgccacctgaaaacctgttggctcatattgaactagtggcttgtgcattttcatctatcgccacactagtggctcatgttgaagtttctattacacatggttgaaaagtgatttgggaaattatggataaactaagctatttgattcttaaaactagaactagagttcatttataaatctagcattcagtcagtcaaacatgatagtgtggtccgtttcagaactgggcttttagagctgctaatgttatatttcaattcttcatataattcactgcaaattaaatattattgcagagacttttcaagttgatatttcaaacactaaaaatcttcttgagggtgaaagaggacaaactatagctcagaaaggcataattgtaagtgcttctttaacttaagttctgttgaaatacaagagaattc

SEQ ID NO: 2449 - DNA, 7740 bp, Oryza sativa
tgctcactccaaacaggaattgattgaagttatttcgaagtctatgaaggagactagtgagtgtttcttaacctcactgcgattaccttgtggtcgccgcaaacaattggatgatggaggaggacttgaacaccaacaagaagagctggaggtagaaagttctgttcaagaattatgctgttgaggttatttcttggaatgtctacagaaagcccaacaatattattatttcattatagcatagactatatgacatcactgtcagtccgcatgttgtgttttgtaacaactagcaattgtatgcttttcttgtcaggaacctttctctaacaagtattaacgaaacaatgaaccaaaataacacttttgacactcctctcatgaagacgttggtaatacttttaacaagtattactgtgtacttgtactgactatgattattctgttcaaatttgaaatgtgcagaagctaaaagtgtctttcaacgagatgaagcttcaagttgaatcaactcgatctcagtgggaggaagacttgaggaggctaggtgagtaatggattcagaaatgttttagaacattttgtcctttgatcgctaaacatttgcttaatattgcagaaagttattttgaggctcataatcacaatgcttaccacaagttactcgaggaaaatcgtaagctgtacaatcaagttcaagatcttaaaggtaatatgcgaataaattaacttcatttcactaacagtgagatatttgtactgataaattgaaacatcttttaggtagcattcgtgtatattgtagagtgaaacctttcctgaaaatgcaaactgatcaaagatctaccgttgatcatattggggagaatggtgagataatgattgtgaaccctcaaaagcaaggaaaggaagggcggaagatgttctcattcaacaaaatattcgggcctaatgcttcacaatgtacatcatcgacatttctcattttttttcatttctcatttactgcaaattaattgcattccatcttgtagtttctaattgagtgatgacttacaagatagttatgcatttatcccaaaagttaaacagttcattgaaaatatgactatttagttgagtaatgcatgataaaaattgcatacggtttcataagaaaagaatggtgcatattttggagggctggctgatatttattttgagagttatagtttgacttttttttttctttgtaacagctgaggtttttgctgatacacagccattgatcagatctgtgatggatgggtacaatgtatgcatatttgcatacggtcaaacaggatctggaaaaacatataccatggtaattctttgcaagtaaatgtactaaagtttcaataattacttttgtgaaaaattctcaaatcaatgaatccaatactataaaaaaaataaagaaatttactgctaggaacaataataaaaacagatgctcttttgtatgctacttgtctgcattaagcttcaatctatttgtatttttctttctttatgatgttgtaacatatctttgttgcatatattactcagagcggtccagatattacaacagaggaaacctggggcgtgaactaccggtcacttaatgatctatttgctatttcgcaaaatagagcagatactaccacatatgatgtgaaagttcagatgatcgaaatatacaatgagcaagtgagagatctattgatggttgatggtgcaaacaaaagatatccttttggttgcaaaagttattttttctcaagttgccgattgaaaacattgtttcaaataagatgtttcctctatgaagttacttgcaaaaatcttctatatgttttcacatgaaataaattatcttttattgctctcagcatcaaaaaattgtttaacaatatttccttccggggttgttcttaaccatgaacacattagagatacgaaacagttctcatgtaaatggactgaacatcccagatgcaaatttagttccagtgaagtgtgcacaggacgttttggatttgatgagagttggccacaggaacagggcagttgggtctactgctcttaatgaacgaagtagtcgctcacacaggtatcccaaaactaatgcaaaaaacgacttcctctcagaatgtcccttctccctagtataatatctttgcataatatttttctttcatcgtctgagcaacaggcatactcactacatactgtaattttgttgctcttctgtagtgtgttgacagttcatgttcaaggcaaggagatagcttcggggtcaactctaagaggatgccttcatcttgtggatcttgcgggaagtgaacgggtggataagtccgaggccgctggagaaagattaaacgaagcaaaacatataaacaaatcactgtccgcacttggtgatgttatagctgcacttgcccaaaagagctcccacgtcccataccgaaatagcaagctaacacaagtgctacaagatgccttaggtatacagaatctcttaagagcctggatgtgtttcatcaagaatgccagctgattatgttttcttgtcttgtgatgtaggtggtcaggcgaagacattgatgtttgtccacatgaatcctgaagcagatgcttttggtgaaacaatgagtaccctcaagtttgcagagcgtgtagccaccgtagaacttggtgcagctcatgctaataaggaagttgggcaggtcaaagatctgaaggaagaggtatgatattgtgttgttttaaatgttacacgatcatcatcggaactttgtttctgtaactcatggtgtgtaattgtctatcagatttctaaattgaaattggcattagacgacaaggaacgtgaagcatcaaagctaagagatatcgcgaaccgtgtggcctctgaaaagagaaatgcaagaacgaggtcacctctaaccaccaccttgtcctcgaaacctgaagctggtcaggattccagtgtagacacttgtacaagcgaggtaccacatactagaagcagtttcttgcaagttacattacagtatacaaaagattactaatttgaacatatgtctaccttgttccatttgcagatcagaagctcatcatctggaaagcagagaaggttccgctctccattgtcagtgagagaactggacgagaagtcacctgtcatcaaccgggagttatacttgagtgccaagttcaagactccatctcctccagtaagaagttcattgtctgccgagagagttggcattgccaaaagcgtggagaggtctgaaaacatcgactgcacaccagtatcaaggattgaagtgcccccaaaagtacagcacagtagctctaggaagaccccttcatccgtcctgacggctcaaagcttacggaaattccgagactccgaagaaaatagaagcgcaaagccatcggtccgagaaagcatgacaaaaaccaggctcgacagtgcaacaaagccgcctcagaaagaagagcaaactgcaaacaagaacacaggtactagagtgaggtcagaagccaagatccccaggaacatatctgacatagaaaacgagtttgcaaacagtgagcccaccttccattccaaccgaaaggcatggaagctcccaccacagtccacaagacagtcgcagagcattgatcttaggtactaagattcttcactggtaacaacatgacatgttttccagttttcctgttgcatacaaatgcatctgtagatgtctctctctttttttttgtgagttcgcttacaaagatgtctctctttttttttttggtttgggttgtcacttttggcagagcctctgtccgggagatggaacctctgactgaagggaagcctcgccggagcaaggcgccccacggtgatagaaccaacgtccccttaccggagacccggcgcagcgtctctctgccccgcgggaagatggctctcgtgtgaaaaatctagttttttcgtcaggcgaatttcattgtaccctgtgatccggctatatctgtaggtcttctacggctgggtagacgaacctgagaggaacacaatcattcattggtttgttcttttttttttcctttcatttttgaagttcgtgtgtctgtttcgtacgaacctcacgcccttttgtacaatgtaaatgtagcaattgccattattatatctcattttcagtggcgattgccttattggaagctgaaagcctgaaaccactagcactttgtatcagtatcaccgttcgtgcagatgttcggagttctaacaaatgatttgctcctggtctttgctactgcagtgcagcagactacaaggcttgaaaagctagtttggttttacaaattttgctatcgattttatattttcagcgaaaagagagagagtttgttttttttttcgaggaaaaaagaactgtttacccccgtatgagcttttgcagttgcagccttgcacctccctcccattaacttgtcctcgctcaccaaggtgcccacgtcgctgcgcgcacaaattcgggccatggaggaggcagcggcgccggagcggaagcggccgcgcgacggcgacgtgggtccatcgacggcggcatccggggaggcgcagtacgtgtacctgcccatcgccgacgcgctgaaggcccccggggcccgggtctgcctcttcgccgccgtctccgagatcggcgcggccgtccgcagccgcggcaccggtgagcctccttctcgcccgcactttcgagtcccccccccccccccccctgagagcagggtttagggttttggtcgctatagcggatttggagctgtttggggttgctactggactaataattttcagtgctcaaatgtgctcggtcatggtgggggagattaggtcgagtttccgcacccgatttgcgagctgttctgattgtaaatgctagggaaagaggaagatgtggggttttaggtgtaggcctatagccatgccgaagttctgaacactgaacagaacagggtcatttttgggggatttttgctgttaattggatgaagaagcaaacctggtgagttctaatggctgtatctgaaatcgccaattatagatgagcttaccatgttccaccttggaggagtttctttggttggttattgagctcaattgtgattatattcttatccatttgctattgcagaaatgcctgtatgacaggtttaacaatttttgttttttgttgattcttttgtgattatacctgcaattgacgtcgtgctacttatccatggctatcatttgtgcagatttcactcttacgttgaggattgtggatcactcacgtgcatctgcaatctctgtgaccttctttgctgataacactgcattactgccctgtgttaggtcaagtggagatgtgatcagtctccataatgttgtggtacgactgaaactaaacactctactgaaatgtactatttgttacattccatggaatctttatattatgtctttgaaattacggtgaattatcgtgtgacggtcctcacattttctaactcggaattgtatttgcatacttttcttcaatgtcttccattctgcagataacaatgcaccatggcgaattctttgtcacatataacaaaaggttttcttcatttgcgctatttgaagggaaagtatctacgggatgcataccatatcagcattctatgaaataccatggcagcaaacatgacagtgaatttttgactcacttgagaatgtggattgtatataatcctccaggtgagtatgtgactgctagttgaaaaattattgttgctcatttttctcttgtccactcataagctatacggatgatatgtcttgtgaagttgtgatactccaaaactttgcacatctacgaatattataaggaacaacatgcctagaagctcctaacccacatgagaatatgttgttatcaattcctgattttaccagttgctgtgaacatacatcgatatatgactcatatacaatcattagtatacaatcgataacatactctcctttacccaaaagttaagcattattacataaacacgtgtacaatagaacacccattcttttctttacaaccttaggacaggatgcctaggtttcggtcaaataaaataaaagccttcaaattggttgtcagctctacatttctttctaatttttttaaatttttggttgtcagctctttagcattatcatgttttattgactgcctgtcctagcagtacctgttgagtatatgattcacctacttttggatactcgtccgtctattataatgtggcttatgctcaacagcatctactgatttacgtctatgtattttgcacaaaatgcagattaccgaaatatttatatcttctctgctgaatacatgcactacaaatatctgttgcaacactctttctttttctaacaagctattttgctctctaggtctgaaagatcttgaactgcagttaaggagtataaaatccgattctacttttgatctagtatgcaaggttagctctatatgaagttacataatattcaacagttatttgaatagaggaaatctgatgttcctttttgttaggttctagatgttcatgaagcttccaatggcgtatggattttgtatgtttgggatggaactgatacacctgtgaccgagttcccgacgtaaaaattagacattggtgtcactgtttaatttttaattcagaaataacttaaaattaattctgcaaaataggatggtgttggtgcttataacattgtgttgaagtaaattgtgcctctgccatttctttcataacgtatggcataatatgataataacagttcatttttaactaaattgcgcctatgttgtttggcttggttgaatgcagcttggacaatgaatcagtttctccaccccctctacatcttgaaggagcacctctgccaagggaggttttgtgcacattgccttgtgttgggagtgtgctgagggttttctcaaacaggtttttcaaggaaatgctacacttgcaaaagggtatttattgggccaggttctgtaatatgacgtgcaagcagcagtttggcatgtggaaagggattctgctgccttctagcagagtccgccttttatcaaatgaagatggcagcgttgctgatcgtctgaagtaatcttctgttttctcatgaatgctgattgccatatgaaacttgtttctaagtattaaccaagtgcattaattattacaggctattcgacagtcgcattgccacccaaattcatcgtcagccaatggcaagcctccccaatgcttctgatattgctggtatggacaattgagcttaactttttagtcagtcttgcatgattgctctgagcttattttgttacatggtgtgaagttctccgatgcatgtgctggttgttatccttctaattgtttgcaaggttctagtatcttctgtgcaggtgctttgaatgctatgatttcctcttccattgactaaatttctgttcactggttaattgaattgcataagaacaaaagaccatgccaatctctctcatctttctttttttttaatgcactaccttttcacagatggtgatatctgtctgctatttctgtttcatcttactatacttcttgttcagtggttaattgcttaagaacaaaaattctagcctactaagt

SEQ ID NO: 2450 - DNA, 1217 bp, Oryza sativa
gcccgcgcgctggctgcttactcgctcagccgccggcccccccccatccgcgtgcgattagcacaagctaattacgattgttactgttaaataccataattaaaaaatacatgtataatttaaaattttgagttatcagttttaaaaatttgggttaaaacttttgaattttgatatgaaagttttcaactagatatgaaatttttttaattttgagttggaagttttgaatttcaataccaaagttttaaaatttgagatgaaaatttttaattgagttgaatgtttctgaaatttgaattggatgttttcaaaaattgagttgaaactttcgaattttgacttgaaagtttttgaattttgagttgaaagtttttgaaatgtgagttgaaagttttcaaatttgagttaaaagttttcaaattttgagttgaaagtttttaaatttgacttgaaagtttttaaatctgagttgaaagtttttcaaatttgagatggtaagttgaaagttttcaaaatttgacttaaaaaattcaaattttgagttgaaagttatcaaatttagggtgaaagttttcaaaatttgacttcatgtatagatttcttatcaatctgttataaaaaaacaaatcttatcttaattattatcattatctaaaactaaccgtattagttagcatgtatccaaaaaaaatcccggaaaaaataaacacagaaagctcaccgagtgacaagggcccgccacgtctctaagtcgctagtacgcgcgaattagcaaaaccgcaatattactccatcactcgaactctgatccgaaaccaaaaaatccacctcttttcgcaagcacttgcgccactcgcaagtcgcaagccaaaaatcacctcactgtttccatggaactctcctcaatctcagcttctctcctcctcatcctccctcttctaccgcttctctacttcctctacctgcaccaggaccccaagaagcagcctcgtgcccatggactcaagtcctaccctgtcgttggcactctgccgcacttcatcaagcacaagaatcacatcctcgagtggtcggccggcgtcctaaagcgcagccccatgcacaccatgtcgttcaaggcgcttggcctcaccggcggcgtctttacggccaacccggccaacgtcgaacacatgctcaagactaactttggtaactatgtcaagggtgaggcc

SEQ ID NO: 2451 - DNA, 551 bp, Oryza sativa
aaagcgtctatacatgttagaattaaaagaaggattccatatggaagaaaaggacgaaccaattcaagaagatgatcaggttgttggaaccattcaaaaatatatgaagcaaaaatggtacacagaagttatgtatcgttttatagacggatcctactttcagtatatcactttaattgattatggtgctgatgtcaattgcattcgagaaggtattatccctcataaatatttctgtaaagccgcccacagaattcgtggggcagatggaggacttttaacagtagaatatcaaatccctgaaatctatatttgcatatctgaagtttgcattaaaacatcttttctactcgttaaaaatcttaagcaagatgttattttaggaacaccgtttttatcactcattcgtcccttccttgtcacaaacgaagatattcaatttgagataatgggcaaacaggtgagcctaagattttcgtctaacacagatgagattcttgaccagcttgttcagaccaaaagagaacaagttgtgaatacaatatatctac

SEQ ID NO: 2452 - DNA, 11919 bp, Oryza sativa
gtaattgcattgtcaaatgtcaagccatgtttgaatgttggaggacatgctttgttgctactgcacattgtaacaccttgtgaattgaatatcatcgataacagggcttattaaggtgttggtgccatgatctatcttacatgtgtttactctctgcatctttgctaccttaagagggggatttgttgaccctagggatgaaaacggatcaaatacggtcggaaactagctctatcatattcgttttcattttttttctctcggaatcagaatcggaaacccagatacaaaaacggaatcaaatattatcgaatatagatatggagcgaatatgaatcgaaacgaatacggtgacgaataattattgaaatatcaagacccctcaaagtaagcttcttaaatcgaggaagagatgtagccattagttttcaaaaacaaaacatcaacattttcaaattttatctctatttgtaagggcagggggagatagaaaatgttgtgtttactttccatacaaatttatgttatcatgaaacaaataaattaatgtgtatcactgaaattttcgcaggcacattaaaattttgaaaaatggttgaatgttttaaattttgggttgaacatttcaattagagttgagagtttcgaaattgaattaaacgttctagaatttgagttgaattttttaaatctgagttaagagttttgaattcgaactaaaacttttcaatttttgaattaaaagtttttaaaattttcagaattgaattgaaagtttttggaaatttgagtggttatttttcagaattgaatatttccatttgtttgtatgtgaattgctattccttgttattttttcatatggtttgtttttgttccacctaagtagagaaaagaaaaacatgtttttgcataagaacaccatatatctgatgggaaataacggacagtatccgaccactatccaattccgacgtatatcacctatatcatattcattttcatttctgaaaaaaaaccgaattcgtttccgatttcgaaaatttccagatatatgcgaccgaaactatccgaatccaaaaagaggtccggtcggacggaaactatccgaatcactttcaaccctagttgaccccgcctaaactccatgaatcagttgggctttcctcactccactgaacattttttgaagacccatatttttattagaaatagtggttggaaacaagtatatgggtgagggagaattcacacccagttagaaaaaaaaaacatatcatgacaaataggggtgggcaaattttgactaaatgactgatcgaatattttggttagatattcgacaaaacatttttcccccacccatgcttcatggaaccctttcttttggctgctgggagtatttgaaaggagcgaaataatctagtttttaatggagtccaaccttaggtccttgcatggaagagaaatctgaaagctaatttgagtcaacatttacctagactcaaggaaatgtatatgactttagtgcaatcgtggatttatcttttgtaatgttgccctttctccttcttatttgtaaattttcttaaaagttaatatatttattgtgctttcttcattaaaaaaaggccaataacaacatgtataccttagcccagcccaacaccgaggaaaatccaaaccaatccccaccccctcccccttcccaacacccacactcgagttggtactccccctttgcaataacctagtcgactccttgtcacatgccttccttccctcaatatacacaaggtggatcgagagatcggcgatggagatccaaatcgactatattgtggatgtcaacattgtgtgccctaaccgatgccctctcctcccttggggcgacgagagtggattgagggactagtgagagagagctagagttggcatgagcacggcttgtcctagcggctagcgcggatgtcaatggtaagtgttggccccgcgcgctctccgcccctcatggacgaacgtgacactgccatattctacctttttttatgatttctttgatttttttccatcgtttaaatttgttgatgattatagtaatgagaccaaaccgaaatacctaaacctaatatctctgtcttcattatttttgcaatgtatttcgatctccacttttagattaccagatttttcacataaaaaaatgagagaccaaacctcaatccgactgaatgcccatcaacaaatagtgtgatgataaagactgacaaactcatgtttaagttcacattgcatattcttctaaaacgagcttcgtgtgctagcttgtcttctatcccaagccacacctcaagtgagattgtggtgttagttgcgagatccggagatcatgagaagtagccgagaaaatctacaaagcttctagctagctattagtttgtttatgaaaactgtatctaatgggactcgaaatctggagtagagattatggtagcaactatagccatgagaagctcaccccaacacaagaaatgcaaaccccattgttagtacgttacacatgctacctctattgatgaacgaagattcctatgcactatcgattatttgtattatttctttctaccacggaaaaatagtttttgaattaattgtttggcctcaactttttccaaaatgttaaggcttatgaaagtgatggaataatccttaggctcacgttgactacttggctcttagttatgttgaagatgaacactgaacactgctctatgtgagggaatatttggtttagtgttaaaagcatacatgtaaatgtattttcaataggaatttagtgagattgaggatttgttggtaatatccatctcttttgagttaagaggatgcgctcgtgggtgtgtgatagtttagagtttggttgtgagtagtggggtgtgtgcatgtgcaacattgatttaatcgaaaataataagcattacaaattttaacgtcaccacattttaagtgaggcaaagaggcatgctctaagcctccagctagcacaatcctcaatggtatctatatatgctactgtaaagggggagcgtatcctatgtacacaggccctcacgtgtatacaccgtgtacaccaactaaaaattatcacaaaaaattctaggaaaattcatacatgtactttcaatagtattacatctacgtgcaaagtcgcatcttcaaattcattctacatagagaataacaaaaaagataaaattctgacaaaattgtaaccttaaaactgtcagattttttgtttttttttgttatggctaaaatataatgaatttgacgttaagattttaaccctaggtgtaatacaattgaaagtatgtgtatgattttttctagattttttggtgacattttttagttggtgtgcacgtgtgtacacgtgagggcctgtgtgcatatgatatgttgccctgtaaaggagaatcgttctccgcttcactttcccggggccacatgtatgcgaaaaatcagtgaggaaatagatcttgcacccccatctcctcttaagaaaacaaaatattttttttctagaaaaccggccatcaggaaaaatatatataaaaaagtccgaataaaaaccaaaacgctcggttttatttttatcccatgggatatgggtaatttgctactacatccatcttatattattctacccttcaaacttgtcccacaatataacagatattgatgttgtggtgcactgtactatttatcacatcaaccaactataatttaactttcttcatatcttatccccaactacaactcacccacaacaaactctcacttaacaggggcattatagtccttttattcttaatctttcaaaaagaaggaataatcctagtattatagaatgaatgcaatactatttgtaaatataaactcgacggtatgaaaccaatttttctttgtttagatgggctcaaatattggtcatcaacgcaaaacaaaaaattgtaattaacatatgattaattaaatattaattattaaaacttagaaattttatttatttgatttttttaataaataatttctatgtagaattgttttagtaaaaatacacaccgtttaacagtttgaaaatcgagaaaacagacaagttgaaacggagtttagagcgcaccctcagtttaatttcctggtatgggccaggattttgcatccgtttcactttcacacacggtatcttcccccggcgacggaatccacctattactccagtccagattgagaacgcgcgcggcccacggccgtcgcgcttaaacccggacaaggtggcgagtcctagtagtagaagtatttacggagcggcgcgacgcgatctcccaatggcgtcggcggcggcggcggcggcgtccgacgagcccccgcgcaagcgcgcccgaagcgccggcgcggaggaccggctgagcgagctgccggactgcctcctgcacgacatcctcgcgctggtcgggtcccggcaggcagtgcggacgagcgtcctgtcgcggcggtggcggggcctgtggcgctcggcgccgcgcgtcgacatcgaccagcgggagttccgccgcgcgtgcgggggcgaggagggagagccggtggtggactgcgacggcttcgaggacttcgccgacggcatactgtcgccgacgctcctgggcggcaccggcacgccgccgctggacgcgttccggctgcacctgctctacgaggggaggttcatcaccttcgggaggtgggtccgccgcgcgctcacgcgccgccccgcgtcggtcgacatccacgtcgagtacggcggcacggtcgactggccgccggcgctcaccctcggcgacggcgccggcaccggccgcctcaagcggctgcacctcttcggcgtgcacctgggcttcatctccggcgacggggggcggctcgccgagctcctcccggtcctcgaggacctgcgcatggagagctgcacgttcgggcacgagccatcatcacccaccaccaccatcgccatccccacgctcaggagcctcgccctcgccgtcgtgccccgccgcaccgcgaggccctacgcgctgaccgtcgcgtctccccgcgtcgcctccctgcgcctcttcctcccgttcagccgcacgcgcgcggccgcggtgcgcgtcgcccccgcggaggagggcgaggcgctcgcgtcgctcgtcaccgcgtcgatcactgtcctcgagacggaccaagagttgaatcggcgcatgaacaaacacaagctcgacttcctggcatccacccgcaacatgctcgaccgattccccaatgtcagaaacctagatttgtcagggttccccacaattgtgcgtaactgcgtatcccccattgctctctctctatttgaatctttcaacagttcagagcacacgtcgtttgcttttattttttttttaatttctagtttataagtattttcaacacaaaacaagcatattattaaaatatatttaatgttagatttaataaaactaatttaatattttatactctatgttgctaaactttttttaagaaatttggtcaaaattaacatagtttgattaggaaaaaaaatcaaataacttataatataaaacggatggtgcatttaagattgccatcattcactgcagtttgcagcgcatgggtccgagggacagaaattcagtaacctgcgtataactgcaaatgatttactggttcttttgtttcaggcactgctagacaaggcatcccaagaattcccaacgctccctagcttgacaaccttgcttctcagcgaatgcgatgttggagccaactgctacgtgctgaagagcgtcctccggaacgccccaaacttggagcatcttagattgcaccgttgcaaggtaatatgaaccatctgcgtcgtatcaatatcacatacgcattgtcagagtttcaaacacgatacgtttgaattcttgtgcctttggtgtttagcctctgaaattggatcactagtgcagttcttaggtacgccgaagaggaagcggggaaactccaggtcgaaggggaaatcttcttccacatgccttgactcgctatcttccaagtgcaagagcttgcagtcagtggagatcaagtttcggccaattgataatgctcgtcaccacgaccttgtagggttattgaaagaatgttaggtgaaacaaaacgtcagcactgcaagaaatcgatcagcgaaggcacggtaactatattaatacctattacatagaacatctcttgcatgactgcaaaggaagcattctcatgaagccacagcatcagtgatttgttatatattctagcccttctgtcacactcgagagtgtctattacatgcatatgatgtaattaatcataaactctttttactgacaaactgaagagattagtacaccaaagtcaattagaatcttgcattgctccttcactggggaatttcgcaatatagatgttggcagatgctaacaaggagggggggggggggggggacttttgatgtcatcctttcaactctgttgacttagtctactactacatctggcagcttaaagaaagtgaaaaatgtttctgttggcagaaaaatgactctttgtaagagcttcaccgcaacatggtttgtccctcaccacgattagttttgcaagtgttgtaattttaattttcagatttacaagtttttatttgaaatatttcaatcagtgttaagatctttccaattaaagaacctcaggtttcaattcaaatgttttgtttgagttcattgaggatggttcaaagcttagagcgcctgttgaagggcattgcctatcaccgtttcccgtcctgcacaccctttgcgtctacgatggtgtgacaacagaaaaggtttgcacgaagagtcagtcaggttctttcgacaccaaggtgatcctagcaattcctatgctcttgtaagaacatagttaaattctttcaggatgaatgtagaacgaataaacggagctagatttttttttaaggaatgagtggagtgcttacatttctcgggacaaatatagaacattagagataaaaattacatgaagagttgcggtcatagagctccttatgcgtcatagcttattgttttaatgttttaagttaaggcaacgtttggctaatgggaaagggccgaaaatgatttcccacccatcaaaaaacatctttaaatcctaactgttcattctcactctttcatttaatcataaccctacattcatttccaatctcaatcccaccttccattttccattatccaaacacaccaaggttgatgcgataaccatgtgtccacgttaacattattgttcttaataaaacaagacaatacattgtccaccgctatatagttagtatttaataagtccagagttcaagacaaagaaatgtatcatcagactttccatgcttcctattactcaccccgttctattttaagcacaatcataagtttccgtgtcgaactttgatcgtttgtcttatttgaaatttttttatggttaatattttattattattaaatgataaaacatgaacaatactttatttgtgacttatgtttttttattttttttctaaaaaaaataaataagatagacgattaaagttgaacacggaaactcattactgcgcttaaaatgagacgaatgcagtagaatcttaagagggattacgatgacttgcttaagggatatttgttctaggctattgatggctcaagcccgaattgctttaagcttctgtaccagttacgactgcctacatgatatttgtgtgtacaatgtattaacgaaactgtaatatatatatatatatatatatatatatatatatatatatatatatatatatatatctcattgataaatatctaatccaataataaaaatattttgacataaaaaaactggcaactcactatagcagtatcccctacacttggcggcatcagtcagcagcacgaatcttagagcaccacacattctccttcgtctacctccgtccgcccaacgccttatcctctactactacgagctctgctagttaaaccccgacttctccctcccaccacgcgcctcccgcgctcgcgctactaccctcacctcccccacacccaaatgctcctcctcttcctcccccacccttccccacctctcctcccccccgccgcctcgagaacccgacccccgccgcgcctcctcctccctcccatccacgcctccccctcgccggagctcctcgccaagtcggctctccgccgcatctccgacaagctccgcagcctcggctacctcgaggccgaccacccggaggcggcccccggtccggcggcgccggaggcgggcgccggcgcgtcccccggcgagatattcgttcccacgccggcccagctcccgcgccaccgcgtcggctccaccctagacccgagctgggccacgggcgatggggagggggccgccgcgtctcgccgcaggaggcgcggcgggagggatagtagcgccgcggcgtcggcgccgccgtccgccgcggagctggcgctgccgagggacgagctgcggcggcttcagggggccgggattcggctgcggaacaggctcaaggtcgggaaggccggggtgacggaggggatcgtgaacgggatacacgagcggtggcgcaacgcggagctcgtgaagatcaggtgcgacgacgtctccgccatgaacatgaagcgcacgcacgagattctcgaggtgagcgctgccccgcgcatatgataatcgagtccagcgtaggtttgtagctgtgcgcctgtgcctcgcctagtaagtaaaacgttcagaaaatttggatgccggaaggcatcggagtgctactatatgttgaaattgcacagagtattagttgtatgttaattctgaatttcatcgcacaatgtgacagggtaagatgctgagtatagtaatatagtgctagcatatgattgtgcccacttcggaagtccctgttagcatggaaatggcagcatgtttattcaaaagggatacaactttgaagtgatcaaggattcaagatagggatattttatttttaattgtttgaaatgaatccatttagcagtgtactggcatgcacataatcattccttcttcgaagcattttattataccaaattccaaggcatttcttggattttctcttaaagtaatctatctcaatttttgttttagggcatttctatctcaacgcttttcagtttgcaattgacatgctcaatgtgtttttttatagagaaaaactggaggcttagtcatttggagatctggaagcaccatcatattatatagaggaactgactataagtatccttacttccatgatagagaaatgaagaatgacatggatgagtcatcagagcatacaagttctgatgacgaggacgcggatcttgctataatagcttccgaacaaagtggcagtgaagaggattctgataatcctgcagaacatggtagcaatcatactgaggagggcgatgatcttactagacggtttggtgttgatgcgcttgagggaaatttagacattggatctgcagagcaaagcattaacagtgctacaaaagatcagcaagcaatattacatacaagcactaatgtgtctcgtcctagcgagatcagtggtcgagctcggtcaaccttagttgctggtgttggttctccaaataagtttcggttacaattacctggggaggtcaaactcgcagaggaagctgacaaattattggatgggttgggtccacggttttctgattggtgggggtatgaccctcttccagtggatgctgatttgttgccagcaattgttcctggataccgtaggccttttcgtctgcttccttcaggagtaccaccgaggttaactgatagagaaatgacaatccttaggagactagctcgtcccctaccctaccattacgcacttggtaatttctagttatttgtcttgtataatatctttcatggctttgactttgataaggaccactgttatttactttcgtggtgtcatttatctaggacgaagtagtaaccttcaagggttggctgcatctatgatcaaactatgggaaagatgtgaggtagcaaaggttgcaattaagagaggtgcagagaacattgatagtgatctcatttctgagaaactgaaggtaggttggtaaagaacccagctatgaggaattaattgtagatatgtaattattcatagcatttgacatttctcgagcattcttgcgataaaacattgatgacattacagatttatctttcacgtgtcatcgaattttgaaatgtaaatcatttgcctgtattcctaatttcctatcataattgaagttgaaccatagcagcccagaatttttacatgttgaatcaaaatcacttctttttatgatatatgttccctcatactcatgcatattttacatgcagtatgaaggcacttaacaatagattcatattttttatgtgtcgccttgatttatgtggcaccaaatattaggaaaatacactttagtatctctttctgatgtgaaccatttcagcacaggctccaggccttcaacctattatatcctaaactttccattatgagaaattatcattacaatcatcagtttcaaaagaaaatcagagaggagggggggggggggtatgttccaccatgacattcttaatcttgcagggcttgacaggtgggacccttttatcaagggataatgagtcaattgtattctacagagggaaagatttcctgcccacagctgtctctcttgcaatagaaaagcgtagaaagtatggcaattctacaatcagtaaccctaagcttaattttgacaaaagcacaccgcaaaattcttctaaactgaagatggctactgatgtctcactagatgggcatgaatgctatgaaaagaagcataaagatgaaactgcagtttcagataatagagcagaatctcttaatgtgtttgcccagaatgttgaggccagattatctcaggtttgcttttcttttctagtagtgccatctcttgataattttgatttggtagtttgaaaagaaaaacacttgaaatagttaaattcatatagaaatattgttcaggcaattgcagagaaagagaagactgaaaagcttattgaagagctagaaatgtcgtctgagccttctagagctgaaactagagaggttatctcagaagaggagaggtacatgttgaggaaagttggtttaaagatgaaatcattcttattgctaggttagtattctcctcaaccttgtattgtgcagcatgcatctgttcagaagtcaaaatgctacctaatttgactaccaaattagttataggaaagtagattaccagacagtgttctccttggtgacccctaggcattcggtgtccgctccgcctaggtcagcaagctgatttttcccgcctaggaagcagttaggcactaggtcccacctatggccgtgccatgtgcctactgcctagcaccaagggaaacacttctatcagactgtaatattaccacttctagagttttcatctgtttagctcataccaagtggcattttaatccttgtaaatcctttttgtggagacagtgtgagtattatgtggttttttgttactttgggagtgcacatatttgaattagttcggtcatctgttgtgattcatcgcataacctccttttgtaccattctatacctgtacatgatttgactattattgcctttccaagcagtagcatccgcagccctaaggtcaataaacaaaaagagagc

SEQ ID NO: 2453 - DNA, 720 bp, Oryza sativa
cagccgggaggaaggggttagggtgatcaccgacgcgccgctcacatcgctcgtcgacgcgtcgatcaccatagttgacaccgatcctggggatccgcggaaccgacgggtgaaccaattcaaggttgacttcttggttgccatcagcaacctgcttggccgcctcaccagcgtcagaaatctcgacctgactgggctcaatgcaacggttcgttctctccgacctttctctgcaaagtatatcacagtataatccttcatttggcacaacaaatacatacctggaaacataacaaatttaattttacagttaagtattactaattatttcgccgattgctaagtctctcttcaatggcaaaaacttctgttcacccataacaggagagtagcatgaaaactgctgctcattactctgaagtttgaaactgcagcctaatcttgtatactctgtctatgtagctgaaagcctgaaattatctcctggtttcatatgtttcaggcactgctggataataaatcccaggaattcccgatgttcccctacttgacaaccttgctcctcaacgagtgtgacattggatacaagtaccacgtgttgaggagcatccttcagaacgccccaaatctggagcagcttagactacacaattgcaaggtatcatttggcgaagttaagcatatggttcatttagctcttataccgtcatggttcggcat

SEQ ID NO: 2454 - DNA, 16518 bp, Oryza sativa
tattcgttccatgccacccattagatctgctggtacctcaaggacttcaggtctcatcactagagaggctcctgatgcattaagaactcaaccttatgctggcaagtctaccatttctattgatacaactcagccagcaaatggagttgcttcatctgctacagtgatgcctacagctcctgtgatggtttgtattttgtacttcctcttgtatatttaatttagtcatgagtctgagtaaaaagcaaaacttagctaaattagtttcattatttattcttggcatttggaattattttgaaccatgtgttctgttttatatttattattgaataaaaagttaccttaagaaagatatatctgtaataataaggttcatcttgtagtcgtttgttactactgcattggaaccagaagacctttagtcacattgtttaagcatgatcttttgcatttacttgctggtacagatcatacagtacaacttccatttgtgacaacggacaacactctgcttccattcaatatgatatgataactttagttatccgtataagagctcaactagttatgcttgtaactagctgaggtgctctactaattttattagcgagtttctgattttgtgttttcttaactatcatttgttcttgcaattctctgacattgctgtatgcaattttgcagccagaagtaccgctaacagttactgggttgctgaattcactaggacttgagaagtatgtcttcctcttccatgctgaagaggtgattgaccattactgattcatttccaaccttaaacctaattatggttctaatatgattgctatatttatggtgttcttttttgtggataatcatttctgttaaccatggagtaccttactggctcatgtattagtatttgaatgccttttgtatttgaccttttgcttgctacgggttatttggtttctactttctgaaaaaagctcttgtgttctttcctgtaagctattcattagcagctttgtttatactcacgcacacaattattcactacatgctgcatgttccaagtgtatgtgggtcaccaccataagcatttttttaggtcatgcaatatccagtaagcatatgcctgttttagtgagtacttatgcatgtgttcaagctaatagtaagttttttgagtgttcactggcgatgccaatgtttctttccttattgtttattatttgtttgcccacaggtggatatggctgcattgagtcagatgggagacagtgacctgaaggaaataggggtaccaatggtaagatgtactttttattcatactagcatctttacatatatgtactctctccatttcatattataagtcgtttgacttagtcaatattctttaagtttgatcaattttgtagaaaaatatattaacattttcaatacaaaacaaacatatttggtattgtaaatgttagtattttttttctataaacttggtcaaacctaaagagctttgactaagaaaaaagtcgaacgacttatagtatgaaatagagggagtagaaatgttctagttctgagtattttgttactgaagtactattgttcttatcattggtttgaattattatctggatactgcataatggactgtgaatctgtgattagagttagtttgaatcgtcaagtcaaaaggacctgcaaactatatcaatcactcatttagtacataacagattagtgcaccagcctaccagagcttgtctcgatgagagtagattattgtgtctcactaaaagtttccactccaagaatccaattcattcaagctggtcacgtttgctcaactttcgaacataatgggttacacagggctgtggcatgcagtgctgcctaatatttgtgctagcaacttgccatctcatcacatgccagcaagtataacattttaatgtcaagcctgatttgtaaaactatgattctgtttgtgtatttagacatgtgttgtaacacaatccatgttataggtccaccatctcatttaactactattgcaaggatgtgttgcactatatgctgtgttttcctgaagtctgctagcatgcttaattaattgaaccccacgaaatgggaggtctcctttcacctagagcatctagcagagattatcagcatctcaaacatgctagtgttatttgcagtaattttgactcgtggaatattatttgatggatcagggtcctagaaagaagattctccaggcagtggcaccttattcaaaacggcgtagatgaacagcatgctcaggaacttggggcgttcgtgggcaatgacaatttattggtgtaagctgcttcattgcagatcttgtatatcccaatggtctagtgctctagtcaatccgtttcattgctgatagatcaacgcatcgcttttcttggcatgcataatcttatctgtcagctgatgatcccaatcctgttattcacgacctgccccttgtgtagcaggatctgaaacatggatatgtagctttgctacactaaccagtcagttttttcttcctctttgggaattgggaacatcgatgacctgtaatcgaaatcccatgctttatgaccttgggagcgttggcaattgagtttactggaacatactagtgttaagattgtgtacagaatgcgaaacagaccgttgtgttttttgttaagtattttcggtgttaatacccttcctgtttacctcggttgctagtttgtacgcgtaagtccgtcatggtctataattgtgtgctgaagctataatggtataattctcctgtagaatgataatctttggtcactgtacaaaaaaatgcactgacggatggttgcatgtgtctcgtttatatacataggccaaaccccgtgcacatctgtcaattgggagccaccagctctaatgggcgttcagtacgagcaaattagtacggagtactataccttaagctcggtcctaatttggcaaattattgcgcatttacgccaactgttccctcgaggcgaccatgaacatcgtacctaattactgctaatccagattataacaagaaaggagtgggatctactattgctgcagcacccagatgcttcctgtccctgccgaattaatcatcaggataggatgcttcatgcttcggctctttaacggcgctacctggccttcgttgtcagccgatcaacaacgcaaccaaaagctcccacccgacaagtaccggccttgcactgtttcatcggtctagagcagcagagcaacccacaggttggccgatttattatgccccgtgctggtgctgcgcttcaaccgctcggtgggaagagtacgaagcaaatgccgcctttcgcctccatgtgcgcagcgggcggctatcccgcttgttgtggtggattggtgttttttacagcacgagaggcaatccaccgtttgttttttctgctcgcagctggggctcggtggcgtggcttttcacgcgagattaagcttttttttctaataagcgcgtaattgagccggtttggacaacgacatcgacatgaacatctttcctattgtaggatgtagggacgtacatggttaacgataatgacatgtagtaacagcaaagctgagaacaccaacgttgagtcccggccttgttcaccctccctcaccttccactgcgtgtagagtatcatcacaatttcgacgtaaacacatcacaaattcagacaaagctcgttgaatccaaaatcctaataagttgccagattttggccgcaccattacacacgaggagaccgaatcagatgatcagaggacgtcgcagtgccgcctgacgacgccctggcggccagtcttgacgccgacggcgccgagcttctgcatcgccgcggcgaagtcctcgaagaaggccgtccggttgtcggcgtagcgctggacgaacaccctcgtcgccgggtactcccacagcgcggcgtcggaggcgagcaggccgagcccgcgcggcaggttcttgaagtagacctcgtcgaacttgcccggtgtcatgatgtcgttgaagatggagatggtcgggtcgctcctgtagttggcgcaggagctctgcagcgcgcgcgcgaacgccgggttcagcgacgggtcgtacccgtcggcgctcctgaagctgtacagcctgtgcgcgaactcgccgcagtgggagaaccccacggtgtgcgcgccggcgagcgccacgagctcccgcggcgtgaccccttgcgcgcgaacagcaccgccatggcgcgcgcggacatgttggtgcgcgggaggttcccctcgacgtcgcgcgcgtcggaccggcgcgcgtcgcggcggcccagcgcgacggggaaccggggcccgccgaggatgcccacgaggtcgcgcgccgccagcgcgaggatgtcggcgcaggagacggtccccgggcaggccacctcgagcgcgaccttggcgcgcgccaccacgtcgaaggagtcgcccgggagggagaggttgatctccgcggcgcgctcgggcgaccggtcggcggagagcggggagacgaggaccgaggcgtcgcaccccccgacgaagcagtcgtggaagaagaggcggagcgtgcccgccgccgtggacgggttggcgcgctgcttggcggcgacgacgtccgcgacgatccgctccacgcgcgggcagctgtggcggtagtagttgggggacagcctccccgccgcccccgcgccgccgccgcctccgccgcgcgcggcgacgaggccggcggcgagggctaggagggcgcagcggaggagaagcgcgcccattggcggcggcggcggcggtgattcttggctcgatttgggggaggagagagaggggggaaaggtggtggagagagagagatagaaagagaggaggtgagggggattagtggagagtgggagtgtagtggagagtgaattaattgctggggtttaaggggtggaggcggtagtacgcggtggattgtaaagacgggagagcagctcgaggccgggaacggacggatgttcctcctctgcttgcggcgccatttcagcatatacagtttttctttacttttaccaacggaaacagtctcaaattactactagtacttacttttagtacttgcagactgttaaaatgactcatcatcatggtagtagtatacatgatccgtcttactcgagcagataatgatgatgggaagaagaacgatagctccaatattaattggtgcgaaacgtagccagcggccacatagcacgctgcacgccatatatactttgtgtggcctggccatacgcatctggtgcatgggatgggaagccctgcacatgcactagactaaactgaaagctacccccaacgtgtcctggagattttacgctcccatcctagcttcagtagcctgtgtgggctgtggtgtggacctgatcgttacgtgcaaatttctttgtccggatatgccttcgtttcgttttgactcttataattttaaccttccaacaaaactccccagattagagcatctccaagagactagccaaatgactctacaagctaaaatttggctaacttggacaaaaaaatctactccaacagactagccaaataactctccaagctatccggctggctaaattcccctcctcactggccaaagttggccagccaggacggcttgccatctggtgtgcatcccaccctctatcctatctctccccctttccccatccgccccatccgcgcaacgccgccgccggacgtcctcctagcactccatctgcccagcgccgccgccccatcctcccggccccggcgccgcgtcgatgttctcccggctcatgctcttctcgtcaccggcgtcgtctccgccaactcggcccccatcgtcggcaccgccgcccgcctcggcaaagcagttagcggtggcggcggccaaatcctcgtcaaagctgcaacccccatcaccgtctcgaccaccgccgatctcgtgtggcgaccccctccgtggctccgtcgaactcctcccgcggccgcctcatccgcatgcacgcgggctcatgtgtgaaaggaaagaagtagtagagactgacgtgtgggacccaccgttaaattggagaatgggatggagagactgttgaagtaaaaggtaattataactagctactttttttgatagttggctaaatagacatatgaagagtctaaaatagctaatctgttagagatactctaacgttacgcttcagtggagtagcgatctagcagcggtaggtaactagcctagcgcggtactgttgcttcactgatcgacaacggcaggctgcatttgcgctgctgtacgtagtgctgttatgtgtggccagtacggcagcaccgttgctggtgtgggtgcgttccacggagaaaaaaaaagaagtgcgctcttcacgggcagcaccgaagaagatcgttgttgcgacatggcaaagccgcagacaaagactccgagagaggagcacgaggagcagtagcgcggaagccgccgccccggtcacccggccgcgcgcgcgcgcgcgcccctctctgcgcgcatcacgtataaccgcgcgcgcgatcgacgcggccgccggaaacggatggatgcaggcaaactggctgcgagaggtgcttggggttcacaccgggcccggtcgcagcttgttttggtggtctccagctgtgtggttttagtgcgtcttctttcggccgtggaggccgggtagcgtagcgtaggctaggtatggacaaacgggagagaatcatcacaaggggagcagagcactagccctaaggccatcaccaatgtatatggcaaattgatccatatagatgggactcacataaataatttatccctatagtaatctctacaatgtatatagatataatgtatcattagaagaagagagaggagcagagatagataatataatttatttcatatgggtagtccatatgcatatgggtatcttttgctattttttttatatggactagttgcacaatagtaataggtgtaataggtggctgaatggaatattctattgcttatggactacttttacaccacattgtgatgccctaatggtttactactgctttggagtttgaagccatacttagcgcacacgcctcagggttcacatgactactccctccgtcccaaaaaagacaaacactaatttccgtgcccaacatttgaccgtccgtcttatttgaaaaaattatgaaaaaagttaaaaagacaagtcacgcataaaatattaatcatgttttatcatctaacaacaatgaaaatacgaattataaaaaaattcatataagacgaacagttaaagttggacacggaaacctagggtttgccttttttcaggacggagggagtatacattactccatccgtccaaaatacaagagattttaggtagataaaacatattacctttgttttttaaatagataacgctattgatttttttctcacatgtttgaccattcgtcttattcaaaaaatttacgcaattataatttattctgttatgagttgttttatcactcatagtactttaagtgtgatttatatcttatacatttgcataaaatttttgaataagatgaatgatcaaatatataagaaaaaagttaacgacgtcatctattaaaaaaagagggagtacatcctccgtctaaaaaaattaatctcatactaaaataggatacattctaggaggcataaattgttcaggggaccgaccagccaacccggctctcgtatgcacgcacggcagcatgtgccaacaaaacgtctcatctgtggatgtaaattaatttgcccgtgtttcacagcggtacaacacctccactgtcaatgccagctgttcgttaacataacatcaacaagagaaagagagagagagggaaaaaaaaacgtgccccgacgagaagctgcgacctgggaatgcccaaaaccgaagtgcgaccgagcagacgacgcatcgcagcacccaccaccagaacgcggcggcccaacgacagctttgctgtgctactgcagcgatccgcggcttcagttccagaccgggacgactccgtcttgacgcgtcccctctcgcggttgggtgggacgatgtgcggactgtgaggcgtacgcgggtgggtgggaggacatgcggcgaccgtggggcgcatgggcctggattccgcaccgcgtccaaaacaaatttttggaccaccaacgccgtggcctgtagtgtttctcgcgaggattcaggccttcagcctgatacggcccgcgcaacgtagtgggctttcaacatgtcaactaccagacttaacgaagcaaactcactgctcccaatggccaggacacgcgagattgcgagtaggcgagttgcaatggccgggacaccgcattcccaatggctggtcagctggtgcgtcgtacttctgctgcgcatgagcagtggtcactggtcaatggagacacattcagccgaaaatggttggtgtcacgactaccggtgtttgcatccacgaatcgtacgtgacacattgtgtttgcaaccaaccacgatgaacgttctggatcttgggctaagcaaccacagcagcacaaacggacatggcaccagtgacaaaacttggtggaagttggtagcgttactccccccgtgcctcctctttttactcccatagtattccacgacttttagcttaaagatagtactcctccactactacactgtagtacatggacaagcatatccgcggtcctggcaacacgacaacgcatgcgacacaaggactgacagagtgtatgtacatggtgataatgcagacggtacgtgcagcatttgcagtgtgtgctatggatggattggtggaggcttggagctgggaccggaggctaaagtttttctttttcttcgagtttttctttgctttggatgcatcatgcatgtttatcctccgtgaagattcctctcgcgctttctcgttaattgctcatgatctcagttgacaacttggcatgcctcctgtctccacgatcttgtggagtttgtccctatcacaacttcgtagtggcacggtgggttttggtgaacaacgcgtgcaagatttgtattactctcttcctttccaatttgttataaatggtagtgagaacaagattgcatcgtttcttttacaattaaacctcattgatcatttttatttaaaattaaacctcaccggtcaaagttttatattaaccataccacgatatcatttattcatacacagataaacgaacagatcatatatatctataaagttcatacccactaagtatagttaatgctaattctctcttctctaatgatgtcacattatcctaattgtttttagttttttgatgattcgtcaagggtgtaaattgcttctcttcacatcacctcaatttaagcttttagatgattcataaagggtataaattacatctcttccatccaaaagacacaccatacaatccaattatttataatctatggataattgataaaggtaaaaaaaatggggtaccatctagtatatagtacaacaatgactcttgcacacgtaaacaacaaagatgtcatggacttgaacacgaatagatatcggttaaatgatgattaatttaaaataatctcaaaaatatttagagatgattaaattgggacggagacatgatcaaattgattaggatggagggtagtacatcggttattcggtttcacgtgaacatcgagaaaagttttttttttccaggctaattccgaccagaagtctctgtttttccaccaacagctcatgctgttatggaaaaagcatttcctctaccccaacatgttaacccatcgtccccatcccagagttactgaccagaaaagggcgcagatatcgcagagcattgtctcgagcaagaacactccttcgaacatgtgaagcaagcgagaccaaaatatatcaagcgtgattcaagccgagatggatttcactagtccttttttacacaacaaaacatactagaggtccagaatactaacagtaacagctcgtcaacaccctctcttctctcaggaagaaaaaaaaagaaaaagaaaaaaggataactctggaaagacagaaacccaacggacaacaccaactactcaactaggagcaatgcaaagctaaattaagctagatctaggcaggcagacggatcgtattcgtgcgcgcttagctcacgggcacttggtcatgttgttgtgcgagacccagtcggtgtagcacctgccgcaggtctcccggttgccggccgtgcccgccgggacgcagcggcacgcgctgcagcacgtgaggcaggagcggctgcaccgcttcttgtgcgagtgctcgctgcaccgcgcgtcgcacgcccccacgcagtctgccaccaaaccaaccaaccaagcgcgccaggttatcatcagtagcacaatgaaatgagctgcctcgggttgttcaggcaaatgtgggcaccgtgcagtacatacctttgccggggtctacgatcttgtggggaggcggcccaaggggaggagccggagggtagtctgcggcctacaaaatacaagcaaccatgcattcggccaactattagagcacaagaagagaacacatgaatgtgtgtgtttatgcagctagttgtgcatttgtgtgtgcttttaccttgatggtgttgaggaggaggagagacgccaggagggcgaacaccgcgagcttgccgggagccatggcgacggcggccggccggcgggcgaggacgggccgaggtagagcttctcttgatggagagaggaggaggggccttgagtgattgatgagtggctggctggctggcagtgtgctgggagggcagtgaggcgggttaaatagagtgagcagctagcaaagcaggggagtgaaggaggctggagagtggcagtggcacagtgtgtgggaagtgtcagggtaggggtgaacgtggccgtggtcaagggctcaaggcgccaggttggctccggtcggagtgaatgcatgcatgcagtcagtccgtcagtcactcgccagtactccctccgtcaaaaaaaaaaaaaaaaaaaagacaaatcctagtttccgtgatcaacgtttgaccgtccgtcttatttaaaaaaattataaaaaaattaaaaagacaagtcacacataaaatattaatcatgttttatcatctaacaaaaatgaaaatatgaattataaaaattttttatataagacggacagttaaatttagacacgaaaattcagggtttgcctttttttacagagggagtagctttgacacgtacggaaaaggtgagtaaacaacgttcactgggcggcatatgttaaaacatatcatactttacgtgtgaccgtttttttaaaaaaattatataaatttttaaataaagcggatggttaaacgttggaaaaaaacctaaaattatgtttttttaacagagagagtatattgactagaaatgtgacaagttataataaaaaaattacgactatgttatatagagatataagttaaaagaaaatatggcatgttataagtgtggcgataaaccaaaatatcaagatgcctagccatccttgtagtgacatcgcaagcaaacaagctgctactgctcctcttgcttgaggaggaaatgctacgtgtcctcgtctctattagagacacgactagcgactagcacgatgagttgaccggcaatgtgctatcaaaaactaagaagtggagatgacaattgaaggatggggatggagagaaattgtgagggagtgatacggttctaactttaaaatattacaatagcatctaacagattttctaaatagtaatattatttttctaatataatatatttacgatgatatagatctaattaatccttagtttttatagtatttgttggctataagtatgatgtgtcatggcaaaagtttgtaagtactttgctttagaaaaaatgtgatgttacaaatgtgacaacaaatcaaacactagttttacttgatgaaaaagcctagccataagtttagcaaattgtagcatctaaacaaaacaccccggtatcgtagggcaccacactcttctgtgcaaagctagtagtccttcagttttaactttagaacaaatagcagaggacaaatcactctaccacatccaaccgtccgttacaagaaaaaaacaggcatatgaacacggtagcgttgagggggtgtttagacaataggcgtaaagttttgacgtgtcccatcatgtattatatagagtgttgtatagggtgctcggacactaataaaaaaactaattacagtatttattagtaaaccacgagacgaatttagtaagcataattaatcaatcgttagcacatatttactgtagcactatattattaaatcataaagcaattaaagcaattaagtttaaaagatttgtctcataaatagttgtaatatgtacaattaattattctttaagtctatatttaatacttcatgaagatctttaaatgttcgatttgagggtgtaaaattttagagtgtcattggctcgcgcgccgtgcaacgcgacacgcggggaagacagacacacagcgtacggtagggggtttggtgagtggcacgccggtgagcgtacgagaggagagaaggcgcgagagggctgggcgatccgtgcgcagtgggtgcaggtgctgagctgcattccaccgagagccgagagggagagagggagagggaaggggccaggggagcatgttgcatgtgcgagcgtgcgatgcactgcactgctctgggcgagcgcccaggcgagaggctctggagcctgggccatgtcgtacaacaaggctactcctacatggagtacatcgcgtgctggggcacgtcacgccgccccaggctttgtcggatcggcttggaaaaaatcagcgccccagcaagcagctggaggccttgagtactccctgcaccatccattcttaaaaaaaaaatataaaatcaaactctaaaaataaacctgaacatatgttcctacaaattcatcccaaaaattaatttattatgatacagagtgagtacgttttaaaataaataaatctaatatagaatatgatacaccctaacactatttagattcgtagaactataatgtgtcacgttttgtattagattgatttattttaaaacggatagaatagacttgagcattttcgtctcttctttattttagtcttttcccctctttcttggcataagttggtctgactgattgcgtcgtgtaacaaacattatattattctaatatattgacgtgtaatccttttgcacgttcgagaaaaaaatagactagaggagaacagaaagtaaatcttaaggacttaaaaagtgaattatgtttttcttacaaacccaagaatgtgttcaaaccttggtaactcattctaaatagctcattagtgtataattaattaaggaagctgctatatcataaggtcccgtctggacacgatgatgccgtataggtatcgaatcctaatacttctgatacctatgatgtatcatggatatatcatgtgatacttcacggtatcaaacgacaacacataggtatcgactaattatccgttgatatcgtgcctaataacgatcagtatcaggccctgaccataccggttggtatcaagtatcaacccgattcttagataccatgatgtattgtaccatgcctctgcccctctctctctctcctccttcaatccacctgtacatcctacttctcttccgtctttaacaccaaacaaactcctccctaaatttactccctttctcctgtataaagaacaagaaagagataaaatagtttgtggttgaatatatgaatccgtggatggaaaatatcccacttttatctcacgcgggagaatcaactgcgctagcaacaacattttgttgcaaatcggctggcgtccttccgccgggccaggttaataatactccctccgtttcaaaatatttaacgccgttgactttttagcacatgtttgaccgttcgtcttattcaaaaaatttaagtaattattaattcttttcctatcatttgattcattgttaaatatatttttatgtaggcatataattttacatatttcataaaagtttttgaataagacgaacggtcaaatatgtgctaaaaaatcaacggtgtcaaacattttgaaacggagggagtattttgttgcgcgcgttgccgcttctctaatccaatttccacccatatcaagctcacctgagtcaacgatgacaagggagtactgcatcaccagatgcccaggcggccaggccgacgactctgcaggacagctcatgtttttgggaaaggctaactcgcgcgtacgcgttgcccgcgcgcacgccggcccattaagacccatgcacacacgcgtttccgtttctctctttttttttcttttttttacgccgcagtttcttctttttttcgatgtttgttattcctcccgtacggatagattagttccatatttttactagtgattagtttactagtaatttttaaatcttaacttcgaaattttcaaatctcgagttgaaagtttttaaatttctaagttgaaagttttcaaaattttcaaatctggacttgaaagtttttgaatcgagttgaaagttttcaaaattttcaaatctggacctgaaagttttcaaatctcgagttgaaagttttcaaatctgagttcaaagttttcaaatcttaagttgaaagttttctaaactttcaaatttggacttgaaagttttcgaatctgagttgaaagttttcaaatctcgagttaaaagtttttaaaatttgactttaaaatttaaatcttaaatcaaaagttttcaaatctgacttaaaatttttcaatctgttagtaaaaaaatctcccgaaaattttttccctaattactcgtcattagtgttaagtgggtgttaactaatattagttagggaggtaatactactctatagagtagttagggaggtgctcgctgctggcgcgcacgcgccagctagcagccccctatgttttttccaagggaacagcggacagctcgccatcgggtaggcccaagcatggcccaccagccatcgggccggcatggcccggtcggcactttgtgccaggccatgccggcccatgggctgcacctccgacccaggcacgacccaccagcagtcaggccgtgccgtaccggcccgaaggcacgggtggcctatagtacctcttttaaaataagtctattttccctccctcccttttgggctgtgacacacatatatagctaaaataagtctattttacgtccctattctttggaccatggcatataatatgtctatttttactccctattgtgtgtcgggcctggctggcgacccatccatcgtgccgtgccggcccaacgtgcccgggggggggggcaggcacagcccggcggtcgggcccggcccccgtcgggccgtgccgtgcttgggtggagccaaaatggcatgccatgggccaggtcgtcgggccttatggccatctatatcttcaggtccgtgcatatgggccagcctgcaggcccgtctatccttagaccatttactgcactcctatgtgacgtataaactcgtccagccatgtaaagacactgggctgtcatggaaggaaaaataggtgggcccatgtgttaacgaccaaattgcttctcatgtcttatgttggctacaagatcctcgcctgcaagcatctgacacagggcccaagtcggcggggaggggagaaggggaagtgacggcgctacacgtcggggttgtcgtcaccgagggccgtcgtggtcgtcgtcgccgagggttgtcagggtcactgtcgatgaagaccatcgggccgccaacagatcagtcgccaactccgccgtccaagaagatccaacggtgatgccgccactgcaatcaaatcggttggcgagaggaggatgaggcgaacgtcctcatggagcgccagcaccgcgagcagtcgtgccatccacgtcggcgcaggcgccatcagagctcgatccacggcctccgagctcggtttgcgccaccagaactcgatccgccgccactggagctcaactcgcggagagaaagagggctttgccaccttcgcctccgaccgccctttccgccttcgtttgctaggccgccggcggggtggggagagagaggaacgatggcaatggagaggagagaagccggcggaggggagaagaggtggcagtggagaggagaaacaccggtgaaggggagaagcagcgccagtggagggggaaagagatggcaccatttgagtttgagcgaagggggggggggggggggg

SEQ ID NO: 2455 - DNA, 1809 bp, Oryza sativa
agggagggaggagaaaaaggtatagggaggaactgacatatgggtccgtctcagggcttcacagatgcctcatgccatgttagatctagaaggagaaggagaggaagtaggagcggtttataggttttggagtcaccgccgagcagggggagcatggccgctggtgagtagaaccgccatggccaccgtcgagcaccgcgagctagctccttcacgccgctccgctgagatgcacgaggtgaggattgaggaggggccgcgagctcaccgctgtcaagatccagatccgacacctccactgagctccatccactatgagctagcttctcaccgtttgtcttgtcatgtgaggctgtcgtcaggatagacaagggagagcggagaggcggcaccattgagctcgtgggtgtgccgaccaggagcaggaggataggcaatggtctcggcatggattcctctacaaccacggaggccacctagagtcatcgaggtgcccaatgtctaacaatggtgaccttgtcgtgcggaagaggaggcagcgaagtcggtgatgcggatctggtgccatctctgagctccacacgccagtgcgtcactagggagagcaaaccttggcggcgttagaccttgctagcctcagagtccgccaaaccgcatggtggcgccgtcccttctactcgtcagctgattgaccagagtgtagtcagctgattccacctatactattagggtatagaatcggagagagaaggattagcacggacttaatatcggacatgatttaggtggtgtttggattcagagactaaacttaaactttagtccctgtcacatcggatgtttggacattaatttagagtattaaacatagactacttatataaaactaattacataaatgagtgctaattcgcgtgacaatttttttaagtctaattaatccataattagcatatgtttaccgtagcatcacataggctaatcatagattaattaggctcaatagattcgtctcgcaaattagtccagggttatggaataagttttgttaatagtctacgtttaatacttctaattagtgtcaaacatccaatatgtgagagactaaggtcctgtttctttcagtttgggattattataatctagattattgagtcagattactataagctagattgttataatctgtagtacaataagcggttagttgtttctttcctagattattagagcctagattattgggtttgcaagtctaaagagggagtggggtggcatggtgggtaatttttcacccaataatttagaaaaagctcacataaatgagcttatcagattataataagctgggctccagattataataagctactttaataagttgtctatttctttaaaccttacgacttttttttttgttctagtgttttaatcgtagacttatgaataagttctagagttacatttctctctttatccaaaatttatcttggttgcggcctagacgtttacatttggttgcatccttttgattttatgaaaaccgtagttttgttgttccgaacgatttattggtttctccgttaacgctttattcttcatccataagtttaaatattttatgaaaacatttctagttttctcccttgacgctctattttccaacctccgtttaaacattatgcttttattggatttatttattttcgaaagttttcttgtattaatgcttttgacatgctacatttttaatccataactttttgattttatgaaaaccgtagtttacttgttccgaacgatttattg

SEQ ID NO: 2456 - DNA, 1400 bp, Oryza sativa
gatgctcagtcaagtgaagcattattatcagctcttcactgtctggatctaatatgtaacatatgtattcaagaggtaaagaaacctcagatgaaatttggaagatccaaaattcaggttggacctgaatggttgaaaagttccgtgttagtatatgcaaagaaattgtggggagtaaaccgttcattccacgaaaaggtttcaatttcttccccttttcatttctacctccatactactggtatgataatatttaaaacgtttcgtgaccaattaatagataaaatatgctactaatatgatcaaccaatagataaagcatgccatttttgtgttctctactcatagtgatatctgactctctgtggtatcaaaacttttggaaccctggctggagattaatttcagattttgttctattccagactgttaattgtgttcttcagaaagcctggttatagcatatcttttgctgacaatctcagtgatttcttatggaactcttttcatggcagggagatgacagatattatgttttcaatctgaagattgctgaaatatttttgtgcttgagtgcatgtatggacaacaccatatttccagctgatgaattttgccagtttgtatcttctctacttgcaaaggttgtctgtggctgccagtttcaaggactgatttctatcactggctagttgaaagttctttagtccgcttgtgcatgttgttctatagctatcgtcttatagacagctattaattattcatttattttgtcaggcaaaaacacttcgcaataaggataccatggaaaagcatttgagcccacttataactttcataccagatcttgtatccaatgccccagatgactcaaaaggatatttattagaggtatgactaattttccttttactgatctctagaaagtatttgggttactttttaacgttacgaaaaatgagagactatattcaactgcaggcatttacagatgcattctgggattgcaaggtggattgcaagctgattttcccatatttggatgcagtgggaaaaatgctgtttcctgtaggttccttctatgggatacatactaaacttcctttgctacataacttcttctctctttttttcttttttttttttttgtgggtgacgtgttcaggttattaagaaataggacttgatgaagagcatgcctagtgaaaattgcctacttggtgctaacacacaaatatcttttagggagaaatgcatctccacatgtacatgcattacatgcactattataactgtaagtgcttgaagatttgggtgatggtatgaagatctgtaggttgatttgaattttcagtgttcgaatctggattctggaaccacatttgatggtgatgttagtt

SEQ ID NO: 2457 - DNA, 1402 bp, Oryza sativa
attaagcaaaagttacaagaaaacatctgctgagcctttctaatttcttgtcctctctttttattttcagtcattcaagtatgtttcatttcatagatgtgtatattagcaacgtaatcacatcaaaatccacattggcgcgcactcatcatcccatccaactatgcacccatcacaacaattactatccctggactaaatagctactctaactgcaatagatcgagagactcctctcctaaactaaaactcataaatttcagattggattatccatacacctcatgtttgttcacgcttttcacctatagaattatcaacttttttttccaacacatctagcgataccttccgcacattgtgaaatcgtaatctcaaaaaacagcacctgattttagacttcaacaatcaatcaacacagagcagaactgcatccagcgtcctatcctcgatctacggcaccaaacaccttaatcgaagcaaatatcagcgaaccattgcgactatcgattccccacatatgccacagctacatttactaaaaagcgaagcaaagcggtcgcacctcgattccatcgatgggatcattcggatttcgtcgctaatcgaatccacgaccggggcatcaaaacgcagtatattaattagagagaatcggatccgacgtgacgtcttctcacctgaccgctgcggccgagggtgatggtgacctggtgcctggatgacgacgccgaggaggccatcgccgccacccgccggtgagagggacgacgacggcggcgctgctgggagggaggagcgggaggcggcgcggcgcgtggaggagaggcgccggttagggtttcggggggaatggattgcgaattggcgattggccgattggaggcgtggagtttaccggcgctcgagacgggagggggagggactcgctttggtggcggagagtttttttttttcccttttcttttgatctcttttggattttgggcctatttcactcgattttcaaatttttttcgttcattttatggtctctttttgcgatttttttctcgtcttcaaaatatacagtgctgttttttattttcaaaatcagggggtcttaagcaatgacaacgagattgggggttccatcgagtgaatatggttaagaatccaaatcctgaaattgatttatccagggaaactgtcgtgacaaatttcgtcttttttatgccctggtcttagcttacgtatgtttttacagtataatctctctgataaaaagttactcctatttgacattcagaaacaaaaatgggttaaactttttaaattctatcaatcagttttatatattaaaatagatttgtagtggttttttttatcaaaagcataaactatttatatggccaaagcaata

SEQ ID NO: 2458 - DNA, 661 bp, Oryza sativa
ccctgtaagtttcagcccctatcttcattaaaagaaggtgcagttttcatcttaggccttgttagatccaaaaaattttggcaaaaaacgtcacatcaaatgtttggacacatacatgggatattaaatgggaaaaaaccaattgcacagtttgcatgtaaattgtgagacgaattttttgagcctaattacgccatgatttgacaatgtgatgctacagtaaacatttgttaatgacagattaattaggcttaataaattcgtctcgcagtttataggtggaatctgtaatttgtttttgttactagtctccgtttaatacttcgaatgtgtatatgcatacttcaaaaaatttacgcccaaagaactaaacacactcttaggaaagaacagtaggacactatttcaattagaattcacgaagtagcagaattcactgactgtgcatttataatttgatttcagaaacattaaaacataagatgattcagttagaaattgtctagaccaaactgaatattgaaacagtatgtttggatcatccaaagttcttggaagcatacgatatcttaatttgtttcaacaagaacatacccctatatttgaatccccaatatttgtcattttcaagagtagaaaaggtgctacacactcgaaattg

SEQ ID NO: 2459 - DNA, 1339 bp, Oryza sativa
cttgcggctaacttaatgtgacagttaaatactaaatgaccggtgttcggaaaagaaaatatttgagcccactgcaagagaaatgtactattcgatcatggcaaatgaagcttgaaggttacgttgctagtgaggaatatttctcgagaagatatcgctgggccgctccaaccacacttacaaactagcggcaggaactctggaggaccacatcaatgtgggtttctagcatcataggggtattgtagtaacttcctgtgcaccatcggggttaagattataactccacatttatgtttggggactatataagccagtcctaatctcatagtaaaataccataccatatattgggctttacaactcgaactcatctcgttcttagaataggcgggaaaaatgatacttttccgcctatcctctgttgatctgttacccaaggtcacgaaataatattttattatcaatgttttgctttgaatagttccttaaccaatatttttgttttggattgggtatttttattttcatggtgttttagaccatccttaattttaattatctacatctaacttgttacatgaaaaagaaataacttgtatatagctgtgagatttaagagtttattgatgagtaggaatcgacgtattctagattgttcaaacaatcgttcatatgtttgagacgagggtcggtagtcaaaagtgaaaaagaaaaaacaagactaccctgtccaaaataagaacgtcgattaaaagatgttttaaagtaaactatcagtaatgaaatatgatccgaaatgagaattactcaaaatgttatattatgatcatgccatcacacatgatcgtatcaatatccatcgacacgtgcacatgtgggcatgcgtgtgtgggcagcgtggcgccggcacacacaaagggagaggggagagcgagaaccacacgcacgcacgcacgcacgcagccacaacaggggagagattgcgagcgcgatggccgcctccacctccgccgccgccgccggggacgagccgtgccgctgccatgtcgtggcggtgccgtttccggggcgcgggcacgtgaacgccatgatgaacctgagccggctcctcgccgcgcggggcgccgccacggtcaccttcgtagtcaccgaggagtggctcggcctcctctcctcctcctccgcgccgcccggcgtgcggctgcgcgccatccccaacgtcatcccctccgagaacggccgcgccgccgaccacgcgggcttcctcgacgccgtcggcgccaggatggaggcgcccttcgagcgactgctcgaccggctccggctcgaggaggag

SEQ ID NO: 2460 - DNA, 1244 bp, Oryza sativa
ttctttccgtacaaatttcccagagcaccgtcaggaaagcagagcgtagtccttttttctgaattttctctgcattgcttgtttggctatgccaccagtcaagcagtgtactgtcctctgatgagtcttggaagcgccgtggcctgatctgacgcccaacctcagtccaaatctgctgcacaaagggacattctttgaagaggtgttgggcggtctcaaggtttctgaagcagagctgacaaggtgcggaaaaaatgtgagatcatcgaaatctatacactatacaaggtgcggaatgaactcgcgcagacacttagctttgtttgttacttatacgcacattccgaagtgttttgagtgctttgggtttaattcgttcaaaaaggtggttgaatataggcagttgtaggtgtgaatatagcgtggtaaatgaaacaccgtcaaataggagaacaatttgttagtgttctttcacataaatccattactgcgagtctggaacaaagctcacgtgattcagctaacaaaatcttttaagtcgtcaaaatggttgtctttctcattttggctctccaatcaacaaatcccctagtcggggtttaatcgcagaacacatcgccacttcaccccaatcttgagaggtatcgcttctttttaatttctctattaagatgaatccactttctgtaccaaacttgagtagtcttagtgtttttttgttttgtactaacatttgagagaggtaagtttctgtgcatctgaatcatctactgctaacagtttacaaaattattcactcttacgatcttatctacttttgatcagcagataaccctgatcagagacttgagcactatatctcaagcttggcttcaagttcaataatgttatctgatctcaagcctttaattcacagtgagagaacagtggagtatatcctagcatgtatctctagcatcagaaaagcacagtgcctcctattcaccaccatatatgagcttgaggccagtgtaatcgactctcttgaatcattagtcacctgcccagtgtacccaattgggccctgcattccgtatatgacccttgaaaacgagcataccaagtccaatggagaagctcctggacggatagattacttcgcgtggctggattgtcaacctgagaactcagtgctatatgtttctcttggcagttttgtctcggtgtcatcctctcagcttgatgagatcgccttgggccttgcc

SEQ ID NO: 2461 - DNA, 1137 bp, Oryza sativa
aagcaacgccgcttctcttgtaaaaatgcctctagtttacttcagataagttacccaagctcaaggctgggaagtactcatcaacaaaatcaccacaaacagatcgtactagcagacctgcagcgatcatcatactttaaatgaatccactatggtcttgagaactttctccgacgactgccactgcttgtcgctggcacttgcgacgaagagcaccaccgtgttccccttggcagtcgccttcgccagattgtgagaaccggtcagtgccaatggagtctctagcacatagctgtagtactgcacctcagaagaattgcccatgcatcagagttcagaaacatttagcactccaaagactgttgattcaaatagctgcacaagtagtgtgcaagttgttagggaagtgatcaagtgaagcttacagtttggccatcgatcttctccacggaggtatcgacgagctcgtcggagtcgaaggtgttcccggtgacaaaaggccccagagaggcgattagcctctcagggctaccgatgtcctcaatcgtggcgttcggcctgttcgtcaggcggatcaacggcgaggccaccacctgcaccttgccctgcttgtcgtcctcgaatttcacctccacccacggctcggcgcacttgggctggcagtagttgccggacagaatgttggccactcgcgtttgcttccaggtgggtggcagaatgaactcgtaaggttgcacattgcctggaattggtgaacaatcatattgagtggattcaacacatctcagtatgtcacacaactaaatcaatttctccaggcagagacgacagctaaccaaatcagaagccagaagccaagcaagcacttaccagctcgaagtgcaggagtgtccttggaagtagcccggaagaacacgaacccggggttggacgccgccggcggcaggaccgcgccgacctcgacctcacgcgcctcggccggcaaaggcgccttcaggaacgccgcgcccaatgccgcccccagcaacagctccctcctgtggctgacaaccgccgcgaggggcgccggccgcggggcagcgccaccagcggcaacgacagcggcggcgctgttgtcgtgggtggcagaagagcgcc

SEQ ID NO: 2462 - DNA, 4607 bp, Oryza sativa
gggttggggaactagatggaggagagagttgcctgcaaagagaaagggaggaatgaacttttgtgctgctggtttcggctttaagtactgtacaatggagtgtttatactgtcagataggtagcgtgtacagttaatcagtgcttaatgtcagaagataactaaactaaactagcgattttaatgcaattgatatatttgaaagttctgatggtattctggcaatttcctgagaaatcttaaattcaaactctgccgtacttgttagctgctgtacgcagcttgttataatctgcaatgtctgatcctaaagcccacgcattcttatagttaaccatgtgctagagaattttgcttaagatgtggattccgattaagattaaaaaaaatcacttgtttacacatccagttttttagtgtaagaacgtgtatatatattcataattcagtgattagttctagatggttccatgttaggaaacctacacggctgaaagtttcttttcttcctccatgtactgtgatactgatattgtgatttccagtagtgccagatggactgtagattgtagtacattcttgcgacagaatcatgaaaacatcacaaaaactcaggaaactccactttttggagcgagcgcatgagcttaatttagtaaactcattatgaaatatatcatctaacataattatactacgaactaacgaaatcactgaatcaagaacgtttaactggacaactcaactttttaaacagttcagttacaattaatagccttgccacctaaagcaaaaccaaaatgctcctaaaacaagccaataacgttagattaaaggaactattgcaatgatattatccttttggaaaatgaactgtactttacatactagagtttttttccaaatgatcttagagaacaaaaacacaaactaagggcaatcaaatagccggtttctgtgctgtactgttgtatttagcaaatccatgttcttatgtatcaaaccatatttgttccaacctacaaatgatttcagtatcctaatatgttacatatttcaggttcatctttgggaattgaattcagctacaacagagttacaacaggaagatcccggattctgcagattagggctggaaaggctgctctgtgcatgaccaagagaaatagatctaggaagtcgcttgcccgtacacatggttttcgcagacggatgaggactactgccggaagaaaggtcctgaagcgcagacgcgccaaaggaagaagggttctctgcacaaagacgaactcccccactgggaagaaacgaatgttctgattgaatcgcattctaagtcgctctttgtcacaattgtaagtgtatttttttatcccacgttctcggttatactcaaccataacaatggtgcaaatccttcacccggtgtccggttaatgtgtgaagtacattatcaacacaaattcaagttagcctttttgcttgtgcagtatttagtagttgtttgctgtgggaatatgttctccttgatctgcattgccatggttttcctctgatctatcttgactgcattctgagcatagattttgccaaagggcctaaatgctaacttgagcagttgctcaaataaactcatcaatttttctattctgtagtagaacgtcccttttattttctgatacagtccagtgaattttaatattcagatcatctcatcatagtcactccatgctccactgtgtaacacaatttatccacctcctctgtgccaatctctttggtacacacttatttgtaaaacaacctgattgcccatccaatcctctgtcaccttataattttgctactatcaggcgaaaaaatggataatatccagaactcaacctggaataaatgaaaggcaacaagtagcaaagagaacatttacattctaacaaactgaatccctcctcttcttcactcgcatcggcaagccgccttccatcctcaaggtcaccgagaacacaagccctggccgtccctcgccgccgacgaacctgaagctgaacctctcgaacacgcacgccgcgatggacttcatctgtatgtatgccatctccttgccgaggcacatcctcggcccgccgtggaacaccgggtacttgaacgggctctccggccggaacacgccgtcctcgtcgagccaccgctccggcctgaactcctcgcagtccgcgccccataactcctccaagcgcgccatggcgtacgcgctgtaggtgacctgccatcctttgccgacgaacgtgccgtccggcaagacgtcgtcgttctggcagcagtgcgagtccatggccacgggcgggtacagccgcatcgcctccgtgatggccgcgtgcaggtagtgcatctcgcgcagctcgtcaaagctgaacgccgccgcgtccgtgctcccgctcgacgcgcgcaccgcgcggatctcgcgcgcgatcctgtcctccacgtccggccggccggacaccagccagaagaaccaggtcagcgccgacgacgtcgtgtcgcgcccggcgatgaggaagttggtcaccacgtcacggaggctctcgtcgctgtgctcgccgctcgcggcgaagcgcgacaggaagtcgtcactgcgcgccagcccggcctcccctctctccctgcgctcccggacgatccgctcggcgaagccgtggatcgtggcgagcgcctcccgcatctgcctctcgggctccatgttgaacagcctcttgaagcgccaccgcgacttgaccggcgacatgaaccggtccatcacggcattctgcgcgtcactgaacgcgcgcatgaacttcgcgctctggggcgaggccatgctgtcctcggcgaggcacgccgggtcctcgtcgaaggcgacgcagcagatgttgtcgaacgcgaagcgctcgagcacgtcctgctcgtccagcgtccggccgtcgcgctccgcccgcgtgagcagcggcagcagcctatcgacgacctcggacctgacggtgtcgaccacgaagttcctcagcgagcgcttgttgaactcgtagctggcggccttccgctgccacagccactggtcgccgtcggagttgaagatgccgtggccgaggaagtcctccatgactgacaccacgtactcccccttggagtagttctggaagttggtcttgacgatgtgttcgacgttggccgggttgccggtgatggcgccggcgatgaggccgaagcccttgaagttgaaggacatggtgtgcgtggggcagcgcgccacgacgccggccgaccactcgaggaggcggtgctggttcctgacgaagtgtggcagtatgccgacgatcgggtaggccttgaggccgtcggcgcgaggctgcttcctggtgctgccatggcgcaggcagaggaaacagagcaaaggaaacagcaagaggaggagcaggggaacggatgaagtcaacgagagctctgtgcccatgtcgaattggtgattttggattggacgatggagatgccagcctcgtgaagtccgcagaggcgcagattatggagtgatgttgcttatttgattaagttagtcgatttgttgagtgcgagaattttcagaatatgccatcgaattcgcactactttcagaatatgccatccaattcatgctactttcagaatacgccatcggagcacgaatttcctttgttccgtgccactctgtctcttccgttcgtagcaccgtcgtcttctccgcccggcaccgccgtcgtcagtccgccaccgcccgcgccgacacccgtccgtcgccggcatcgtccatcctcgttggcgtccatcgtcgtcgtccacggcatggcgtgggcgcggagggaggcgagcgcgacgcgagtactagcagcggggcgagcgcggccgcgagtgctagcagcggctgcggcggcgggcgaagctgactgtctgcgtctgcgtctactaccgcccgggactggacctcgtgtgcgcgccttgtgaattttgaggcaccgttcgttccagggtgtttggggagattgagtctcgttttccgcgcgcacgcttttcaaactactaaacggtgcgttttttgcaaaaaatttctataggaaagttgctttaaaaaaccatattaatccatttttgaaatttaaaatagttaatacttaattaatcatgagctaatggctcacctcgttttgcgtatcttctcaatctcctcaatccccttcccctcaaacacaccctgagagtagagggcggccggtaaaaactccttgtatgttgttgctgctgcacgtacttggtccagatgatgagtgtgaattggcaaggacggaagggaacggaatgggtaggtagtagttggatacttggattgttcagaggaggacgtcggacttggcggggagtcgcttgtagaagttgaaggggacggatggtgagcgcggccgcgagtgttagcagcggctgcggcggcgggcgaagcggcggctgcggctgcgggcgaagcggctgcggctgcagaatggggcggcggcggggaaggggtgggggagaagccccttgtggatggtggggcgaggcggaatgcggcag

SEQ ID NO: 2463 - DNA, 638 bp, Oryza sativa
ccacaactaggaattattaccctcgaccaacttatgcagacctacagtttgaggaaatgcctcagattcaaaatatgacttactacaatggcaaagaaattgtagaatggaacttagatggctttactgaatatcaaatctttactttatgtcatcaaatgattatgtatgctaatgcctgcatagctaatggaaacaaagaaagagaagctgccaatatgattgtcattgggttttctggtcaattaaaaggatggtggaataattatttaaatgaaactcaaagacaggagattctttgcgcagttaaaagggatgatcaaggaaggccattgcccgatagagatggtaatgggaatccaaccggtaacatttctgatgccttagccactttaatctataacataatttctcactttgccggaaactatcatgatatctataaaaaaaatagagagcaattgataaatttaaaatgtaaaacaatgtcagattttagatggtataaagatactttcttgtcaaaactatataccctaccagaacctaatcaagacttttggaaagaaaaatatatttctggtttacctcctttatttgctgaaaaggttagaaattccctaagaaaagaaggggga

SEQ ID NO: 2464 - DNA, 1616 bp, Oryza sativa
tccatgtttgtgcatcattctgaaataaaaatagttggtaattctgcttatccagatttccagacacgtttatctttggataacccaatatttgaacaaaataaacatctgaatacataaattgctttcacaacaaacatttcggcgtgctccaccactcttacactctaaacttgctaataaaacagtaatgaatagataaactacttgtgcagtagaacaatatcattatttaaatctcatcagaactgcagcgaaaatttttttgttagaaataacgagataaatgcattaacatatgaatttccatgttatacttcaattgctttggtattgtgtcgggcaaagaggaatgtgcagaaaaatccagagggttctgagcaaccgtaggaagtataacatggaaattattcatcactttatctactccaataccagggaaaaagaactgatgtatgttatgtattacgaatttgattgaatgaatctgaatctttagctgacgttgatcctcagcagggagtgatcaaatcccagcatagcatgattcactaataaaaatgcctcttatggttagtacaaggtaaaaacaactgtaggatgcatgtagtactacattaaggttaacgaaatttccttggaaacgatcttgactgaataattctttgtttaaggaaaagaaatagggtacaatacttgcactgttgcctattaagcagcacggagtatatgcacttcacctgaaggttaacaaaatttccttgcaagtggtttgtactgaatcgccatttatgttaaggaagaaaaatatctatacaatacttgtctatagaaacactgagctcatgaagattaacaaaggaaatgcgatctttactgaatcacccttctttaaggaaaagatatatacatagtgctatcaagtaacactgagctacatgtattacaactgaaggttaacaaaatttccttggaagggattttgactgaatcgcctttggtgaaggaaaagatttacacattactagtgctcttgagcagcagtgggttgcatgtgctacattgaacatcaacaaaaaaaaaaatctcctaagcaatgtttgactgaatcatctagtgatgtagagagaaaatatcagataagagtagaagattcccttggatacataccatgttcttcgacaccttaatctcagagagtagatcagacgagcacttcgaccttcttcttccccttgaggaagacctccctgtcaacaagctcacgcatgtatccatcaaactccacaggaactccaccattgagcctcttcatctccagaaaccacttgctatctctcgcccagagttcctcaaacgcatctaggtaatgcacactgctgtactttgccttcagcgcatccaacaagaccacgttgatgccctctcccgcaacatacacctgccttcctcctccattgagtctctcctcaatccttcttctgaggttcccatcattgccaccaacatgaacagagtcaaaatctacttgcatccttgatatgataccatcaacaatgtccatcaagcttggcgccgtgcgtattgctccctgcggtggacggaggacatgctca

SEQ ID NO: 2465 - DNA, 3885 bp, Oryza sativa
agagctgtgatgtgggaggcatcttatcgagattgctaaggggcgatcgatcgcccctagcgatcagggttcggtccctcctccctccacctggtttcttttttggtaccgcattactttcctattttagtaaatttgtgcaccaaaagtttgtacacctcaagtttacacatctaaagtttagagacccaaagtttataagtcaaaagtttatatatccgattcaaatttgaatttaaattgaaatatttttatatatagtatttctatacatctaaagtttatagacccaaagtttataagtcaaaagtttacatatctgttttaaatttgaatttaaatttaaatattttctatatatagtatttctatacacctaaagtttatagacccaaagtttataagtcaaaagtttacatacccgattcaaatttgaatttgaattcaaatattagtttatagacccaaagttctataagtccaaaagtgctgcataccctagtttcaaatctatgaatttacaattccaatttttgtatatatagtatttctatacataaatttttccaacttttattttttttaaaaaaaaatttatagtgtactgtaataggaagagaagaagggaaggaggaaggagtgtatagccgtataggggggaggggcgggcgccgcccattagctttacctgcatcttatccccttagagcaggtacaataaccggcggtactgcttccacataagattttgtgatgatctggaggagagaggggaagagagagagagagagagagtgagccgacgactaatttgtcgccggactgcacgtgccggtcgaggagttcgtggggctcgcctagatgcttgcgctgcctgccttcgtcgccaactcctgcggccactggaccaccgccctcagcctcgccggcgtcgacgcacggccgccgcggtctcccacatccgtcgcacggtccccgtcacccctcgcctgcacggctgacgccatctccgacgcccaccgctctcttccgcctccgccgcgcggcccggccaccgtcgtctccgacgcccaccgcacggccgccgccctcttccgcctccgccgctcggcccagccgccgccgtctccaacgcccgccgcacggccgccgccatctcctgcgtccgccgccgctattttccaccccgccgccatctctgttgctcaagaaccaaacaaagaagagaagacatgaactgatgggagaaagagagagaaagagaatgggaggtagccggtaggagaaggtggtgggtcccatgaaacaataaaatattcgtgttatagtatttttattatagacattagttatattgtttactatatatgacatggctggtttttaaagccaacaacgggctatattattgaccttgctcttagcagattctatcgaggccatagcgacaaacaaagacaaaaggtagtccgtgtgatggggcaaacttgacgccacagtggaatcaagaaaaaaaatcaagttcgctcatctttgtgtgttcgcaaaaaagacaagtccgctcacccttttgcgcattcggaaaaaaaagcaagtccgctcaccgattcggccaaccgagttggacacgttccagattcttgcccactcatcattgatcagcggggaaggcgagaggatgaaccgatgaacaccgagcaccaggggttgtatcagttgctcggccttgtctccagttccaacaccgctccgccacggcatacttttcggctgagacgaagtattcaaatttgctcgatgtgggcgcgccatgggcagcccatcaactcgtgcaaatagcttctcctgcaaatctgcaatcctatatccgacaactcgtgcccatctcatttcgctcggtgcgccaaacacagccgcagaactcacgtgaatcccgaaaagcgtggctgtgtgtgggccattcaccattcgggtaaaaaaccggagcacgacaccagttctattttatttctccaaacaagcgagagcaatgatacacacataaagtatggagtcgacaagtccagctagcctagcatcacgcttgtttgattactccctgattgtcactttcatcggcaagccaccctccatccgcagcgtaagcgcgaccacgagcccagggtgccccttggcgtcgccggcgtaccggaggctgaactgctcgagcacgcacgccacgatggacttcatctgtatgtaggccatctccttgcctaggcacatcctcggccccgcgtggaacaccgggtacttgaacgtgctctccggccggaacgcgcccgcctcgtccagccaccgctccggcctgaactcctcgcagtccgcgccccagatgtcctccacgcgccccatggcgtatgcgcagtacgtcaccagccaccctttccccgcgaacgtgccgtccggcaggaactcctcctccttgcagctgtgcgtgtcgaagggtaccggcggatacagacgcatggactcggtgatggccgcgtggaggtactgcatgtccctcagctcgtccaagctgaacgtcgcgccacgcgttccctcgctgccggccgacgactgtctcaccgcgcggatctcgcgcacgatcttgtcttccacgtcgggccggccggagagtagccagaagaaccaggtcagcgccgaagacgtcgtgtcgcggccggcgaggatgaagttggtgaccacgtcgcggaggctctcgtcgctgtgctcgccgctcgcggcgaagcgcgacaggaagtcgtcgcggcgctccagccgggcctcccttctctccctgcgctcccggacgatccgctccgcgtagccgtggatcgtggcgagcgcctccctcatccgcctctcgggctccatgttgaagagcttcttgacgcgccacagcgatttggccggcgagttgaaccgggccaagatggcgttctgcgcgtcgttgaacgcgcgcatgaactccgcgctctggggcgcggccatcctctccttggtgaggcacgccgggtcctcaccgaaggccacgaggcagatgttgtcgaacgcgaatcgctcgagcacatctcgcaagtccagagtccgtccatcgagccccgcctgctccagcaacggaagcagcctcttgacgatctcgaaccggacggtgtcgaccacgaagttcctcagcgagcgcttgttgaactcgtagctggcggccttccgctgccatagccactgctcgccgtcggaattgaagatgccgtggccaagaaagtcctcgagcatggacacggtgagcttgcccttggggtagttgtcaaagttagtcttgagaatgtgctcgacgttggccgggttggcggtgatgacgccaccggtgaggccgagcgccttgtacgacatggtgttcgtggggctgcacttcatgatgctggtcgaccacttaaggaaccggtgcttgttcttgatgatgtgcggcagcgtgccgaccacagggtaggacttgagtccatgaatgcgaggcttcttcttgggatcctggtgcatgtagaggaagtagaggaggggtagaaaagcgagcaggatcaggatgagcaagagagaagctgagattggggagagttccatggcaacagtgagatgatttggggcttttgtcttgcgacttgtgagctgtgattggcgcaagtgcttgcgagaagaggtcgatttttttttttttttgtggctggagattgcaagtgatgcatgatgtgtcgttatttataacggaggtgctaactactaatacctccgttttttttaaaaaaaatagataatgttgttaacttttagaataacatttgattattcatttataaaacaatagtgtaa

SEQ ID NO: 2466 - DNA, 1854 bp, Oryza sativa
catgtaaaaatcaacggagtcatatataaaaaaaataaaatagtactatgtaatgcggacaactactatggtatcactctatcacaaatatagttatttctagctttcaattttttttacttcctccatcccaaaatgcatctactttttagttcaaactagaaagtatagctatattttgcaatggagaaagtaaaatgtagctatttctctatctatatctcttttttaacaaatcagaattgtccatcattttatttctataccaactttctcttctcaacgaacataatatttcaccatttaattccactaatttctccttctcaacaaatcctaatatgaacttgtgaattttcaaaatcacacgagttgcacgcacaattatatttaaattaatgcaagtagtagtctttaggaagcttaccacgattagatcttggggaaacgcttcccacgatcatgcgcccattcctcggtctctccgtcaaatgatttgatcaatgacaagtaatgcttcttatcggtatttaataacaaggaaaatcttcaaataaagattttcttatcttttcaactgtttttttttatcaaatatacgatatggttataatgttatattccttttattaagatctcacaacaaaatcttacatttctatattcaaatgaaatctcgtaataataatctcatataattatattctttgaagtgtttacataattacatgtgaattgattttattttttataaaattcctccgacttatattagtgacagtacagatttgaagtactttagtgcccatactgaccacagaacatgaacaccacgttaattaagcagggttcgatattttggttttagaaacttcggtcccgggtatgaaattatttcatccgaaaattttaattttatgaatttagtaaattttatacaaattttatctaaattttaaattaacttgggtagaatatttcaaaatctccacaatttcagatcaatcgcctctcttcctcgattgtttttcctttccaaaatataaaaccatgccattatggttccgttgtgggctacgcctctccatgttgtgggtcgggttgtcgagctgcggatcttttggccaactatattcccccgaatggcgaatgtctgtacctgttggagctcacatgaattgtcgtgcctgagcctcttcctcgccacgacgtgccgatctagcacggcacggcccaatgatcccccgctcccataggccgtagctcgtcaatgggcggcccaaagagatgagagatgcaaaatagatgtattctagatatacaagacacgacccaaagaaatgagggaggcaaaatagacttattgcaaggacgagcacgttagactggttgtgccttcagaccagcatggcacagcctgtgtcatattgggtcgtaggtgcaaccagtgggcgagcacggcctgactgactgatctcagaccatgctttggttgtgctaggccaggccgtgtcgagcgactcatttggccatctatagggaaaacaagaaaaccattcatgctttatttctgggatcaaagcaagagcaactctagcaatgaagtggacgatgattactccctggtggtcacttgcatcggcaggcctccttccattcgcagagtcgaccagagcacgaaccctgggtgtccgtcgccaccggcgtaccggaggctgaactgctcgagcacgcacgccacgatggacttcatctgtatgtatgccatctccttgccgagacacatccttggtccggcgtggaagatggggtacttgaacgggctgtccggccggaacgcgcccgcctcgtcca

SEQ ID NO: 2467 - DNA, 613 bp, Oryza sativa
atttacagattccgtctgtaaattacgagatgaatttattaagcctaattaatccgttattagcaaatgtttactgtagcatcacatcgttaaatcatggcgcaattatactcaaaagatttttctagcaatttacatgtaaactgtgcaattggtttttttcgtccatatttaatactccatgcatgtgtccaaacatttgatgtcacattttagaccaaaaatttttgggatctaaacacaccctaagcttagttgcagcagggttagtcatcaactactcctacatattttcggttagttccctcgtggtgctcaattaatagagttattatagatagataaatgtgcttacgacttcacataggtcagagaacaaaagtcaaacattcccttgatcagaagaactggaagtttcttaggcttgtctaattttaatggtagagtttaaattggtgacattattggttccaagagggcaagtggaactaaatgtttctaatttacttaagatgaatcggcttgcagctcaagattcaggagtggatcatcctatcaaggtgagaagtgattcagcgcaagcagatcgttacaatgactttgttgtgccgca

SEQ ID NO: 2468 - DNA, 586 bp, Oryza sativa
gtattgaatttctaagattattggatttttggtctaaaggaaaaggatttaattaaatcctttttggaaaagaaaaagaaaagaaaaggaaagagggagggattatagacttttcctcgggcggctagggcgcggcccaagggaaaaggagcggaccggccgagctaaatgggccggccggcccaaggcagcccaagtgcgcgcgcgcgggaggggaggagagagagggccggtggaccgggctcaccgtgcgcggtcccgggtgggacccgcttgtcagcggctcggctcaccgtgcggagggagcacgcggcgcggcgctagggtgggggagggacgcggtgcacgcgcgcggtctgcggaggaacggatgcggcgggcccacgcgcagcctcacggctcgcggtggaacgcgcgcacgggaggggctgaccggggtcggcccgtcccgacctcggctgggccggcgccgacgtggcgcctacgtggctgccacgcgggccggcgggaggtagacgacgacgcctgccggaacggacggcggtcgatagcggcgagcgacggagcaaaccacggcgatacaggc

SEQ ID NO: 2469 - DNA, 6291 bp, Oryza sativa
ccatttcccacatagccgccacatcggtgtcccgcgcacccgccgcctcccatcccacgccgcagccgccgcctgccgtgctcgcagagagggggagagagagagtgagagaggggaaggagagagagagtatatgacaggtgggccccacaatcttttaaaaaagaaagtactgactaggatgccacgcgtacgccacgtaggataaaaccgctttagattgagtcgagggggaggggggtaattcgtccggtattgaaagtttaaggtgaataatgtctggtttcaggttcggggggaaattcagtcgaccgtgatagttcgaggggtaagtgtttctttagtccttcctaactttgatttctcatttttcatgcacatgttcccatagtactaagcggtaagttttttagaaagtttctttaaaaaagtatattaatccatctttaaagtctttttagtattgctccgttttgtgtcaaagagaagcttaacgtaaaaatacttctgtaccacagtaccagaagtatcgtacagtaaaatctgagatttacgggatgaatgttgtagattttactataggctgtgtttagttcgatccaaagtttgaaatttggttaaaattggagacgatgtgactgaaatattatgtgcgtatgaaagatttgatgtgatagaaagctagaagtttaaaaaaaactttaaaactaaacaaggccataataaaagatgagattttactatactagtactactaagcaccatggttttgacatgcgtcaggacgcttcaggcgagaaaatgagttatgctagacgataaaagatggcaaatcaatagtcactggcctcacgaccaagccaaagatactccggtaacaagtgagagtaatagagtaggagtaataggatgcgatgtctattcattgtacgggtattattagagaaacgttcatctggatttgaatagtcactctttctaattatatgatattagtttattacctaatattcatgtctttttattggtcagtattgaaggaaaaagaaatgcctttcaaacatgaatttcccgaatttcccaccaaagttcaaatttcccgaacgtcccaagtttgtatacccccaagtactactactcccgaaacggagtatacatacattgcgtttatacggtgctcggcagtggcacagcatctgtcatgtcctgcaggagtagcgcacaggccattggcataggttcgaatgattagagatccagctcatttaatacccgagatttggctgtactctctccaccggagggcatggcccagcaactactcctacgcctgtacaccctgccactttcacttccaagagagggctgtttgctgctccccaggcacttgcttcttccatcatcatttgcatggctacctgcgttttggaaggaatctcataaatgcaaaaggtaaaataaaatccgtcttgcaaaaggtgatcaaattcgagcttgactgtttgtgtttggtgatcaaattcgtgccggtcgttgtggaggcaaacttcatttactacatttctgtagctagagaggatgactcgaagtactccagttcaggtgctggcattcgctcctcttttggcaatgttttcccagtccaggagtatccgtttttttttttttgacattgacattatggagtatccgtttttcatcagctacggacgtgtttagttcacgaaaataaaagttttgggtgtcacgtcagatgtttgaccggaggtcgaaagggatttttggacacgaatgaaaaaactaatttcataactcgctggaaaccgcgggacaaatcttgagtctaattaagccgttattagcatatgtgggttactgtagcactttatggctaatcatggactaaggggctgtttggtttccagtgacttattccaagtccctgtcacatcggatgtttggacactaatttggagtattaaacatatactaattacaaaacccattccataagcttggactaagtcgcgagacgaatcttttgagtctaattacgccatgattttgacaatgtgatgctacagtaaacttttgataattatggattaattaggcttaaaaaaatcgtctcgcggattagctttcatttatgaaattagtttttttattagtccatgtttaatactctaaattagcgtccaaacatccgatgtgacatgggataaaaagttttagtcccatctaaacaccccctaattaagctcaaaagattcgtctcgcgattttcatgtaaattgtgcaatcagtttttatttttatctatatttagtccttcatgcatgtgttcaaagaatcggtgtgatgtttttatgaaaaaattggaaactaaaccaggcctaccagtagtaaagtaaactgacctgatgttgtatttgaaataaaaagtctgtaaagaatttttgtaggattaccatcgttttgaaaaaaaatagggaaaatgatttacattctcggtctcttctgacaagctagcacacaactaaatcctttggtatatttaactctttggaacaaatggttggagatttcaaaattccattcgtatattttggagtaaagttagcataaaatcgtatttccttctggtcgatctcttccatgcaagttttgcattttccccatacgttcagtattgtcaatacgaagaatcattcgtgtgtattgaatcgcaggcccaaattgaattgaatctccagacccatttaaatagcaggaaccaaaaaaaagggggaatagaaaaatatataaaattctaacaaaaatacaagtgtaaaatagatgattgcaaaacgcggaaaaaaacataaatgaccgtttgattggatacatgaaaaacgcgagaatcatataagaaagatatactcaaaagaaatttcttcatagattgaagctcttgttaagtttgaaacctataacattgtccattcataggaattttaaacaatatgatacgattcaatccttggtttcaaagttattcatataaaaaattcttataaaattaaaatcctttagggcccctttgaatcaaaggaattatggaggaatttcgtaggattaaaatcctacaggatattttcctatgtagctctttgattcaaaggattgaagttttccaaatcctacaaaattcctatggaatggcttgttgcatataggttttggaggaaacttagcaagaggtccaacctcctggtaaaaatcctttgggtctatctttctcatccgattcctatgtttttcctgtggtccaatcaaacgatcattcttatgttgttcgtgtgttttgcaatcctctgttttacacttgcattcctatcagaatcctatatttttcctattcctctgttttttcattcctatgattcaaaggggcccttaaagttttttttttatgattttcatataaatcaaatgggactttaattaatcataggtttgaaattgaaagggccaaacaaaccatactgctgctacaactagcactcctaacctgacacgatagttttgggttccaaatgatcccttttaggctatccaatggaccagctgtttgcttctactactactccttgcttgacacgatttggagggagtagtgaccgtgtgtagccacgtgacatgtgcatgcccacggggtgttcggcgaaaggccagggccaaagcactagtactcctcctcttgtatataatggctttctccctcaacaatcgatctcacctctccccatccgaacccccaatttttcttggctagatttggcgcgagatgtcttgcctctctcgcctcaacgcctcggcggcgccatgggagccgccggtggcacgcgccatggccgtcgagcagtactgcccgccgccacagtccttgctcccgccgccgccgctgccgccggtcgccgttcccaccacctgcggttgcgccgcctgcctccagggctgcttcgttccggtgggggttcaagctgccttcccgcacgccgctgctgggtgcgcgccgccgccgccggtgatgccggtgatgatagtgtaccgcgtcgtgcagcctccgccgccggcagctcacgccacgcgctgccagatcacggagatcgaggacggcggcggcgtggagaccgcgaaagctgtggacggcgacgagccgcagccgttcatccgcacggtgcgcagcactcgtcgcagaaaggcggcggcgatccgccttcccaaggcttttcgagcggcgcttttgccgccaccgccgccgccatgcgcgttggggttcacagctactactacctccttgatgataaggaacatccccaataagttcctgtaagtttcaaccaaaatcttcctcgattctagccacgacccttctttaatctacttgtttttactcttagattaagaaaagatctaatctaatctcttctttttttttttttgcatcgaccaggaaggcgaggctgatggctatcctggaccagcactgcgccgacgagaacggcaagtgtcaccgccgcggcggcggcggcggccgcagcgtcgtgaagtctgaatacgacttcttctacgtacccatcgacttcaagttcgtatactactccaatctagggtttctttcctttcatcttgttcttcctgacctgacacggtggttgtgcgcttcttctttctataggactgggttcaacaaggggtacgccttcgtcaacatgacgacggcgaccgcggcgcggcggctccgcgcgttcctccaggaccaccgctgggacgccgccatgtccggcaaggtctgcgacgtcgtgcccgccgccatccaggtacgtacgcgcgctcgcgctctcgctcgccgcgccgcgcgcttgcttgcttgccgataggtgtttgatcttggccccctttcttggaaacctaccttcaggggctcgacgcgttcgtggcgcacttctcggcgtcgtgcttcccctgccgcaccaaggagttcctgccggtgtggttcgagccgccgcgcgacggcgagcagcagacgaaggcgcacgtggtcggccgcctcgtcgtgcgcccacgctagctggtcgtcgtcgtcggcgtcgtctccggcgacggcgtgggttgcgcatggtatctatcttgcattctatccctaccgattgtccaaatcgatcaatggatgcatggaaggatagaacgggagatagattcatatagagaggctggcttggcttggttgttcgtagtctttccttgttcgtttctactgtagtagtagcagatagaactactagttctgccgttgttgtgttgtaatcatatgtgtagtggctgttatgtttgagccgatcgataatccttcgttgttgtgtgttgttaacttaactctactagtactaagtaccgcgtcctccgatcaataatccgagtatttgctatggcaatgcccggttgatgtcctactaaccacaacgaaagttgtgctaaatggaatgtgcggcttaaactatgaaggatttggttttagataatttttggttatgtatttattttattttatttgcttctgaagtgcacagtggtttactactccattatatgcataacagaattgccttcccattaaagagcatagaattgcttatacagacttctaaaaacaattttgtcgatagtgcaggtgccaggtactactaatccagagttactagtactgtgtagggtatcagtagtacatcacagaattagtaatccagattgtaattgcttcgaagtactccctcactctaaaagaaccttggcttacggctatggccgtgtttagattccaaatttaacaagaaccatttacacagtttgcacgcaaattatgagatgaatcttgtaagctaattaccctatgatttgacaatatagggcatatttagatccatttgttccaaatggtaaaaagttctggtggcaaaagttttgacattgcaaaagtactagctggtgtttagatgcatgttaaagttttgccattctagcactaaagagaaagagggagtggttccaaagcactttttggcacaatttgctactatggactagcaaatgctaaatgccaaattgtcaacatttgctacttgtgtttagatccaaaatggcaaaaagtgccattttataaatggtaaaacttttgccattggaggatctaaacagggccataatgctacagtgaatcttttatataatgctacggggtgcaggaat

SEQ ID NO: 2470 - DNA, 6048 bp, Oryza sativa
tcaaatttgaatcattacactagcataacttattcattttaactcggatttgagtgaaacttgaacctaaattcatctaaattcataagctttccaatgatatataattcactattcaataaaatatatttataattataaattaattaatatcaaatgattagataatagttaacctaaatagtgtaccaataaataaaaaaaatggatattgtacagtagcataattatctttaatatgtcttgtcactatagcaaccaaataaattagttataatcaatccttcaaattaatgggtgtaaaggaaaatattagtgccatttactagcctatgtccaaatataactaattccatgacttataaattatttacataaagtttagcctcatattttgtaactaaaatataaacacacatagatgaatctttaacttgtttaggagagtaatcacaaagctagttgtatttggaccacttaaaaaaaattagttgatacaatgtcatgtgaagtagaatatatatatatatagtcggttgatatccattagttaaccaaacagagccatcttaaaatcaacatgtattgtatagcttacagtaaacagaaactactcaaatatatgatccaataataagatattgttgcttacacatatactatacatcccattacagtggtacggtatagtattaatttgcatgttgcatatatgaaattaagagggagtgtatgacaaacatgtatattaaataaatactagttataaatcttgacctcatataattataattatagttcaactgtaaattaggattattcattataaaattatgtgatgggataatctgtaaccataatatgattaacctaaacaactctaacatacaaagcatggataattattaaccttttataatttgttgtgacaagtaaaatatgttcataattaaagtaaggctcccatcaataaaataaataatacaaatgattcactctaattatttgattgatcctaaatacatccgacaacaaaacctctagtatacgaccattttatttagatagatgcatgtgtagccataatccttccatagccattagctagactaaaccacaaattagccagatacgtatctcattcatactacattggctagctcctaaatagaccaccatgataacagaaagattaagagactttagcccttagcatgttggaacccattagcaagcgcgaataatatgagcaaccttaggttcaacctcaacaaatatattttgtttgtgcatatttgattgttgcttgaatattggtttttctcgcgtattatagactttgtgtatcggttagtcgtgaggcaacgtcagcaacttccagaaggtgaaggttgatcaagaattatatcaagaataaggactatcctgagcaaggcaagtcatcactattccttgaacatgttgatcccaattgcgaaattgttttgtttacaaataaaattgcatgcaatgatgaacatcccacttgcgattatgccatgccttgattattgtttaccccttattccttcgtaaccatgtttacgtatgagtccctaatcaactatgacaaatgcttagaaatgctattttagaatcatgcatactcatatttatcaaatgctatatgcttgggcaattacctttgggaaggtaattgagatgcggcatgtggagacatgagcaccacattgccatgatattgatgacatgatttgcgaaaggagaaataaaactaaacaactgttttcgactggggcggacggaggatttgggtggtatctggaaaaggctagtaccgtccccggtcaattaaggaccgagccatgaagttaagcatgaaacgacccccgtacaaccgtacttctcgaatgggtatagacctagcggattagatagccgagcggaggcagtatctctgcatagatggttcacccctgagtgaggcaggtgcgctacggtgggacagtcgttgaggtagggccgagaggcgtgccctacatcggtgtcgctattggtaggactgccatgagtgtgtgagagagagaacttaacttgaaccataatttaatatgtgtgtgagacttttctttcccgggagcgccagaactcctctcactgctagaaacatggacgcctagagtgcatgaggatttaagttcatggagcgggtactgccaatgcgaggttatcgaaaagctttgccgtgacgcgtctcatgtgttgggacgaggctcatgtgttgggcagtcgcggagtgcgggtaaagtgtacatccactgcagtgtgagtaaaccaaatctattcgaatagccgtgctcgcggttattgagcaccgggacatgtattacacttggctagactctaaattcttaacttgtgggggatgggatattgcatgataaattttatgctgatggagccacttcccgagaggagggaaggtggacatcctcagaaaaccatgacgattcaatggcgggaagctatccttgggatcacaatggatgatggacagaaccgtcgttgtttaaagtgaacactggtgctaaaatttgatcagtctatgctaggttttaggcttgtgaaaagaattgtaaaattagctttatgcaaaagaacctgaagccattccttgaaataccctctatcatatgcattgttgttgtggtggcttgctgagtacggttggtactcacccttgctattcatatatcttctaggagagtgttgaagagaagcccttgtcggtacgcttgcgtatccaacaagatgatcggagtgcggtcttgttctaggtctcgttccccagtcgactgcctgtggcatgttaactgggcccttatattattttgtcttctgctgttgttctctaatagttgttggcctacctggccctaatgtaagtatttaactcttttagcctgaattcattcgtgatatgttgtgatccaactatgtatgtgtgtaccaactactgatccagggattggtacggataaacacagaagatttccgatttccaaaattgggggtctacatgtacctaactatttatagaggtgagaggacgaccaagagggtccaaaggtcgtgctccatcagattggggcgcaccccacatgggccccacatgggccagggtcccaaacaaagttacaagcccattggcccaatacaggtgacgcagcaccttgcggccaaacgagatagaatttcgagatgaggctggatccgttggaaggaggacttcgagagctttccatcaagtactcacgggcccaaaacggagcacgtatgtagatttggcggccgtttgaagtcagcaatgtaacacgtggccgaatcagattgcagcacatggaggacttgatcttgatgtcttcttgttgattcataatgtgagcaatggtcgtatccatagtagccatggtcacatcatagtatatcgcttaagaactcagcctagctgcagtacaccatacatcagcggtgtaataaacatagtactccatccgttcgaaaatatacaacatatgactagatagtgcatcgtaacaggtgatgtctcattagtcctagatgctatattatctgaggagggagtagaaagaaagaaaacaagctccaatcgtttggtcattaaccgttggctctgtcaccgattaggatccatctaataaacatgtcgtgcttttagcttcttcaggcggtcgttcgatcgaactggaccgatcggcacgagggattcacaacacacgatcgtcgatcggtcggacgatcgtcagggagaagagaagaaacagcgggcggtgtggctcccgaggcatacgcactgcatctttcctttttgtccccctagctagaacgcgtttgcatgtgttggagcaagagtaaggataataatatagctcacttattactattagctaattttaaagtcaacatatataatagattagctataaggttggctataattttcttctcatctctctatctctcacttatatattaattgaatttgtcttggagtttgtgttaagctagctcttgcataagagctaacactcttaactttttactttttgttacatctctcctcctggtaagtttacagaacgacccgccggggagacggccggcgcggaagccgcctagctggccaaagcgacgcgcgcgatcgacagctaccgtatttgctgtctgccggtcgtctgccctgaattctgatcgatctgcaaggggaggaagtcgccgtcacatccgacatgtacacgacttttttttttgttattacggagtcctccctctctaaaaaaaactaatcctgaatttgaatttggtcatacactatatctaaatttaaactcataattagattttttttaccgaggaagtatcatcgtgtgaacgtttaaaatgagaaatttaagttaggaaggagtaaagaaacactccccaactcatcccctatgaggctgtgtgaccgttccataggaaaagtgatggagtttacgctgcccagtgtatggcggctgcaatgcaagatactagtactactacggtagtgtctgaatctccttaagataaatatgaggatggagattaagtattttatataaaatgatgtggtaataacgtgtaattaattgatttttaattattacaaacttaaaaaatggattaatctggtattttagaacaaccttgatatagaaaattttcacatgaaacgtagcgtttagctatttaaaaagcgtgccattttgatccaaaatttaatccaccatttcatgacattcgaatgaggcctacgagtatcatgacggtagattttccggagagctatgcacaggcacagcgcgatactccatctaccatgcgacagtgcaggtgttcaaaacggtgtagtactagttgtacgagaggcttggaagggaaaggaaacaagcgtcgcactcgatccgacgcccgagatcgatccctccctgtacaacccgatccgacgcccgagattgatccctgtaccaaaggctgatcgatgatcgatctgtcgtctccatccacaaaaaggcttcagtatttggtacagggatccacccacaaaagcgggcgacgtccgatgcatatgcatgtcaatccagccggagagaaagactactccgatgcctgactcgccagcggtgatgcacggaaacaacttgtttcaacggctcccatcggttggcctaatcagaaaaaaaaaagggctaaattttgaattttcaagcttaattttgatattgattttgagatatttttgatgtagtttctttttcaacattagcttttaagtcacaaagaacacatttataaaagttttacgtacaaaatcatttttatttcctaataaaccgttttggtttattaggaaataagccaaacgatgagaccaaacgttgctgctataatgctatgcactccagtttatcccagagctacgaacttgtatccaccccaaacggagcaccgcgccaccgccacaataccacgagaaatttggggttatactatcgcaaaagagtggtttagctggaatgctatcccttcaaactgattcactaaaatgcaatcctaaactgaaggtgttcaccaaaatgttattttcgctcttttgggtgaatataaatgtttttcattaattttaactttcccggaccaaaatacccctgatgtgggcccacctgtcatactctctccactctctctttctcctcttcctctctcgagggagcgccggtggtcgggaggcgagcagtggcccggcgtcgcgtcgctgtccctgtccccctccctgctcaccgccctccgctcgccctgcctggccacctccttcgctccgccgcgacacgccgctgccaccgtagacgtgcgatggcggccgtgaggaggacggcgagggcattgcggaggatcgatggtggcggcgacgctagcgcgatcgaggatggcgatggcgttggagag

SEQ ID NO: 2471 - DNA, 4383 bp, Oryza sativa
ctacgagatggaaaccaacctcaagcccctggcaatatggcaacaacgtcttgccctccttctcgccgcttcggccgtctttgttatccaccacaaacatggagtaaccagcgcaggcgtacttgaactgcctcaaatcatgcccctgcgccgccgcctcttctctgggctcgtccaccacgtagcttgggactggagcaccgaaccaaacaacaacagtttcgtgagattctccgatcaatctgaacccgaaccaccagaaatcgatagagacaatttttgccgatggattgaaaacccgcacgccgatcgatcgcgcgctgcgattttttttttttggggggggggggggggagattagggttcgtttcgttttaccttgggggatggagcgcgggatccccacgcagacggggttgaatccgcgggatctgagcatggacgagtagtagaggcagcccttgcaggatttccccctcctcggaagcgccgtgcccgatggttttccggccgccgccgccgccgcgccaccgccggccgccggcgattcctcccccatatcgcgctctcttttcctctctcctctcctctcctctcgactccccgtgacgaagagatttcgtcgtcaaattttgtcctcccctgcgctggctgacatgtgggcccgccaacctcggcgattgggttcccgaatcgtacccgccgactagagggcccaccagtcaggtcagaggatcaagacaattcacgagtagttacgttacttctttggatttttaaaattttgatttgtactgtaggattaatttcaggttgccgtgatacttgtcacaattgggctgtgtttagttcacaccaaaattagaagtttggttaaaattgaaacgatgtaacgaaaaagttagaaatttatgtgtatagaaaagttttgatgtgataaaaaagttgaaagcttttagaattattttagtactaaacacggcgttggtttcaattgatcgaatcggtacgaataattcataaaaaaaaatcaaatggttgttaccaattctcaattctggcaaaagtcgaattatggttccatttatactccttaacaagaccatgtacatacacagaagtgaaaattatatcagaatcaagacctgataaacagcaccaaaaaaaaatctgaaacgccaggttgcaagcagaacaaacagaagatttgaaatggcctacaatcccagaactgatacaagaatctcaatacagaaaagaagcaggacaatcaacaggctacatgagacagaattactgtgtacaacaagcatacatccagcacagtaaaaggttggagcatatcaccagggggggtgctttagtacccatttcctacctgacaccaggatttattcagaatgtattactgcttgttccgaagcaagaaacagaagggtaggatgcacatgatttataactacaactgttctacatgacaattctgaggagatgcaactcgctacaatgcaccaagttcagaaacatgcatatgtgatatggatgtctactgaggaactacaacaaaagggaggatacaacagatgaaactgagaacggatctactgcctctctcttgattgtgacctagtatcagtcagcctgtcatcatgcctgtcactatccctgccgttgtgcctgtcatcacgcctctcgttgcctgacgattgccgatcaaactgccgatcagtcctctcgttttgcctgtcgtaccgtctctcgttacctgaattttgcctatcgaagtgccgactgtttcttgatggatatccatcattcggtattgaatgggaaaagttgcagtgctcaccattcttgcagtatcccttgtcgagtatagaatagcagactccccttttaggcctccacgaccctccatcaccacctgactgcgacctccaagacctcccaccagagtcaccgccattaaaatcaccaccatgcccagaatgcctgcctccattgtctcgctgctggttattccaatttgggttcccgcttggtgaattccagttcatattgttattatcttggcctgtcccatttccagtactgggacctggattaacctgcatgggagcaccccatccaacattttggttcatgtttccaacttggcccccccaaccaggataagaatttgtatttccttgtgcaatggccccccatggagccattgcaactccttgcatctgagttcccaccattgctgctgcatttggagtgccttggccttgagttgcccacatcatattcatattggtgtttccaggatttggtgtaacccagcccatgtttggaactgcatttggctgtgcttgcatagccaaacccatgttgtagcctgtggcactttgtgctgttcctccccaagacatgttcatgttgttctgtccaaccattccccagcccatgtttgcattaccctggagagtagctccccaggtcatatttccagccgcctgaggctgagattggccagatgtgcttgccaattgtgcccaagcagtgttttgattatcaccaccagccatggctgtggacgagggctgcactgcttcagcagatggtgttgatatcagctgagatggctttaccgagttggaagcatcagtttgtaactggttccttgcatctgcaggtaatgccatcagtttcattaggtatttaaaccataattttcattgaacaaaagttgcttcgggattaaaagcttcctttgtgaaacaacagatgctaatacagtaaaagagaagacaatggcataaacaatgaacaagcattgagcaataccttcaagttgttgagtatttgattgcacccctccaggttgtgcaccagatagtccaagatctgtgaagaaccaaaaaagaatgtttaggccatattgaaatacttcttcgcggcgattttataattctcagcctattaccattcattaaagaaacggtgtacattttttttatatattaagtatttgtttcctcaatacattgaacgatataaaccttcgcaaagagcctaccttcacccgatgacctcatcctttcacgcgaagcatcttcccccaactttgaatcgtttccatcagctaatctgccatcactttgtgataaaaaagatgctatctggttctgggactgcaactgtgaattaactacttctgcactcactgtcgcaggacctggtacaggagttagctgacctgcacttcctaaagctgcattttgtccaactacaaagctacccatggcaggctgagaaagtgtcacaggatttattgcagttccaaactgacttgaggcgttccaacttccactaagagattgttggactgcatacgctgcttgagagttttgcattccataataaccttgtgtactagattggatagtggctggtccaagatttgccgcatcgtttccctgaccagcccttcctgagaaagactgtgtgctacttagaactgctgattttgaaggttgttctccagctcttgttccttcctcaagaagggaatcattacggggcctaccatcaacatctgaactgcttccaactggcggttcccacggcggtaggtctttctcaaacctcccgagcaaagcatctgtcaataatattgaatcatcttgcttctcagtagacttccatatttttaaattcggagggaagtacccactgccattccatttccgcaactgcactattgagaaaggaccctggattttaccggtaggatccatgtactgccagattttttcagactcattaataactgactgtgatgcatgtgttccccctgaccctatattggctcctaaagtttcagatgaaacaccagatagaccatgtggagcattacctgcagtagctcccactttaactgcgtgtgtaccgatgtttgggctatctgatttacttgtgtaaccagcactttcaccgtgagacgaaaatgcaggtctgcgtccaaggggtgactcgatatgtgtactggattcgccccatgtgtttcgattagactcccagttggtttttaaatctctttgtgcaggactcctaccctctcctttacctggagatacaggattattatctttcttagagaaagatcctcttgacttattgaagctgcctgtacaatagaaaaaagggagtgatgtcagatgagcacgcatggatcgaaaatgaatattatggggcggaagcaaaataaaatcaagtacttcttccagtatcctgctcttgttcctctggagattcataatctggatccatggtatggtcagcatgaacttcaggttcttcattcagcctacgaacacgctcttcaggggtacttag

SEQ ID NO: 2472 - DNA, 2913 bp, Oryza sativa
atcgtgcgcgcgggctgtgtttcgcacatgtgtgttgaacccgtgtcacaaaataggaatgtcggtctttgaacacttcgcacgttcgaatcgatcgtccacgatatatttgcccggattttaaccaaatttcatgtgaaattcgacatgcgaattaaaattaaaatatccctctcctgtcccgtagctggcgtcttgtcgacgggtctctgtagctgacatgtggggccatggcgcgacaattcacgctcggtcatcatgccccttgccattaatgggatgtgaggccttggagaagaaaaggtgcgattattcaatctttctttctgcatgtccctccttctccttctccatcccctcccccggtggtgcagcgtgccatatcgtcagagagagacagtagccgcagtaggagggagttgttgccggagaagtgactgtgcattctgcagatcgtttctgcgaatcctcctatggttgggacgcgagagagacagagagatgctacaggatgaaggcatcagatcggttgggacgagagagagagcaaggacgatggacgagaccggcattaggaatgcatcgggaagtggagatgatccgcgcgcggttgcgccggggggattgatcgggtggtttgccaacacatctctctgtacgagctctgaccgcgtctactactagcctgtagtgctactagtagtaggagtatgcttggattgtgctgaatcctgtttgtcctcaaggctcaatcaaattaatgaccgtccttggcaatattttttaaaattattactcctacagtggtagtactacatgctgtggagtggtcaggtgaggggtgccgtccaggcgtaagcgtacgagcaacagttctcaacaggtgagagttgtggttcggaggcgagacgagctttgctctgtcaacaacatttgagttgttttgggattaaaatttgacctcttgctgtatacacagtctccctctcgatgggctgacgattgaaatttcaccaaatgcgtctaagatcctgtttagattagatgggactaaaactattactatctccttccttaaatatttgatgccattgacttttttaaatatgtttgaccgttcattttatttaaaaatttttgtgaaatgtgtaaaactatatgtatacataaaagtatatttaacaataaatcaaatgataggaaaagaattaataattacttaaattttttgaataagacgaatggtcaaatatttttaaaaaagtcaacggcgtcaaacattttgggatggagggagtacatcggatgtttgatactaattataaatattaaacatagactattaataaaacgcattttataaccctggactaattcacgagataaatctattgaacctaattaattcataattagtctatgtgatgctacaataaatatgcgctaattatggattaattagacttaaaaaatttgtcacgcgaattagctctcatttatgtaattagttttataagtagtatgtcgatgtttgatgtcgtgattccggtatttgcatagtatggggattgttggtactaaggtatatgcgagactaaggtaaaagagacggaggcgaggaattttatacaggttcgggcccctgaattgtcaggtaataaccctacatcctgttggccgaagccgatattgctcttattcaccataatcacaccagtacaatatttggggtagcctatctaactgttgtcgacatggcggtctgaagctctgactcgtagtcgacaacatggtagtcttcctcctcgagttcgtgcccggcgtcttgtcttgacgtatgttttcttgtatgttgatcttatgtcttgatctattgttccgtgtatgttgattgtagtgggtgtctcccctctcctcctagggggtcttgtatttatacccataggtgtccccttgtccaagtagaactagggaaaccaatatggatacaatccgagtagttcttgtcgtttccatgtagaactctggttatttttccttatccggaactcctcctatatccgcaggttgtttccgtataggacatggtatgtggtgggtcctgccgagatttagtcgactactattaggtatgtggtatccataaccctaacagtagtctccgacttcaatgcaaatgaacgaattcatattctcagccgcgcacagactttggagtaactgttatcgagctcatgtgactattctcggtgagttcagagataacgttaggcttcctttatcagcctcgtgcgggcacctaaagggtttgtctgagtcaatctccgacgtcaactaagaaagtacagagcatacgactaagtctcccatcttgttgtaatcgagaatttggattgaaatcgagaatttggattgaagtcaagaaattttatctcagcgggtacaccatctcttcattccgtattccttgtcgagatccatcgaccgtgagcctgcgacgaagccttgtcaatatttgtcgtactcgccttagtcgatcttggtgtgtagaaccatagagacatggagtcttcgttaatgtcgaatagaattttcctgaaatcaatactcagaaaataatattagatagaaatagcccccaagcgaacgctcaaagggtgacatgttataatatgtatggaaaactgaaaatgaattaaatttacagaccaatgttttgtatatgagcgtctactcttttaccgacttcgatcagtcagtttgttgaattatacactctccctagcccccagccttgtcatcggagaatcgttctcgggagataaggctcttggacctttgacctgcctcggttgaacaagcactgatcctagaccccagccgtgaagttggaaaacccaatttccgattaca

SEQ ID NO: 2473 - DNA, 530 bp, Oryza sativa
aaaaaaaaagacagggagaagggcaatcaatagctccagctctagctactatactttgatcgagcgaagcatgtttcgcagggagaaggggcacttctgatcaggctgggtgatatccgtcagctttacatcacatctacttggccaagttgcatccacggatgtaagggtgatcatactttatataccttgtccaatatggtctgtacttggtcatacttggtcattgccaactccagccatggcttcatgttaccgttgtaatcaacaacggctgcattatctatctctgagcggtcaatgcttgggttgtatcctaatccgaggacatgccacgacttgtcaaggggatgcgtcaacttgaagaaggtcaagaggccgtgtggaagtgtcccaagcttccaaagaacccggtcttcgttctgttagaagaaaaaaaaaaaaagcaacattgatgttagagtaaatcgttttgcatgacatctctaaatcaatgagatccaatcatggaagtagtaatctcaccatgt

SEQ ID NO: 2474 - DNA, 1351 bp, Oryza sativa
tattcacccaaaagagcgaaaatagcattttggtgaacactttccagtttagaatagcattttagtaaatcactttgaagcgatagcattatagcgaaaccacttttgcgattgtataatcctaattttctccaacaccactgacgagtacgtgtgcgattctacagtagtcagtatgtgccgctgcagtagcaacctgctacatgaccatagctgccgcagcatttttaagattgaaggggaattgttgcggagctagatgcgggacctgtgtcagcccaccactgcacatttgttcgtttgttcatcattccacctgcttcttccgtctcaaattacttatcttttaaggttatttggtatattctggttttaaacaaaagactacaatacccttataaagtgatttatgaatgaggatagatgggtggttgaggagtagaattgggagaaatttaaataagatatgattgacgggataagtagtagtacttggtagtgataagtacggagtagcattgaagaacaaaatttaaatgatagaaagataactaatttgggaaggagggagtagtaaaataaaatgggaaaattacgaattacccccctcccgccgaacccgaaaaccagacatgattcaccctaaactttcaataccggacggattacccccctcgacccaatccatagcagttttgtcctacgtgatgtacgcgtggcatcccagtcaacattttctttttttaaaagatggtggggcccacccatatactctctctctccttcccctctctcactctttctctctctctctcggagagcacggcacgcgtcggcgtgggatgggaagcagcgcagcggcatcgtgggatgcagaggcagcggtggctgcggcgtgggatgcggcggcggtgacggcggcgcgggacatcgaggcggcgtggcggtagcgtgggacgcgagttgccccacgcgagcaccgtcacgcccagcatgccagccgccacgccggccgccacgccgatggagaccagcagggagacgagctcgcgcgtgagcacgtacgaccagagcaccgggaggcaggacgagcggctcatgggtggggagtcggcgtccgtggtggccgcggcggcggcggcggtgaggaggactggagggtggttgctgtggtgaggcgcggtgatggcggcgaggaggagtggggagaggagcgcggaggccaccgcggtgcgcttcgaccaccggtgcgccgtgatgtccgagatggtgaggcggcgcgggaggtagagcagcgagtggagaggtcgacgaggcggtgcgcgaacattcttggcacggaggtgggctt

SEQ ID NO: 2475 - DNA, 1901 bp, Oryza sativa
ttgcagctgtacagcaagtgtttgccaaggcatcgatacatccaacctccattggggtgcttggttaagtcggtgtacatcaccattccgcttgctttggtaagaacttgtaagagcttggttaaaagcttgagtgtgtgtgatatttgagctgccactacctagtagttgataggagcgtgcatatttttgtgtgtttcttgtttgctactaaccatagcaggattgcgtaagggaatacgagaacatcgactactacacctttgacgagatatgacgacttctccacgtgatgcatatgaggtacatgactataatttttaacaagttgcatctaagttacccttctatgatgagaagtatgattctgttgcatacattgattgggagctagcagtagacaatgaatttgatatatatgatttttctgatgctcaaatgattaaggctgctagtaataagtttacctcttctgctttattttggtggacttatgttagtaataaacctgaaacttgggatgaattgaaaaccatgatgagaaaacgctttgtgacatcttattacaaatgtactcttcgggagaaattagaacatctgaaacaagctgacagaactgttagggattacattcatgaatttaaggtctgtatcatctacagtggtctcaaagagtgcaatgaaaatacaacgcgtagatttttcaatgggcttaattctgaaattcaggttttgcttgataatgtgacatataatcatattgggcacctattcatgcttgctcgtagcattgagagtcagatcatatcaaaggcgaggatgcatgaccaatgtgatttatctcctctttctgaatccccaatatacttatgtaatgatgatgtgcaaacattggaggagcaatcttttgtctcccctgttactaacgttttgcaggtagatcagcacatcaaagaaaaggagaatggtatacttgagaagaaagaggatgaagcacctgcgatgtctgaagaaagttcgcaaggtaaattaaatggtgctgagagaaatgaaggtgagtattctcaaggtgagctacacttgtctacttttcatgctatagtagagcaaccattagtggaatcaattgctgagttgcctttgtcacaagttgatttacttgctgttccttgtgataaagaagagttgtgtgataatgtttcacttatatccatgccacaactagtgaatgaacatgttagttctactatttctttgtgtgctgattctaagcatgttgttcacattgctaatgaagtagaggaacgcgaattgctatcttctttaaataccttgggctatgttcagtttgatgatttttgtgagctcgataatttgaaggagaaattatttgctaaatctgatttgccatgtccaactaatgctatttttcatatctttggcgaatataatgatagaggaatatttttggtgcatagagtttacatttgttcggatttagaacatcttgtagttccggataaaatatgcaagctagagagacatgttactgccaatcatattgtctcgagtttgtcttgttttgattgcaagaaacatgttgttttcaatggactgcgcgaagagcacaatatggaaaaactgaggacggttttccgtgaagaaggggaggatgatgtgaccatggctactatggatacgaccattgctcacatcatgaatcaacaagaagacatcaagatcaagtcctccatgtgctgcaatctgattcggccacgtgttacattgctgacttcaaacggccgccaaatctacatacgtgctccgttttgggcccgtgagtacttgatggaaagctctcgaagttctccttccaacggatccagcctcatctcggaatt

SEQ ID NO: 2476 - DNA, 15099 bp, Oryza sativa
tcctgcaccccatacaaccaaaatcccttatatttagggatagagggagtacatcgtactattgatagcattgtacgaaaaaactgtagcacggagtactatgcacaattttacattagcgtatactttctccgtaaaaaaacgtatatagaactggatgtgacacattttaatataacgaatctgcagagagatagtttgaatgggacggagggagtagtttgaaccattcatcgtaaaaatgaacaatcaaaattatacgcagtcgtttaacttaacgttacaagtataactgaacttgatctgaatccttaatcgtagtgttgcgaacgctgtgcaatttttgtgattacgtgtgctctccagttcatccaagtaaactgccaagccagcccatgtccccaacgccacaatcttacagggccggccccactggtgcttcgtttcgcatgggccaaatgcagcaccgcttgccagctcgtaattgcggcccattaacctaaatgggccgatcgagtggtggtgcagcccaaccacaaggccacgacaaaaaaaacgtcctcctcttcgagtcgtccgcttccactcacgccggctcatcctctctctctccaaatctgtggacatttcacgcgcgctctccgctccagcctccagccaccgcccaccggccggcgatgtcgacggcggcggcggccgcggcgtccacctcgctccggccggcctcccagtccgcgctccgtctcgcggtttcgctccctcaccaccttcgtcgtctctgattctgtgtaatttatcatgcgccttcgtctaaccgagtagtcttccccggttaaatcgcgcagggttcgccgcggcggtggtgctggggagccccggcgctctcccctgcgaggagagcattccacgcggacacgcggaggcggttcgtgttctctccttgggcgtttgcttctagtatggaatggagttgatggccttttgtccgaattagttttgcttcctgtggtgtatttgggggaagtcatcgcagacctgtggattacccttcatgttgcattgttgtctcctgtgggattaagtgtttcatgagattggggtatttcgttgtagattactgttctatgcttttaaattgcaatgccggtaattttgttgctacgagttattgttcagagtagattacttctataactctcgctgttccattggagttgcttatacagtgcgctctctaactgccaccagcacagttcagatgttcttcagggtgttttagtaacatgagtttctacggtcctgatgcacatttctgattcatgtgcaaatctacatctaccattcattcctaggatttcatactatttggtagctgcaatgcggcaggatctgtgatttgcctttccgaattcattgtgatggtgcaaatagacagatgaacagtctattattattcttaatttaagaacctatgtttgtattaaacaggaagactttgttatatgcaactgataaaggcccagaagaatccttgaagaagacaattgaagttgacaggttgatcgagatgctgagggatgcaaatcctagagaggtaactcttcatatcttcaatctgactgtttattctactactctccatcccataatatagcaacgtagtgctggatgcccgtatccagatccatagtactagggtacgtcccatccggtcctaggttgctatattatgggacagaggaagtattagataaggttacagtctcaggttttacaccacactaaaagatctctccattcaattgtaccaatttaaatctgttaccaaacctctatagtatataattctccttgctttgagcatgcttccattagttcttggttcaaaatctgtagaaccaatctaagcagtacttgatgacttggtcgtgggagcattaagcctcaagttctgtgaacaacatgaactgttcaattttatttacttcggagttttcatatttacctttagtttcttatcaggtttattttacgcatttagaaatatttgaagtatgcttatccttgtcagtttatcactagattttattattatgtctatggtaattctaaatactggagcattgctgaacagaatatatgcagtttgttttattttcatttaattgaattaagccttgctttgttttgaaattacttttgacatgaaaattacttgatcaacttactaatttacccttccttgcatgtgacagcttgatcaaatagtggttgaaaatgttctggcgttcgatgagggtttctgggttcggctggcagcaagaattgatctatgcaaatcggatgatgataaagcatggttttcacaattggatttcttttttgttactatggaatgtcgatcccgttctcttagctcgattaatctaactttgtgaatggtgtctctcttctgccttttcagaaagactatgaagaattggctgaaaatgtcatgaacatagttgaccgtcttgtccataagactgatgtaagaacaatattgggtcacattatttgtattaatggcaacacttttggcatttttatcgtgatcagaaaagttccttgaatgctgctaatatttacccttatctattcaggaaaagattgaacagtcaactgatgtgctgaaggcaattattagtcctgtgatgcacgaaggtgaaaacgccacgtggccaccgagagatccggaggctctcaaattgatggagaaagtaagaacgaacatagctattttttcactgttattctttactgggatatttcatcggtgccttcctatgaatttggtttatttcacattacctcacacatagcatttagtcgctttaggcaagttactgttttggttggctctacttcacatgaaacagatttatattccaatctgtagtgtaactagaaagtgccagttttatactccaatcttgtatttgttttttatggtgtcctggtatcgccaggaaatttcaaatagagaaaaagaaggacagctagacgaaggatttctgtcagaggttaatgctcagttgaggcaggtatgtgtcattttctacattgtggattaactttgttgatatattactcagcatagagtagttttgctactcattttactattacacccttacatgtgtttaggctaaacaagatggagataaaccaggacttcaagctatgctgcagaaggtgttgcagctgtatgcgtccaattttctccaaaagcgtagttacgcttacaaaggtaaatcctgttcattcgttttggactgttgaaccacaaccactgagaatgattaccctttaaattgatttgtctatctttcattttcagggggagaagtaatagtgcctgaaagttttcttgaatctgtaataaagggtatgtatcattgtgcggagagattgtttgtcttcaatcaactgatctcaacctttaatatatccagattgtgccttgcagctccggaaaacgagtggaacaagctgttgcttgatgggttaacagtggggaaaggaaatgtttcaccagaagaattttatgctgttataaagaagagaattgagagagtcttaattcgcacagtaatatcccaacctttggagttatacagagaacgcaatctcttttagtttgtcaggaccttgtctttagtttagcatcccctcagcacatttttcatttttcctcttgttatctttttgtttgacaggaaggaggttcttatcagcagcgcatactcgttgaatatctaaaagagatacaggctagagcggaggaagttgtgaaggtgcttcaaggaccaaccatatgatgatgtctggtggtcgattttaaacagtgcaggttatccagttcgatcatggttttgacgcatcacctagcaaaagcttagaaggcgacaacagacaacctaactaggtatgttgttcttcgtttggtatgccgttgagaacactagattctattacttgtctgcacatttttacagcctctgcctctcagttgtctgattcaggaacccgagataagcatagcgagaagagaaacagatccaaatgtcctaaaggagtgcgtgattttcattccccactttggtcttcatctcgaatggccgattttgctgttggaatgtttgatttctgttctgtctgattgacacttgacacgagtgagcttgactaagctgtagtaacatgtgaatcggtttttgttgtgtaagggagaaggttcaatgctgagcttgacttgttactgaggtgcttgttgaactcattttaagttactgatccctgcaactgttgattatcctgatcctgatagatcattgacgattcctcgtattccctcgttacaacttacaagtcattccgctcgtgactcgctcgcaactctgcagtaaaatgtttcagaagccgagcctcgcactatatatttaatgatatatagtgaaaataaaaaaaactattgttggatctaaaaatgaaagtacaagatttatccacgcaaaaactatactcctaaaatagtttcttaccctatatcgtagacaagtcttatacgtctatttttttaatcaacgatcatataatttgcgatgctacaggcctcatctttttaacttacgcttatgtttatcagccaaaaattgaattttcaatcttaataaggttttttcatcgaagtttattttccagcctttgcttttagatcactaaaaatacgtatataaaaattttatttataaattacttttcgtttacaaatatgccgattcgctgggctccggtagtgttttcataagatacaaagagatgaggcgacgtgccgtgtattaattggttggcttcaccttgtggcagttggactctgccttccaaaatactctaccaaaaaacagcccaacaagtgggagaatcggcttttctcttcccttctcttccgcatgctggtcgccgccctccgcgtcccggcgccgatcccctcgtcgctcccctcgccggcgcgccctctcctccgccgccgcagcagccaccgcctgccccctccggccgacctcgtcgatgcaatggccgacgccggcggagccaccacgaacaggccctgctaggactccttcccgtagctcgcatagaagccgctccccggcgactgctgcggcagcggctgcgtccgctgcgtctgggacgtctactacgacgagctcgacgcctacaataaggctctcgccgcccactcctcgtggcatcctccggcagcaagcccgctaccagcgacggcgccaaatcatgaggcgaatcaggattcaggagttctgaggacgacttgcagtatgcgtcccttcctctcttttcattttttttccccttccccaaatcggggtcttggtgtggtactcctaccagctagtagtattaaaattactcgtttgattatagtgaaacatttgtgttatctcattgtgtatgctgcaatttgtactagagtggaatggttgttgttccaacgaaaaattccctgattacatacagagaattgttcatggatagttcttgtgtaacaaacattagcattttggcagaattcttgtaaacaaacccccaacaaatcacctatgccattagaatcaggagaattagcgagtttaacttacatcttgtcccaatatcgatggggactacaaggagtcacaagacttgttcaagcattgacgtagaacttactgattattatcctaaccaccaaagggatcctcaccgtgtgagtgccatcctcccatgtcaggctcccgaaggtgtacctccctttcaccttcaatttggcctggaatgtcaccttgaatggcaactttctgacggttgagttgaaggttaggagcgaggggctaacggtgacgtccacgcctggaggagcttctacacgagctctgtacttcgacaaagcagggccgacgttggtgaccgttcttgacaccgtcaattttcccctcagttcagggatggtgatggatggaacattcaggtttaactgcgattttggcgtatgttgacatgttgtttgctgttgagtcatggagctgatggctgaggtgttgtaacccatggagcaaaggaagcgcatgtagtcagatactcccatgtcatacacaagaccggggtgcgcagctctgtttggattgacatggccacctccataatcaaatggatttgcgtcattgtagggtgctgcctctgataccatttcaaacccatatgcatcatgaacattggctgcaaagatgtagagttgtcaggtgaaggcaatctttggtgtggtgaagcagataagcattatggtattacctgtcgtgaccaatgctgatttcactgcagcagggctccaattaggatgcattgatttcagaagagcaactacacctgaaatgtgtgggcacgacattgaagtcccggagtcaatcttgaagttaacagatccaatggccgatgatatggcagcagcaggtgaccatgcagccagaatgtttacacctggggcggcaatgtctggctgcaaaagaattgatggcacgggaagatttgattttcctgtcacatatttgatcaaatcaaaggataaacttagttcatcaactaaaggagatgccttaccttcaggatagagggggacaaagaacttgggcccctagatgagaagtatgcaacttctggggctaccagctctccaacaattgtttttggaaagctaaattgggccactgggtttctgtatttgcaaaacaacagttaattgcatgaacccataattttcacacctggtggatcatatccaagaaagttttgtgtacctcatgcttgtcgtgtatgcaagtatagctgttccaacttggtaatccacttgaacacaaggaatatcaagtgaagatgctatatccttggtcaagaattgcgcaaagatgactccaacacctcgagccttttttacagtctctacggccactgaggctgacctctgtgctcttgtttggaagcaaagcactacatttccttttactagagtagcattcagagatcctgcagtgcagcttctgcaaagacatcagcccaaatggaagttgaaattgtaggatggatccaaagtgaagagaatgacaaaggttaccttgcatcagtatcgtcggcattatcagatgaaatgtcttcagcatagactatacgcacactttttgaaggatgctttccagaatacagtgtttggccctgcattatcatgccatcagaataaagaacaatgtgccaaccatctgcaaccattagtgtttgaagctataattcagattacaccataccacgtaagtactattgttgccaagaatgatctttgcaaggaatatccgatcaatggtgcccgcagcaacagtgacaatccatggggccgagttgatcaccgtctctgaataaggaccggagttccctgcagaacaaacgacgacgactccttttgcgacagcatggaaggatccaattgacaagacatcatcaacataagcagggagaggtggtgcttgtcctagggacaccgagatcacatcgacgccatcgtgtatggcatcgtcgaaagcagcaagaatgtctgcagcggtacaatctccagtagcccagcatactttgtaaactgccagccttgccctctgtgcccctccccttgctacacctttggcaaggcccctgaagctggcattggctaccagagctccagccgctgtggatgccgtgtgtgtgccatgcccaacggcgtctcttgccgacatgaactcatagatatcactggtgttcatcttgccgtactcagcttcataccctttgacgtaccatttcgcgcctattattttcctatcctatcatgaatctgaagtcaccaacagaataactagtagcaaaattctctgttctcctattgcagtgataaaatttcacaagcaaaatagcaatgtgaaactgaaggctcaagagcaggccaacctgttgcagttagaggcattgaacttctctccggcgacacattgccccttccagcgccgcgggacctcgccgatgccgtcgtctctgaaactggccgactccggccagattcctgcaaaccaagagcatctcaatcctcacattgtaatgtcagcatcaattgcaaactggcaattgccagttctacacatgatgaagaacaggtgagttcacctgtatctagcacaccgatgatggaatcctccccaaatctgctctccaagaggattccaccacctgaaggcgacggattcacccccatgaaatcccagctcctggtggtgtgcaggtcaagaacacgattccgaacaacccgcacaactccaggccaatcttggtgacaaaaaaaattcaatccagcagaagagtacaagaaaaacagagtgagagagatagagaaacataaaatcaaattttggtttgccaagaacagcagcaagatggccggcggggaatgcggcgagctcaccggagagccgcgccgcctggccgccggtgagcacggcggcgaagccggagaagccatgcctgtagctgtagaggatggcatccatggccgcctgctcgctgcaaagcgcaaggcaacagtaaaccacgccacatctaagcaaccaatgctccagccatggagaaggaggagaagaagaagaagaagaagaagattgcaacctgccaagaacggcggcgagcatgccgtggtgcgcctcctggaccagctccggccgcagcccgtggtgcctctcccccatgtacacaatgtacacctgcagagagagacgccatgggaccaaaacagcgtaagattgacgctgccagaagctttcttggggggcagaaatcatcaaagcaaagctaagaatgtcccggttaatggctcacattgctgcgagaagatgagcagggctcgagcagcatgaggaggaagacgatgaagagcaggggagacatggccatggcgtgtgatgagtgagcgtgagctcaaagagggaagctgacgctgataaatttttctctctggagtactcgtagaggtgaagtggagtggtttgaaagggaggagctgagctgaggctgaggggggttggtcggtgtgcaggaggcggcctctcttctctgtctgcttggactggattcaaatctcccactaaatactcctattggagcattagagcaagtttaataggataggccactactaactccgaatcatctatagccattgtaatagtctatttatacaatagttgcttactataatattaatatctggtcgcacgtgtcatacacacattacgttttggagtccgtgctgctcttctctcttttcctttatctctttaaaatatatttatagctggcttatagcttgctattgtaccaacactagtatagggcaacaacaatatatacagtaaaagtagtccatatagatgggacccacacatatggactataactattgttatcttcacaatgtatatagatagcaactagtattaagaggagagaggaaatagagagaaataacatattttattctatatgggcaactcatatgcttatgggtggcttttgctattttcttgctatggactagttccataatgttgttagatggctaaatagaatattttattgcttatgaactagttttagactacattgtggatgccctaattacgactctgcaactgcactgtatgcactgtgcggccgtgccccagtggattggtttgttttctgtttgttcttcgtcctgacctgacgcagcacaaacgctcactggtttgtttttttttttttaaaaaaaaatggggctgtgaggtgctcactggtggagtggcgatcggtgtcgtgctccctcaccgcgccgtattgctgggtctgcgtgcgatgcgtgtgtgagccgacgatgttgccgttcggccgaacgcgtcttgcccgttcttttgcttgctttactcgatactctcgtactagaactacaaatctatctaaacataaattttatctgattctaagttcttatattttaggatgaaatgagtatttgcttggtgctcagcttgcttggccatgctctttctaatttattcacaaaatggttatttgctcaaagttttctaaatacattttctaaaaggaaattcctacgatagtttgtttttaaggtatttattaggcgtgtttcttaaaaaaatgatgataattaagtagataattcgtgatataatccgtcagaggcatatggttgtttcgtagctagcgtagtggttcttcggatggaaagagatggccagtttgttctgtgcggtgttaggtttgccaccgacgcgtacagtgaccattagtcacagggatatactgatatgtcctcatttggcttcacaacttcacacggattttgttaatttgatttcaccagtgagcattatggcgtgtgccgagcagtatcttgcttgtaacttgtttcaaactcaggtgttccttaaaaatgaattgttggatcgtcctccaatgggtatgtgctcgacatctgtctcgaatctccctggctcaggcacatgggtatggttattttttatgcagaagcagactatcatttcttatgcagaatgcagataatgttattgtcctaatcacttctcattattttttttctatcctggattaactattagtacaagtggaagtgggaacctcgtttgttctcatttgtggaccagaagaaagtggcacaaatggaactgtataaaaccgggaagttccatataaaggctgtgtttagttcacactgaagtttgaaagtttggttgaaattggtacgatgttatagaaaagttgtgtgaatgaaaggtttgatgtaatggaaagttggaagttaaaaaaaaaactttgaaactaaacagggccaaaccctactcgattcagaatattcttggtagctatacatagagcaaaaatattatatcttcatgcactcatcatcttttactttgcgctgcaatatgaagtagtagtgacatcaaaatacctttatggcaatcaaaaagattattgatatcatatcattttattaagctactgatagtggcactatggacagatgacaggcaacttgcgttgacccggagagtagacttactccctccgtgtcaaaataaaccaatctcgtattaagatgtgacacatctcagtacatcgaatctggatatagaccgagtttagttctaaaatttttcttcaaacttctaacttttccatcacatcaaaacttttctacacgcacaaactttcaacttttcggtcacatagttccaatttcaaccaaaatttctattttgacatgaactaaacacacccatactctatttttatgaggttgacttattttaggatggagtatgattagtgggctgttttgttttcaagttccaacagggacgctgctttctccttcagtgcttgcactttaaactttttatgtgagaagctcaggtcactttaatggcgtctggtgttgagaggtagcagtagcatagcaatagcaccgttgtttgcagcttgcgtgggtccagcagagcagctgccatgaaccggaggacgagatcaccacctcacaatttggaaggcctgcagctttgcatgggggccgggaaaaaggcaaataattccaacttttcggcaaatcattcggaaaaggcagcgaccaaatttgaaaacagcacagcaaactgcttaggttaagtcagaaatgttcttttagcagtagtcaatgcctagtagctggtcagactttaaatctacccttaaatattacacatgcgaatgcgcttttaatactatcaatattactacatccgtcctaaaatataagtatttttagctataaatctagacacgggtagtacacatgtggatgtgcctttaatactatactcacctctttactccgtctcaaacaagtgcttgtccatttaaaagttgatttttttcaagaacagatgaagtactacactaataagttctattgatatttgtccgtttaagcatatatgcatgtgatgtgtgtattttatgtaattttgaaaaaaaaattatatgtttattgatgtgttcaatactcatttgaaatgcaggaattaatttaactccaatgaaattctagcaaaaaattctttgttccgaaggagctctcaaggttgggtagggggcactactgccgctgagtattcctcgaatgcttcgtgaaatctctctcgcatcatattagtgctccacttggagcacatgattttttacaagaatttcaccggaatctatacggaatttaagaaaaaaaaaactataaaaacttggcgttttgagtactccaggctagctagagtgccgtttgatcggcagggagaagtgggggaggtgcgacagtgtgctgcagtaggtacgacatttactcggtacatttgctttacatgcgattgacgtgacgtcgacttcaccattcaatcatcgtcaccgtaaagtttgaactcggctcggcgaccatacggatcacaacacaacgccatcacgtgtgctccaatcaaatctttcctcctcatgcctctgcacaagtgcagactgctgttcaatgttcatctctgaaagcattcgaggagtaactcaagagtcagaagtgcagaacaacggcaagtatacagtgtcaggactacaagtacctgctactccattcgtccttaaaaaaataataaataataggttttcgtatctaacgtttgactgttcatcttaatataaattttttttataattattattttcattgttgttagatgataaaacatgactaatattttatacgtgacttatctttttaattttttcaaataagacggatggtcaaacgttggacacggaaacccagtgtctgtcttttttttttttttgggacggaaggagtagtaaaggagtagtatttagtacgagagagcaaaagaacagattaacatactcctaatactattatggcttttcctgcatggtgaaaacgataaccatatgctactctgtacgataataagcgcactattggatagcactcttctacttatatctatcaaccttttgccctcaaggagttaacagttgacatcattcaacatttcaccgaccagatcccatttttgcttcaatgaagcaggaaggctgtcgcatgtacaacattagtttgtatctggccataacattacaaaaacgatgcaagtccaatggaaagaattaagagcatccaagaaaccgtccatttttgctcaatgtggctcggcccactcctcaatagggatgtggttattgtaatttgtaaggatatggcgtcaggtagtcttctgtatctcatgtcggtagcaattttcttcagatctccaactgaacaacgacgggcaagcagcatagttcctatttaggtggtcgacggtccgggtaaagtatgtctgcgacgttttccttgatgtaaatagctgtcttgtttagattctttgcaacgcctgaagcgaccaatcccgcgcttttcctaaacctgcagcagcctcgtactacatcagtaagacaatcacaagaaagggacaggaaggggaaatctgaaagctagctttcctcgcatagaaatcctgtcctgtaagttgcccgggtctttgtccttgttgccgagagctggtggccgctgtaataagaaacgcaaatgtattaaacatcaatctaaacaatgaagaaatggtacacccaaagagatgggtcttattgttgtagaagaacattggccaacaaaactgaaccaaactctcaacatgactgataatttgacttaacactccatttttcccagctaataccatactattagcaaatatttctatagctgtctgtgaacaaaagaacaagtttgtacatgactgaaacatatggttaaatggaaatacccaagctaaagtttacagaaatgtgtaattgccaccgtcaaatgcacatgacctacctatggacttaatactgagaaaatggagcttcaacccaccttttggtacttactacgtccatcccaaaatataacaacctttggctatgaatctggacacacatagccaaagttacttatattttgggacggagggagtattaagttgtaacatattgacagagttttaaaaagtttgatcattcataaatcatttgaaaacaaaactccacaattacctgtaccaagtcatcatagagttttattcaactgtagaccaaatatgaagaagttgtggcatcaagagaaatactttagcataccttcctttctataagaggcagtagcaggctcattatttggtgatttcttctcaaccaatctgctgtccaccaatagctgtagtgacatttttcattgtcattagacagaagcaaagcacaaaggctagcacaaaaaagatttataatgactataaaatatacacttatacatgtatgtgttttcaataaaaaacagaaactattaagaggcataagtttcattcatgttgttctcagagagcagtgtcaataagtgaacagagtccaaccaccaagcagtcagaaaaagaacaaaattaccaaccattcttcaggttgcacaaatgtggtcccacctcaaccttataggttgatgatgccaaccaatatcctacacatggaaatgcaagaaaagaaaatccttctggatgcttatgaatgaaactagtgctcaattgcaggatcatattgtagtttacataaagaatctttgatacatgtagataccaaaatatgcctagcatgattacttccagtattacgcaatcagatgttttacgtgtgaaatgtcgtattataggtttatgtaaagaagctttgatacacgaaaatcgtaagataggtctatcacatttagttacagtgcttaggcaaacatagatttttgtctgaaataaaaaaaat

SEQ ID NO: 2477 - DNA, 601 bp, Oryza sativa
  unsure (1)..(601): unsure at all n locations
atgaccactttcagtgtagaagaatgatatggaaataacagagaaaagaatgaaggatgttttattaccatgaattttagtccctccatttttctcggtgttcttgtggtcaggcttggagaaatgccttcccattggctgcttatattccagtaaattgttggtttgcctactgtcagcctccagttctgaccttgtacatgaactctgcaagaggggatccaaaattcagtccacgaacaacagcgaacagatctgaactcagcataataacgacagtccctactgctaaggatataaagactatgcagtatgatgtcttgaagacaataacatgctacagattcagttcaagtgtgtaacatcaaatatccagtacttgaaacaaacaagtattccgtaataggctttatcaaactgttcgtgnnnnnnnnnnnnnnnnnnnnnnagcagccaaaaaaacttaccttactggagccatatgtactccattttgcaatacccaagaggaccgaactgtgacatttcgctgacaagaaaatactattttcactcaaaacacagtttcattacccacctgacttgaaaaaatgataaatta

SEQ ID NO: 2478 - DNA, 2870 bp, Oryza sativa
ataactagacagctaaataatttaaaatcaatattaccaatatttcactataaaaaataaaatatgttatttgaactgccacctattctttacctgacaacccaaataacatcctatttttaatttatttgaactgtttatttatgttactcatattttactatgtaaaatttaaaatacgtaatttgaacatacaccaacaagcaaacaacactgaaacattgaaaatttgacaatatgtattatgtcatcttaatcattctacataataaaaaatagaaaaatacaaagtcaccatgtatgaccttttagatacatgctaaattaccaagtgtcacattttaaaaattagtaaaatcttatatattaaaagaaaaaaaataaaacatctagctaacggttttcacctagatcgatgacctattaacattattttcaactatctaatctacttttgaaaaatatatcttaataagtggcatgtcacatattttaaaaaaatcttgcaaatcttaggaaaattacatctaataattggctttcacttaatcacttagaaaaattaaaaaaaaaatcccctccacacgcgcccatcactacacagccgctccttcccctctctggctcaagctctaaactttcattcctcttacgttccttttaactaaaatataaataatctataattataagtttcacgtctgatttctaatctaactattgctctgtttataatcaaaccaacgatataagatccatatgcctatagtttactatacaacaaatacgacattttaacacaatcagcctattacttacgagtatctcaaatgcagcttacgatacatgcccgcgcgaatgcgcgggctacctttctagttaaatataacaaagatattgtggagattatgggtaccccatacctacatggcatattatccgactggctataggggataacttatatctatggaatatgtaacagatcatgacttgggtattacgtttccctgtatattatggaacggcctaaagtcctggtttgataagattgtaaagtagatttaggaaaccgataccgtattggttaaggtttctatcttgtaaccctgccccccaacctatataaggagggcagggagcccctctaggggcatgatgagacaacctgatcgtcagatcaatacatactcggcggattcaaatccccaaacaggagtagggtattacctctcattgagagggcctgaacctgtctaaatcctttgtctccacatccatccacttttaggtctcgtgcgctaccccgttttattattgccgaattcatgtttcgacagttggcgcgccaggtagggggtgcgtcgaattacctgtcgaaaagtgcgatggaatcaacttcagaagaaaccccgagatcaatctcatcaatttcgatggctcaaatcttcaatcgggtctaccgttccaatttaatctctattagattaatttttaatcattgtttgatttcctgatattttgacgaatttcatatactggatgagatcgaaacacgaccatcatcgtcgcctacttgggtgcccttgccgtgtccgagtgctcctctcttcctttccttgcagatggacgtgttgcaggagtggcacaggccgccaggattcgattcctgtttgcatgtatgatggttgatgggctccgccggctacctccgatgatggcatcatgccgaaagaacatcgagttagctgttagttgccggggcttatacatgttgcatggcacgtcgccggctatcactcatgatccagcctcactgctcgacttgagtttttcgtttcaatttgttatcaatatatattagattgatttctaatctcagattaatttcttgctattttttgttgttgttcgcatataactacgcggcactattgaggcgattgatgctggtcatggactcgaggcgtctcagctttccggtcgatcggccgcgagtccactccgccggcttgtcctcgccaccgccattgctgatagcaacaacgacttcaccaccggcctgcctccgtcgccgccgactggtgtccccgcctatacggttggttggtcacaccaccgttcatgggcgtctacgacttcaccgccggcctgcctccgtcgccgccgactggtgcttctgcctacacggctggcctattatgccactgctgttgggcgtctacgacttcaccgccggcctgcctccgtcgccgccgactggtgtttctgcctacacagctggcccattatgccaccgctgttgggcgtctacgacttcaccgccggcctgcctccgtcgccgccgactggtgtcctcgcctatacggttggttggtcacaccaccgttcatgggcgtctacgacttcaccgacggcctgcctccatcgccgccgactgatgcttccgcctgcacggctggcctattatgccgccgttgttgggcgtctacgtcgtcaccgaccggccacctcgaccgccgccgactggtgtttccgcctgcacggctggcctattatgctgccgttgttgggcgtctacgtcttcaccggccggccgccgcatccgccactgactgatgtcaccgctagcacggctggcctgttataacgccaactgatgctatcttcttcacggctggctacatcgctgtcactactaataggcatcagtatcttcaacacaagctgcctacgtttgccatggctgccgactggtttcttcacttccatggctgcatgattctgccagtgttgattggcctattatgccgctgttgttgggcatctacatcttcatcgccggtcgtctcgtctgctgctgactagtg

SEQ ID NO: 2479 - DNA, 971 bp, Oryza sativa
cgttggatggaccgagtaacgcaaggtgctaagtattattcggaataaatcaaaagcatagagatgagataaatttattttctgctcttaataattgcaaaagtacccgagtagtaaattctgatccgtgaaactttgttccattaatgacgaactcatgtcactcatatgcatgtttgggaagtgcctaggccgactcccggtgcttgatggtcatgactagtcggacagagtgtttaaacgtacagagtcatctgctcggggaaatcaaaattgacaagaggagaaatacatatttataaatattttaaaatacttgattttttctcgagtattatatttatatcagatactactcatcctatatgtttgttctgcaagatccagatccagatatgcataaaagggattcatggctttaagcttatctcttacgctccaggaatggatcagtcagaacatcaccgaccggcttgccttcgccgccgccgactggtgtttccgcctgcacggctggcctttatgccgccgttgttgggcgtctacgtcttcaccgaccggccgcctcgtccgccgccgactggtgcttccgcctgcacggctggcctattatgccgccgttgttgggcgtctacgtcttcaccgaccggcttgccttcgccaccgccgactggtgtttccgcctgcacggctggcctttatgccgccgttgttgggcgtctacgtcttcaccgactggcttgcctttgccgctgccgactggtgtttccgcctgcacggctggcctttatgccgccattgttgggcgtctacgtcttcaccgaccggcttgccttcgccgccgccgactggtgtttccgcctgcacggctggcctttatgccgccgttgttgggcgtctacgtcttcaccgaccggccgcctcgtccgccgccgactggtgcttcgcctgcacggctggcctattatgcc

SEQ ID NO: 2480 - DNA, 720 bp, Oryza sativa
ctgatgcttcagaggaaactgaaaagatggagacagatggtcagaaccaagaaaatggggcggatgagaagaagcaaaatgaagaaagcaccccaattgaagaggtaatgataatatttgctgtatagttttgcttttatttcatatgccatcatgatatcaattgcttctccttacaacttttgtattattttcacaggattgaaggcatatgcacacactgatataatctggcaccaagttggtgttagatttccgttttatttgtgggggcaaagccacattgcgatgcctgatctcgttgaatgctctcgctggtctctagcatagtaccggtatttctgtatcttgtgaatgctaacatttttcagaagatggaaaaactatttgctgtgtttaggaaacaagcttggggtattttataccttccagtaccgctagatttcttgatgttgtagactgtagacgctgtttcatgtggggcatgcgagatgttcactcttattttctggaaatttcccccttattgctctctattgggaggctttgagtgagttgtttgaatgcatggcaccatttcaaaaattccccgtagatcgcgaaaagaaaattttttgggtgtcacatcggatgtttgactggatgtcagaaaggtttttcggacatgaatgaaaaaactaatttcataactcgcttaaaatcgcgagatgaatttataaa

SEQ ID NO: 2481 - DNA, 1346 bp, Oryza sativa
ccggtccccgaggttcgccgtcgtcgacgtcgcggcgctccgggcggtgcgggtggacgcggcgaggggcgtggcgcgcgccgaggcgggggccacgctcggggagctctactacgcggtggcggaggggagcggcgggcggctcgggttccccgccggaatctgcccgacggtatgcgtcggcgggcacctcagcggcggcgggttcggcccgatgatgcgcaagtacggcctcgccgccgacaacgtggtggacgcggaggtggtggacgccgaggggaggctcctggacagggcggccatgggggagggcctcttctgggcgatcaggggcggcggcggcggcagcgtcggcatcgtcgtctcctggaccgtcaacctcgtccccgtcccggccgtcgtctccgccttcaccgtccaccgcctcctactccggcgaggtggccacgacgagcaatctctcctccgcctcctcaccaaatggcaagccgtggcgcacgctctccccgacaacctgttcgtcaaaatgtcctggaggccaagaccacaacgacggcgacgactcaactgtcatccattggtgacgttcaaatcattgtttcttggaaattgcagcgacatgatcacccaaatcgaccaccatttgcccgaactcggcatcaaaccaaccgattgcagggagatgaactggctgcaatccatgctgtactcctacggctacaccaatggccaaccagcagaggtgcttcttgacaggacactgcaacccaaggactactacaagatcaagctcgactacctaacctcaccaattccgacacccggcctgatcgaattgctcaccaagatcgtcgaagacgaagacggctccatcgacattgacccacaaggcggcgagatgagccggataccggaatccggcacgccgtacgctcaccggagcggatacctctacaacctgcaatactttgtcaagtggggaggtgacaagaatgtgtcctatgaggatgatcatctgagctgggtgagggggttgcatgagctgatgacaccctatgtgagcaagaaccccagggctgcatacatcaactacagggacctggatttggggcagaatgtggagggaaacacaagctatgaggaggccagggtgtggggggagaagtacttcaggggaaacttcaggaggctggcaatggtgaagggtgaggtggaccctgatcagctgttctggagtgagcagagcatccctcctctggttgtgagcacaagggatgctggattggtttcagatagctgatgatggttcagtctgcagcttgatgtatagtaagaatctgtgcctt

SEQ ID NO: 2482 - DNA, 723 bp, Oryza sativa
cagatttactgtcaccataactactccctctgtaaaaaaccaacctcgtattaggatgtgacaatgaatctagacttcgagaatatccaaattcgttgtactatgttatgtcatatcctaattaaacgaatctcatactaggattttttttagggagtagaagtttttaaaaagatataggtcttgtttagataaaaaaaattggcaaaaaatgtcacatcaaatgtttggacacatgcatggggcattaaatgtgggaaaaaaaccaattgcacaatttgcatgtaaattgcgagacgaatcttttaagcataattatgcaatgatttgacaatgtgatgctacagtaaatatttgctaatgatggattaattagggttaataaattcgtctcgcggtttataggcagaatttgtaatttattttgttattagtctgtttaataattcaaatgtgcattcgtatactttaaaaactctacacccaaataagtaaacacacccatagataataggcaaaatttgccacaggacacacaaaaaacgtgtaattggctgggagacaccgcaaacgagcaggcggccgctccgcgcagcagcgcgctagcagggactggacgcggaggcaagcaggcaacagccacgacgggagcacgtgacaaggagccgcctacggtggagcttcgagcagtcgctagatcatgctcctccacctctcgtccct

SEQ ID NO: 2483 - DNA, 729 bp, Oryza sativa
gttgtcctttgcgtgtgcgccatgcaagcgcttctccatcccatcaccagctgcgtccaaacttggacggcttgagatactagtttcctagtacttatttatggttgtttatggtttaatttgttctagtgagggggcaattagttggttagcgccttggtggtgagcattcagttgagttgagcccttgaatgagcgcgcgatgcgatgtttggtgttggggcgattagcaaggtttgtaagtcatctgattagtcttgttgggactcttgctagcttattgttatgaattcgtagggtaaatgccggtatgcagttagtcttgcagtaatcagccgtgccaagtcagcacatttgtgtcacctgtttggtccaagctccttgaaatgaagcaatccaggagattgtcgatagtatgtatcgcttggatttatagttctagtgctatgggatggaatcattagtgatgtgctgccgctttagataattgaggcagtagatgtcatgaacctgtttgttttagtggtttttctttctttgttgattgttgatgttctgccttgcctcactggttgttgctacatgacagcacggtgcttctcttatggaagggagtgatcctgtcaccggccacataatctccacaacgattggagggaagaatggagaacctaaaagggtaaattataacataaatggaagccacaatatgttattcaatcttatgtg

SEQ ID NO: 2484 - DNA, 1217 bp, Oryza sativa
tagtgtccgataaggattttatcttttccttttatctttagtttctttcctgtccgacaaggactagtatctccctatgggtataaatatgtacaccctgggtcattgtaatctatcaatctatcgatcaatacaactactctcggcgcatcgccaccctctttaccgaggtttttacttatcattcgatggaacttggcacctgacgcggggctgcatcggctttcgatcttcagcgaaggggtaagtcctacgttccgtcggcccaggcaattgtctcatctacatcagcgttgttcaaggctgcatcagtacattcgacctcttggattgctccggtttggatgatatatttgtctacctatttatcatatgtctctgttaatctagtcttagcatatcagtttacctctatcggccgcttctcgctttagggtttctgccggtatcggctaaatcgtgttgctagattagattagcttagacatttaccaccctaaaaatcagtcaacggcttgattgtctagatattatgtttcttttcatacttagtactgcatcagttgagtttgatctactaagtcatgtttagaaccataatctctagcctgcttcttgattgccaataagggtttcatcggggtttcagccgatgagttatctggacgttgcatgggcttacaaggactgcatatacatataagttggacttagccgatcacaacaaaggttttactgtttatctaatattgtggattttataacattggacctccagccgatgtatgctttaaccttcggatcagtgtttattctatcatctcattgctagccgattggtttatactgtattatattattgttatactatattatcatcagtcgattgcctttatatcattatttaagtcaagtgtcagactctacattggacataaagccgatagcttagaaccctatcgttatcggctggcatcggctatcggctggtatcggcatcggctggaactactccatcggcttgtcagccgatcagccgtttgatctactgtttatatatcttgtcagttgcagggtcaaactgactggcacacccgcatctcatcaagatttttggacctgcactggagttaagcagatctcccaggcctcgtgtttttcgcatcaacacgcttttggcacgcccggtgggaccatgattttatatccacatgttt

SEQ ID NO: 2485 - DNA, 1300 bp, Oryza sativa
acaagctgctagatatcgacatcagacataagcctaggaaaacccgatatggtacctacgggaaccaaagagaggaatctagcgctatctctgatctcgccggatgcagatttgaggaggaaggctaccctgttgtcgactacgagtcagatctttagaccgccacgttgacaacagttagataggctaccccaaatattgtactggtgtgattatgatgaataagatcaatgaccggcttcggccaataggatgtagggttattacctgataattcaggggcccgaacctgtataaaaatcatcgtctccatctcttttacctcagtctcgcgtatatcttagtaccaacgatccccatactatgcaaataccggaatcgcgacatcaaatgtcgacaatactccatccgtattttaatgtatgacaccgttgacttttcgactaacgtttgaccatttgttttattcaaaatttttgtgtaaatataaaaatatttatgccatgcttaaagaacatttaatgaatcaagtcacattaaaataaatgataattatataaattttttacataagacgaatggtcaaacgtcaaacacaaaaattaacggcgtcatgcaaggtagtcctacgaacggagtttccataaaaacacattccttacaaaccttgactaggattgaccttcttcttcttttttttctaatacagagaatggataccgttgtacacaacccaacaaccgtccatccactcgttcaggcgctcacacccccgcaatccattccgattcgagcaatgggcggcgccgcctccgtggagccgaaccgaaccccagcaccagcaccagcaccaccgtaagcctccctcaacgacgacatcctcctcgccctcccgtccctccatgccctctcgtccgcgcggtcctcgcctgcagctcgtgggctcccgcgccgcccggcttttcgccggggttccgccgcctgctccacccacccggaccctgccccctcgggctcttcaccgaccacggcggcctcaccatcctcccggcaccccggacttcggccgccgccgccgtcgccctccgtggagccacgagctggaggactacgcctcccacggttggcatgccgtggcgtggcgacctcctcctgctgaacccacaggaggctcgccatcctaaacccctttgatctgggacgtgtacttcatccccgctgttgctcggtggcatcgagctggaacaggaagagcatggagcttccgcgctgttccggtttacagggatgaattcaggct

SEQ ID NO: 2486 - DNA, 1034 bp, Oryza sativa
ggtcacctttggtgatcctaccaacttccgcaccgaacggctcgactttgatgtggcggatctcaatctgccctacaacgcggtccttggcaggcccgcattggtgaagttcatggcggtcacccattacgcctacctccagatgaagatgctgagccccggcggccccatcaccattagtggcgatgtcaagatcgccctgacttgcacgaagcaacgtgcaatcaacctcgcagccggagaacggcggcggggggcctgagacttccacctctcgtctcttgaagaagcggatgacttctggtgacgaggtgtccgtcaagaagattatccttggcaatgatccgtccaagaccgaagattggtggtaacttggacgacaaataggaagacgcgctcgtctccttcctgcgggcaaacgccgacgtctttgcctgaaagccgttggacatgcctggggtccacagggaggtgattgttgacgaaaaaatcgaacacaccggcctgggagatctgcttaactccagtgcaggtccaaagattggtgagatgcgagcgtgccagtcagtttgatcctgcaactgacaagatatacaaatagtagatcaaaacagccgatcggctgacaagccgatggagtagttccagccgatagcgataatagccgatgccgataccagccgatagcgatagggtttaagcaatcggttatatgtccaatgtaaataataatataaatgcaatcggctgatgatgatgtaataaaataacaatataatccagtataaaccaatcggctagcaatgatatgataaataagcatggatccgaaggttaaagcacacatcggctggaggtccgatgtcatgaaatccacaagattagattaaacagtgaaacctttgttgtcatcggctaaatccaacttatatgtatgtgcaatccttatgaaccgatgcaacgtccagataactcatcggctgaaaccccgatgaaacccttatgacaatcaagaagcaggtagagattatggt

SEQ ID NO: 2487 - DNA, 1729 bp, Oryza sativa
acaatgtacttaactccgcgacattaagtgctataggatgaacagtgtacttaacagtgcaaaatagacagaacctaacggcgatggcattttgggacaaaatcgtttgtacgatggtatttcttggaactcacacttgctaatggcattttttggatttggacgcttgtcaatagcatttcttggattatctcaaagatgatggcgccaagaccttgtcacacgttgtaagcaatccacgtcactagatggtcagctccaggaaccatccacgtcactagatggtcagctccaggaaccttggcattgatggaataagccttgtgctcttagtagccttgttggtttttggtctttgtcgttctgttttgcttttagcatcttaggacagcatcctttcagttttacttttagcatcttaggacaacatcctttcggttttgctctttagcatcttaggacagcatcccttttatgctttatgttttcctttcacctttagactagcccgcagctagcaagctatggctataaatatgtatccaacctcccccggatagtatgacttggtactagagccactctatcctgtagtctagacatctcttgctcatccccttcacgagctcccctctgtcctcaaccggcagctggaacatcggctattcctgctcatccctcttcccctgcactgacgagcagcagctcgtcagaggcaaactcttcccccacactgcaggcccccaatagcatgccatgcccgcaggacagtcttagcgctcggtcgcctcgagcgcgcggctccggcaggaggccgagctcgccgcggccgaggaacgccagcaagcggcagcagagactgctgcgatggcagcgagggcgtcaaggctgcctgcggcggaattggtggcggcaagggtggaagtggaagcagcggcggatgcagcgcaagcggcggcggcagagctcaaggctctgcgcgacaatagctccagcagctctgtctccgcctacgacatccctgctgatgagctgacgagggaggcagctcgtgagcgggtggagcaacgggcagccgcgcaaccccacacgcgccgtagcagcagcccagccgggcgtggatgcgtcggcggcgttcctggcaggagcgcgcgcggcagcggtagcccagacgggcttggacgcattggcggaccccttggcaggggtgcgcatgacggcggtgctcccggcggcaacggcttggtcgacggagatcgcggccgttgcaggcggctcgtctctccctccccggaccggtaccgtggacaccacgggattcaggccgtcatcagggaagtcagccccggcggtggttggcctgccttcaccaagaccaactacatcgagtgagctgcggtcatgagggtgaggctccaggtgcggcacatgtgggaggcagttcggtacggcgacgtcgactacgacgaggatcgacgggcactgaaaggatgatgtcctaagatgctaaaagcaaaactgaaagaatgttgtcctaggatcgctaggatgctgtcctaagatgctaaaagcaaaactgaaaggatgttgtcctaagatgctaaaaacaaaacagaacaacaaaaggcttattccatcaggcattgggcttatatacttcttaaaatattaacacaccattagaacaattatacatgtgtggtgtggtgatgagatgcctgctcttgcc

SEQ ID NO: 2488 - DNA, 738 bp, Oryza sativa
agattataaaagatctagtccatggtctgcttcaaaatcgagctcaatgctctttagaaatcacaacaccacttaaacaaaagcatcaatgtttatgcctcaatcaaataaacatctatagcattagcagtatgctaacaattcctaggtaccaaatgaattgtcaatgacccgagaacacttaaaaaaaccatcttcaggtttagcacttacaactaataaaattctatcacttgtaaacatcaatccaaaacaaatctattgaatgaggcaatttcaagcaaatattggaagcgctatcctaggtcacaaaagggaatggagacaatgaatgctttaaaatcttctaggcacaggactaacataaacaggcagatacgaaaagcgaaatgtttcatccgagaaagagtaacggggcctttacttgatgccaagatcaatgtgctcctggataccgaagccgaagcatccggtgtcactgaagttcctcctgagcagctcgtactccttgaccttgagcccgctctccagcagctgcatcgccttctcccctctcaccgtcacgtagcacgcgatcttctcgttacgcctgattccgaacgaccgcacggtgtacctcgctgcaaagaaagcgccccccgcaaactctcgtcatcaccacaacgaagctaagagtaaactagagtagagagacggcaatggcggagagcttaacctacccttggagaacaccggggt

SEQ ID NO: 2489 - DNA, 24489 bp, Oryza sativa
ccccccccccccccccccccccctcgtgtcttcctttgcgtattgggctggcccaatttactcgaaattgggcctagttgcggcccattctcgtcgtctcctacgtgaattccagtggccctttcaaacgaaagaagttttgaagttcaactttctccacaaaaaagaaaaagtgaaattgatgcatgttttttcttttcctcgtgcgaaaaccttccagtgttccatcatggggtaatttcagatttgacgatatgtcatatgatacggagcagatacttcaaaattgtgggtgttttttttattggttctggtgatcgccattcttctcgcatagtattcacaagcattaataactgaagctttgtatggattgaatcatttcctccctggttgctccagttcttgaagaggctgattggctgaatgaatgcattgtttctctatcgcatgctagttgtttactcctttcgttctataatataagggattttggagtggatctgacacaacggtctgtctatattcattttactaggatatgtcacatacacccaacattgacagatggagtagatacgcaaatccgtcagaagatccccggtgtgcttgcacttcgttgacacaatttgaccgtagaagtcccgggcccactgtcattgactggtgaaagctgcgttgcaccgtgcagtaggttcgtgcattgatttggctcacagtgtcccattacttctttatagtgcatctagagtgagtatatatatagtcagaagtcaggatgcacctataacactattcaacatcccagatttcttttcttattttcgaaactcttgtagttgtagcctcaggcctttggtgagcttgggaagaggaagaaagagaggctccaagagtagtaggactgggaacatatgagaaagcatgagctctatccatctatccatcccctcccattcgctagaatgttgcaggtggagatttcgctcttatgttttctcgatgcctcccattcctatcgttcttggaacttccttcctcttcctttttttgctgatataattttcttagcacagtaaacaaacatacaacacacacaaaattttgatcgatgatagatgcctttgagaaaattggaagtgagccggggaagagggggaaatgtgtgtccaagagcggttggcatgagaccgtggaggaaagccccaacacagcctctcttctgaattcaggggttaagcacttaagcatgtgtttcggtgttttcccgatgcctgtcatgcctatcgttcttcggtgctccttcctcctcctccaagctaatacaatttaatttagtttgtgtcttcataatgcttgcgtgctctgttctaagtatgtgatacatgtaactaatttaagtcattctatatggcacaaagttttctccacatcctaaactaaccccattgatagtgtcacagaatagtacacgtacacaacaaagtaggagacaacacaagagagggaaaaaaaaactctatcgagaatgtgatcaatttggcttgagctaatgatctgctcaaactaagtactccagtaacaacctaaaccatacttagaccttgttgccattgttatggacgccatcaccaccaccatctttcagaggatcgtcgatgttcctgacgggtcccttgaaccacctcctggcgtcgagcacccaccagagcccgatgaggccgaggcaggcgccgagcgcgacgggggcgtagttgaagttgccggcgctgatcgggtacgccgtcgggaggaggaacacggtgcaggtgtagcagatccacaggaacgcgacgaggcacaccggccgcgacgcgcgccggaggtagaagggccccggcgagaagtcctcctcccgcatcaccatgcgggcgaagatgggcacggcgtagccgccgacccagccgatggttgcgatcgacgtgatggccgtgaagacgacgttgatccacaggatggggaggcccagcagcgcgcacgcggcggcgcagagccagacggcgttggcggggacgcggtggcgcgggtggacgcggcgccacacggaggagagcgggacgccgcggtcgcgggacagcgcgtacacgacgcgcgcggcgctggtggtgatggagaggccgccgaagaagaaggagccccagatgacgaagaggagggcgatggcgcccgcggaggagccgtaccggccgtggaacgcgtcgaacaggatctgcgccggcacgaacgtgccggccgtctcgttgctcgggtcgaacaggtagctgaagtcctgcgcacacacaggaacagagttcatgtcaggccattcctagggcaagtgcgagatgtgcgatcgcacaggcaacaaaaaaaaatcgatattgctaaatttatgtcgacatattttaggataatttacagtcggatgttttaaccgtgagatcctccgataagattcgtttcaagcacatgcacccatcttacaccttatgcgaaagaaccagctgcacctaatcaagctccaagctcattagcacttcacctccgttgtaaaattaataattatttatatatttatacgaatttacacagtagttacacatcacttatacatcacttacatatgtaattaatatgtaaatttgggatttacatatgtaattttaggaattatatatgtatttttgggatttatattgtaaatacactaaaattacatatgtaatttaggaagctacaatgtaaatacatgccgactattttttgttgaaaaatatgacgctataaatatagatagtcccaaaaaaataggggccctaaaattatacataatctatgtcaatgtattctaatatggttaggatcttttcactccaatttttaaaacttcattaaattcatctagaacaatttttttctaaactccatgttcgatgataatcatagctatcttgaagaactaatactgatgaaggcgttgttaacatgcgttctaaaccataccaattatatttttttcacttaattattaataacaactaagtgcagcgattcttcttctgcctagctagatcataagagataagaggtgattttttgtcccgagctcgatgaagaggaagaggatgaggagtaccaacctggatgctgaaggtgagggcgaggatgtaggcccagccgaagacggtgatgatgccgatgctggagaggatggcgatgggcccgttcttgtcggcgcccttggtctcctcggtgaggtgcgccgccgcgtcgtagccgtacagggagtactggctcaccaggagggacaggatggtggcgtaggcgctgctccgtatcccggtcgcctccggcgccgtctcgaagtgcgtgaacacgtacgacgccggctgcgtcgtcttcgccaccagcggcagcacgatcactatcaccgtgccaccgatcacctgcacacacacacagaagcatcgtcaatggcagctcgatcaaaattaactactactccctccgtccagatggacagacttcttctagattcattgtattaggttatgtctcattcagtacaagtttgttatattttaaaacggagtgagtactgatcttgggatgaacacggaagggattgttggttggattgtcacctgccaccacatcgagatcaggtcgaggaaggcgatgacttccagcgcgaaggtgttgagcacggcccagatgaaggttaggccgatgtacatgaggaggaacagccagcgaggggtcaggtagccgccgcctttgttcgtgccggtgcatagcaggattatgctctgcagaacttgagatcccgcgaatgcctgcgcaagcgcaatacggttgattgaaatgctcaaagaaatggaacaaacagacggtttttgctacgaattaagaggtttagcatgagaaatgtaacggattgctttgcatttttaagtccatggcagtgctgaaagtccacaaccgaaatggacagtaacatttgatttgatgttttcttaggataacatttaatttgcttccacctaataacaaaatggatactactgagtactgaccagaaatgagaacacagctagaaaaggatcaagcgtgtgactgaccatgttctactacagagaacaattgacaaaagagcatacctgtgtaccaattccggcaataagacctatggcctctaaccaagcacagcaccaagatgccaacgggccccagactgggccagccagatgagcagcccaaaagtacagagaaccagtggtctggtttcaaaaggaaaaacgatgccatcagtagattatcagaaacagccagctttcttcggcaaaacaaatagagtactgtaagtacagcaaaatgatgcgttgaaagtttcaaccatgccatattgcaactcaagagtcagaactggattgcaaaacctatttcttttttcaaaaatttcaaggatgcatgtcatgtgctgatggcgcgtttgcggagtctatgctgtagtactaatgtgagtagtcaacagaacagtgacagcaggcaggcttataattaatcaaagatgcaatagtgctggaaacaagtactactactactactacaaaacaaaacagccgtgagagagtacttaacgctagcatcacccaggtaaaacaaatgtgtaatgctagtgacaaaggtcacaaacattttacggggattcaaactaactgtgattaaagttggggttgatgttggcctaacgtaagtagtagtgtagtgttacgtaagttatgcctgccttgcccactatgattggaaatagtaccatttagtagagaggcaggtatttcaaactaatttgcaatttaaaaggcaaactaaattccaagacagcaagcaacttcgaaatgttatagtagtgggttgaagtaaaacgaacataaattagctatcgtaatcgaaatttgccgtcaaaaagtcgactgttccattgaaagttgtatcagaagcaaaccaagggattgttgctgaaataaaccttaccaaaaaactaaatgcatttattgctaaaataaactaagtcggattggtaagttggcaatagtgctaaattttggcaagattccttaagtatgtatcaaagtttggtagaaaactaaatgtatgcacatttttaacaacttttagaaaagaaaaaggtatattttgaaataacattaatctaaacaacccaaatgtctaaacagagcaactcgatgagcaccaagtttccatgataattgcaatccaattatagttttcagcaaatttatccacggcatggaggaggacggccaaactgcgatccaagaaatggtattgccaaagggaggagagacgaagaggggtgtgcttacggggaaggaagagcagatctcggccatggcgaagccgacgaaccaggtgaagaaggagacgacgacccagccccagacgaggctggccggccccgtgtaccgcaggctgctcccgtacagcggcgtgatcccggtgaacagcgtcatcgtcgagaaggagatggccagcgtcttgaacagagtctaaagaacaacatgcccaagaaaaaaaaaacatatcatcaatcaatctcttgaagaacaaaaatgaagagaaggaagagaactaactactaccaagaatccaaagatcaaatgcaaaaccgtgaagaaactaaagccaaatcacgcaagagaattccggtgtgaacgggaggaaattagccacgaatttagtcaaatctcacgactccctgatcgttcctatcgatcttataaccccccacgatcattttcaaattgaaatccagaagagaaacagagagaaagaaagagggggcggtggtaaatgaaaaaaaccgcaccatctccctgcggagctcctgcttgtacccgagctcgttgaggcgcttctcgccggagtcgatggccacctcgccggccatggcggcgccccggcgggatatgtttcggcgcgcgcggcccacgcctctcgggcggcggcgtctctcgggaatcttatatgaaatggagaagcgtgcggcgtcttgggaaggatttcgaggggaggagggttttggtgagttgagcggggggagcttctcctctctgcctcgtgttgggtaggaagggaggcaaagctgcgatgttgtggctacttctacgctatatagacggctattgctcctacgtatccgttctttgtttgcatggttgtagacagagtttcaggatctttgcgttgactaggattcccatctctttcctatccagcctagcctgagtgcctgactcgctagtaatttagcttctcggtccattccgcctataatttagcccaatcctttcctggcccatttgattcaaaggaaatttatacaaattttagagaattttatttctataggaatttttcctataaagccctttgaatcaaagaaatgaactatatggaatcctatgaaattcctatgggatgcctcttcccatacaagttttggaggaattttaacaagaggtagaacctcatggaagaaatcatttgtctttatctcttctcaaattcatgtgtttttcctgttgtccaatcaaacggtcattcctatatttttcctgtgttttggaatcacctgttttacacttgcattcctgtcagaatcctatgtttttcctattcctctgttttttcattcctgtgattcaaaggggcccttaagatgtactccgtactactattttctcgtatagaaaattttctatacgggttttgctttaaaatattaaataaatatatttttccaaatcaataataattaaactaaattaattatacattaatgactttcttgttttacatgcaccgactttatcttcatctataaaaacaccacctagaatacataaaagatgaattttagtatcattcttctcatcctactcttgtcatagcaagtgtcataatgattcatgtgatgcctctaaaaataccaaatatgattgagtgatgagatagagtagagaaggagagatgatgagtcactcataaatcaagaggcaactttcacataaactccaaaaagtgagtgtgagtgtttaaaaggtgttggtatttgtgtattagaggtgcaatatttctatacgttgcctcttaatttatgagtgagtgacattgataaatttagagatactgatcatatctattatagcacttgctatcactccacagctcgccaaccaaagtgagcactttagtgactttagggcttgtttaatttgtgaaaagaaaattttttgggtatcacatcggatgtttgaccggatgtcggaaggggtttccggacactaataaaaaaaactaatttcttaactcgcctggaaaccgcgagacgaatcttttgagcctaattaatctgtcattagcacatgtgggttattgtagcatttatggctaatcatagactaattaggctcaaaagattcgtctcatgattttccccctaactgtgcaattagttttttaatctatatttaatgctccatgcatatgttcaaagatttgatgcgatgtttttggggaaattttttaggtactaaaccaggccttagtgaggacatttcagacctttcacatcaattgtaaatctctccaaagatttcaaattgagctctatttgggacagatagagtagttaatattcacgtggcaaatgtcgtgtgtactcttaaagtgtaaataatacaaactctgttattattaagttgttttacccctttgctacaatgacttgcattttgtaacataaggagtagattaaaatagtgcttgtgtagtttagtgggcttaaattttcgattcatcagtagtgtctatattagataaaaacagacatgcttaagatgttttggcgttgtgtttgtaccattattttctgttagtacaatgaggcagggctactaacttttgtatttgatctctccttttctgtagtagcaaccatacaaagttttgttgaatattagctcttcccttatactgttgcttagagatgagtgacatactttgtgtttaatgctaaactttttgcttagagatcaaacaacgaatttccataaacaaaaacttgccaaaggctttaattagttgtgagttcaagagtttttatacgcctcccctatcatgcacaatacgtgaacgaacaaaatttgtcttcacttgtatgactagcattggtagctaagggcattcataatgtgagacacccctagagtgtcctcaccaataggaaactcagcttgcaatgggaggtatctctaggtgggctcctcaaaatctgaagcaacccgataagagtactatagcccacaatgggtgtcttggcccaaagtagccccagataaaaaatccccaaatacccctcttttcttccgctgcttcttccttctcttttcttccgccgcttcttctcgcttcttcttctcgccctcgtcgcccatctcgccgccgccgccacctccctcctctctcccccgctcgccgccgccgctctcccccgccgctcgccaccgccgccgccacctccctcctctctaccgtcgctctcttctcttctctcgcgtcttctcgtctcctccgcctcctctctcgtccccgatgccaggaggcatccccgccccaccctgccgccagcatcgaagcggcggcatcgacagcgcgcggcgagcggcgagcggcgcacggctatccctccgcccgtcgccgcctctctccctccgcaaggcgagcaggacacagggcggggtggccaacggcggatggcgggcggcggcgggcctcggcgccgtcccggatttgcttgctcttctttcttccttcccaatctggatttgcttggatgtggtctgcatgcagtgcggcgattcgtccggcggcgactccggctctgccccgagtgcacgcacacgccttgcccctgcgccgcgtcgtcctcatccccttcctccggccaagggtggaataggaatatgagctggggaaccggtgcccataggagcccgtcgccccccaatgggtctctcggctgcgtcgctccgccaaaaagcggcgagaggcgcgtccctcagccagaggtcgcgtcgcatcatggggaggtggctcggacggaaaagcgaacggcttagggtgaggggacgagctgaagacacccattgctgatgctctaactatacagatacaaaattgcctaaaatgtgatgagttgttttatgtcagcacagttgagcatgttcgattgctacaaatttaattgcatttatgctgctggtacagtatatagaaaaatagaaataaagatttactaacatatgggcacgcacattgcttcatattcaaacgtggtgggccacccgcgaagccatctccgttgactgggcgaatagaatatccgctggtgcaaatatttttccccaaaattggatgcggcttgtattattattgcagcgtccacacgtaggcacgtagctgttgctgtcacagaaacatccaaaagtagcctttgaaatgtcaagtgctacgtaagctaagaaaattgagcacgtttctttcagcggaagaatactccttcaccttctccagaacaataatggtacagtcaagccccttcacgtattgggtaaggtaatgacgtactggtaatgttatgattatgaaatgtacgtactaatacgcacaaatccctacatcaaattagtgcctttataaagtattatactatcactaaaaataatttgaaacgtttggtatgaaaggtaaatcaataatttaataatacaattattagggataactttattatttatgttttttctagctagatcgatatgtggtaatccattgcactagcatcactcatattgcatctaaaaagccaaaagaaaaaaatatttagtcactactaaatgacgatcatacctatccacatattttttttaaatagtgtcctatgtttctactacagatgctagtataagtagatctgaactctttgatcaaataagataaccgattggtttctactaacaatagagagcaccgtattggagctcttttatttatctttttctttttttaaaaaaaagtaagcaggagcactgctattcataaaacggaataagtttatagatcttttatgcaccactatagtgcagggctgaaaaaatgacttgtactatgctgttctgttcagtaaatcaagaacaaaaaggaatatggaaaaaaaaaaatctcaagttcatgcgtgcatacatagtgagacagcaagcagaacgtaccgtgctagtgttactcgctatgcttaaggcctggtttacttcctcaaatttttttccaaaaacatcacatcgaatctttgacacatgtatgaagcattaaatatagatttttaaaaaactaattgtacaattagggaggaaatcgcgagacaaatcttttgagcctaattagtccatgattagccataggtactacagtgacccacatgtgctaataacggattaattaggctcaagagatacgtctcacggtttccaagcgagttatgaaattagttttttcatttgtgtccaaaaaaccccttccgacatccaatcaaacatccgacgtgaccacctaaaaattttcttttcgcgaactaaataggccctaagtcagttgctttctgaagtgaatgtgtgaacgccagtagcttgctagtatcaaggagcaaccgaatcatacgaatggaagaagcaaattgaatgtagccactggtgcagaacgggtggacgcatcccttccacatgatgctgtcatgctaacgtgccaacatgttaatcttcggcagaaattttctagtgctactcttaaaagtggcatccgatttcacatctaggaggggaacgacagcgtgtcgctttcttctgggagtaaacaagagagaacccgttgactactatcaaaaataaaaattgcaaaagattgcagattgcggcacagatgccttctcattcatgatccatttccagcctgcacttcgaaccaatatgggggatggatcatggatgcatggttgttggtggcaacttgcaacagcataaccacccacaaacaggccagattgccagaatgttgtgtacagccatcctactcgtgtgtgaagcatgtgaatctgcttttgtttttcatgcctaaaaggtgtcacaatgatcaaaacctattttcgcattctttttttgttccatggatgattttgaatttaggcagccactggtagcatgtgttttcccaagtgaaaatgaaagtaaacgttctttaaggaaggaagtagataagtaaacgttctttaaggaaagaagtagataagtcttactccttttgaatttctccctgcctttttatggaaaaggagtattcctggatgactctctcatggagtcatggaacggtggaagatagcactgcatgcaccgatgcacgctgtacctgatctgctactgaagacctggtaatcctgaaaacatataagaattcaatgcggttatttcagcactgctcaatgcactgtattttcccaagtgaaaatgaaagtaaactttctttaaggaaagaagttgataagtcttacgccttttgaatttctccctgccttcttatggaaaaggagtattcctggatgactctctcatggaacggtggaagatagcactgcatgcatctatgcacactgtacctgatctgctactgaagacctggtaatcctgaaaacatataagaattcaatgcagttatttcagcactgctcaatacactgtattttcctaagtgaaaatgaaagtaaactttctttaaggaaagaagttgataagtcttactcttttcaacttccctgctttgaaaaaagaacattcccgaatgactatctcgttgaactctgttagtatagaattgcatgcagagtgtaaccgatatgctcatgaagacctggtaattctgaaaggatacaaggatgcaatgctgttattttagcactcacaatgcactgtatttaggatgctcatcgatggaagtgtgcaccttcaagcggaataatttccttatatgtgcagcaacatccatattgtcctgaatcttgaaaatagcatatcctgcttaaacagacaactgtactcggagaacagggaaattgtttaggaggaatagcctttttagcagcatcaattgacatatcactcctgtacaagtttgcaagaaaacataaatttgagtatcatttacatacaacatattgctaagaagaatgggtttagacgtacctatgcagttgaagagatcaaagtcatcaaaccattctgcaaaggttcataataactctactaaagacgtgttgtcatgctccgttctagttcagatgtcctatggcctctccaatgtatttgagtaggctactgctgtattcagcttatacagctttacagaaacaacaagtgcaaccgtaagaagcgctttttaatatcccaatttcaagcagtttgcaggtcacagaagtcttatttgctcactgatttgtcgaatcaaaactttagttgcagtgctcattttatctgaatcaatcaaagaacagttacccagatgaagattaagatggctttctgatctaatactgatggacaatgtctcttttcttctcgctatattatgtcatgtgcaatgtcggttacaacgtttaaatataagaaaggactttgtatacaacatgaaccccgaaaatatagataaataatagcatagaagcaaccgatattttacaacttgagttacattggttgtgatgcaaaaatgggttattcaatggaagattccctggaatgtagtataaaacatgcttccatttccttaaacaaaggctccaaagatgctgaaatactgatgacatatttgggaaacaggttataatgtatttctaaaaataccatattaacacaaagatacaggcatttcgattaatggttgcaaaagaacaatgttatgggaacagacaagagaaaggaatgcctctcctgttaaaagaaagcaactatacagaatcaaaagaatggagaacttgttcaagaacatttctagtctggctgtccaagggcttctcctggctatccgagtgggctatatttaacagatagagcttcctagaagcaacaaatgcagccgaaaatatcctcttcatccctccccttgtactatccagtaagtattcgatttcatacactgtcaggccatcatggcctgatctctcttcagcagaaataacctctgcagatttggtgctttcctgtattaacggaaaggattcaaaccaactgtcgatactagcattgaactcctcaagtacaactgatcctttacaggcaatcataagcaaaacaataaaattaactaagttgagttttcacataactgtttatttacatatgctactgtcaatttgtcacacaagctaagcaacaatacaagatgtatcacagacccctatatgataattaatcagcgtccatctaatctaattagtagtgcacttcaaatgtgaaatcatgaaaaatcactaggaaatagcatggagctgacaaattgcaatgtccaaaaggatcgttcatgcatttacctttttcttctcagcctgaatcagcctttcagcgacaaattgcggtgtgccaaactctgtcagcgtcgataggcggacgggattaacaacgataccaatattgttactccctttcccctcctgctgaaagagcgccgtcgccccggccttctccaccttcaccaaatcacgccacagaaacctcaaaattcacagctccaatccacacaataccagcgcatcaatttctactgcattgcacgatgcgtgctcacgcaattaccctacgttgcattaccacatagttcagagttcagagtgttttgcgtaccttgggccacgagacgggcttgagcagggtgaagccctcgtcccggtcagtgtaccgctccagttccagttccagttccagttccagctctccctcgccctctctcgcttctgcttcatcgtcttccttcgcggatgccacggggagttgcggcgacgaggcggggaacggggggagggcggcgaggagcagcgaggcggcggatgccgcccttctggtggttagcagcggaggagtggtggaggaggaggaggaggaggcgcgcttgggcgcgacggagtgcggtggaggcgggcgctgggcgcggccggcgggcctcggcggcgggccgcggcgggggcagccgacgacgagcggcatcggtttgttggttgctgtacggtgctcgtcgccaccggcggcggctgcgcctccgcgcgttatcgccgtatgtgacacgtagacactggcacacgtgggcaacagccggtttgtcaatgggctgggcccatagcgcttttcaccttgtatttaccttatgggccaaaagctctatgggccggctcaaggcctgctgaaatgttgggttaactcatggttgacttagtcacaacaactatagacttatggggtgaacgtggaggttgatatctttcctaacaatgaactgataaagagggaaagatattgcaatatactcatatataagaagttgtagtaatgtacatgatagagttagtttatgtcaaactcgtgtaaaactaaactatgaatacggaagagcaccacgccaaagtcatccgcatgttgtagaaaatagtcatttccgttgaccccaccactcttttggagttgaaaatgacaacgcgtgtgaaagctcagcaacgaggaataatccaaaactaccaagcaagcacgtaggcctcgttcggaagtgcttcggacaaagatgaagtactgctacctcagttttaggttataaaacattctaacattacctatttttataaagatactacatccgtcccataaaagttacatttctagctaatttaggataaaatagtatgattgaaaaatgaccacaataactttatttaatgaacccactgtatgcacacattccatatatacaaatgattaaaaggaagtttgagagaataaacccatataattagcatacttaacaaaattacaagcattaacagcccaaattacgtgggatggaaggaaacttatatagatgaattaattggttaggcccaacatactagaaatacaatttttgtgggacaaagccttggagctagaaatacaatttttatgggacggatggagtattaataaatctaggcacacatatatatctagatttattaacatatatatgaatgtggacaatattagaaagtcttataatataaaacggaggaagtaacacattaatgaaaaaattattagcctatagttaattaagttaattattttaaactttaaaaagtagatttatttgatattttaaaacaacttttgtataaaatatttctatatttagctgtttaaaaaaatgctagagaaaaccgatataggatctgttgtatttcctccgtcgtaaaatatctataaaaatgctactttgactaacaaatattaataaaaataaaatattttaaataaaaagagctgtgtattatgataatttgtttcgggagaatagccaatatggtccctaaagtttcgcttctgggtcattttagtccttaatctttcttattgtctaaataagtcctttaattttgtcacgtgggctgatatagtccttggtcccaccaaaatcgccacatggacatgccatgtcatattcctatgcaaaatctatatgatttgtccaatttacccttatatatatcatagcaaaataaaaaaataaaaggttaaatgtaagagcaaaagtatacctcaaacggtgaaaaaaaggatgagtatttttttcctatggttatgtctaattcacccttatatttatttttctatgatatacgtaagggtaaattggacaattcatcatagattttgcatgaatgatgacatggcatatccatatgatgattttggtggacccaatgactattctaggacttgtgataaagtttaaggatttctttggaccatttaaaaggttagggactaaactgatcctacggagaaactttagggactaaagcaactattctcccatttgtttcataataaatatagtaccatcaattttacgtgattgatttttttattttttattaatagctaaaattaaaaatgcttgacttaacccttaatataactgtacaaccggacaatcgaacaaccgtgacgtgtcatcctatcacgagtacgacgagtcacggtccagcacgagtgcacacacacactgcaccagtcaccgttctcagtagaggtgtactagtagaccgtatcacacggcagaaaacaccgcgccgccaccaccacctgcgcctcccctccccggaagccgccgaaaagccgcgcggcccaccaccaccaccgtcgccgcgtccggcgcggactttaaaccaaaccaaaccccactactcccctgagcaccaacgaaccgcgaaaaaccccctcgaaacccaaggcggcgggcgtggtggtggactggacttttttcacctcactccgcctcgtccccgccccaaaggccacgctcccctccctcccaccaacccaccaccagcgtcacccatggcggcccagcgactcgccgccctccacgccgccgcgccgtcggccttctcctccacctcctccgcctcgcatggccgccccgcggcgcgatccagcaccaccgctctcctcccggtggccctcccgcgcgcctccgccaccctccgcgccgcaccttctcggctcctcccccaggtccgtgtcggctcggtcttgggtggtggttgggttggggtttgggacgccctggttgtttgttgttgttgactcgtgctctggctgtgtgtgtgtgatcgcaggaggcgaaggcggcggggagcggcaggtcggtgatgtgcatggcgtcggcgtcggcgtcgccggcgtcggcggcggtggcgtcgggcgcggcggagctgaaggccgctcgcgaggacatcagggagctcctcaagacgacgcactgccaccccatcctggtatgatctcgtctcgtgtacacgcaccacgcgatgcggctttggttgctccgaaacttctccttcatatcagcatcaccatgtgggagatttgattcggtagcagaggagccatctggccgatcgcctttgcaaccaaggattgcacatgagaacaaactcagctcggagacagcgatgttatgagtttgtgaacacactgaattttctctctggagacagtgatgtcatgaatctgtgaacacactgaatatgctctctggagcaatgctggaatttaacatcacgaggaagtaatttcatgaccagcttgcctctcaaataggattttgacctctagaaatagcgtattgtcgtaaatcaccaatgtgtaacgacagttcaattgttaagtctgatctcatctgtactgacgagtaggttgcacatgtcacaaatggcttgtgagagttaagagttgtattgaaagtttgaaactataaattcattcatcacgtatcctatcatcatttattgtttgtggtgataactgatactaacacttgcagcagcttttcccagtgagactatcaagtatcatgtgagttactctgtccgttctcaaatataagtatttctagccagaaatgcttacatttaggaacgtaggtcgtgcttgtgtaaattgttaggctgtgttcaattagttatcagatggtacaagtaaattctaaggaattaggcaatatgaatgcggcgttgaataattaatgacagcagaacaacattatcatagcactaggacataagtccagttcattggttatttccatgctattttaccttcatatggtcatggctatgatatgccagcttgctgaagttaaaggtgttaatagggctgccatttatccaaataatcaccattgactgaacttgtactgtcgtacattttgaatttgcaaatactgaatgcaatgcaacgggggtagaccacggcaccatttcctattgtttagttccattcaaacccttgcatgtgcacaatcaattggctttctactccagtttctctatatccacggtggttaaaatgttattcctttgcctgcatgaaggttcgtcttggatggcatgattccggtacgtatgacaagaatattaaagagtggccacaacgaggtggagctaatggaagcttgagatttgatgttgagttaaaacatggagccaatgctggtaacattaccttttcacgatttcgtttccttgttgcttgtaagtgtactttcagcaactaaaaatcctgattgaattattgaagggctggtaaatgctctaaagcttgtccaacctatcaaggacaaatacccaaatatctcatatgcggatttattccagctggcaagtgctacagcaattgaggtctgatcccctcacgcccccaaaaaataatgaaaaatgaagtacctaactagtctggttttaatgtacgaacactatattctaccttaatgatccatttttgtcaaacttgtactaggaagctggtggtccaaagattccaatgacatatggacggattgatgtcacaggtcctgagcagtgtccacctgaggggaagcttcccggttagcaacttatgtttcactggattttccaaaacactaacatctgtactgatatcctgtcttgcttacttcataattgttctttttaatttttaaatgtaaaggttcctatgtacattgtctctcatcagcttaatatatcaaccgaccttattttttcccttggaaaattatgggatagtttttattgccacgctaacaggcataaaactgttcttacatataggggtatttaggaaatattgcaccagcatcatactcaatcccttaaaactgatgcttgctaactttcagttatccttcccttttggttgctcagatgctggcccaagtgcacctgcggatcacttgaggaaggtattttacaggatgggtcttgatgacaaggtgtgcaaatgagattctagttaaccagatgttttcccatttgctttgttttatgtgatgttgagttgcatgtgccccgcgatgctgtgcctacaggagattgttgtgctgtctggagcacatacacttggaaggtccagacctgaacggagtggctgggggaaaccagaaacgaaatatactgtatgttcttcttatctttattttcttatgtgagaaccgagttttgagcatgatctcagttctatccactgtttcaatgtattcccatgttaagtctatcattgcatatcatgtcatcatttttgcaacaaggagtcaaggaccacttagtacttcatgatgttttatgctttcagtacttaatgtctctgcttaaattacccttattcctcaggaaagaaactacgtgtattaatttcaagatgtgtacatagctacagactagagtaaatcagaactccatacgttttagatatttttccttggcctctgctccgatggttttggctgaaggatgtactttttgctcacataatctctatatattctctgcaaaatatcgtgccgcctctgcaactccatgaagcaacatcaactccaagtgcatttgtctttatggttagactggattggacaaatcttgagctttttcaccttttttttcttactttttcagaagaatggccctggtgcacctggtgggcaatcgtggacagctgaatggcttaagtttgataacagttatttcaaggtacgtgccactttgcccttattcttcatgtcggatgattcatatgattttgcatgatgtgagctggtgcctggtggcaatactgcaggagataaaagagaaaagagatcaggatctcctggtcttgcctacagatgctgcattatttgaggacccaacattcaaggtgaataatgcttaaactgtactctcacttcccgaaataaaccaatctcgtactaggatatgtcaggatcatttgaaaattgaaataattattgaactaactgtctgagaattcaccgcacattcaggtctatgcagaaaaatacgcagaggaccaagaagcattctttaaagactatgccggagctcatgctaaactgagcaatctgggtgcaaaattcaatcctcctgaggtgagtgataacatcttgtccttagttttcctttccacaacacgccactcttgaccgactgggccacagttagtagagatagtttatccgacaaaccactgccaagttgtttttacccccgatgactagcgcccaatcctagtccgtggtccttctgttgtggcaaactgagagtatgtgactgtttggttgtcctgcagggattcacgttggacggttaatgcgatgcgcatgagccagatcgctgaagtggccaaccacttttacagaaaggtctatatactctactaccccatccacctcccaatttgtaggttcatgtcagctgttctacttactcgatactgtgattcaacagaaggttcgctcggttcttggctaaaatgattccaatctgctatttatcttgctcgtaggatcaagagagaaacactacacaatccaatttcctgctccaacgttgtgtcatcattccagatgaagcttttcctgaccacgagtcatattggatttggaaactgagtattcgaataaaaaaacagactggctagagaggcaaatttgagccgaacttgcggaccaaattcgacgagaaaccaaaaagaaaaacattttaatactattctttacttattatgctttactcgtcctgtcatttttttagctgtaccagccagatgctcccccgaccacgggggcagcagatctgcagactgcagcacacacaccacaggggccagggcacgagtaaattcccgttcggcgagtgctcttggattttgtccgctacgggcacgaagaatcttttggtgcactgccgtgccgtgcagtgcttgggcccatggacccggtccacagtccgcgccaccgggtacggcccaccgagatcgggagcgccggagtggctgcctggtgggcgcccaccgagccaccaccacgcaggagagagtctacagggtttttgctaacgggacgccattaagggcagcagtggattggattaagacattgattactaggcgttcgtgagtgatggggcatgggggctatgctatgacgctgggcaagtggtggtcgcagcggcagggtctcacgtggtggccacgtgccgggtatcgagggagcccgctgcttttgtggtggagcgagccaagtgcccaaaattacatacaaacttcaaagagcctctccccccacgctaggcgcaggttctctcgtgtctcctgtcactttcccggtgatggtaagcgtgcttaccgcttctctcccgcccaaattgacccaaatcgatttcgacttcttttctatctacagggaaatgctactgcacagcactacttgtattacggtacactgctgtagtgctgtaggattaccgtgtttatatgtccatgaactgtgcgtattgtttacggagtaaatgcattgcaaagtcagaaacgattaggatgccatgtgctggtttaattaaacaaccattgcgcaattaggagtagttttcaatcggttacagtttgttgtgttttttttttttgtgtttgactatgacgaagtagagatttatgaatgcgaaaataagattagatcgtgcaacatattagtgtgaaaataaaagatgctatgcatgcaactataattataaagagtgaagataccgacattcacgtatggttcattttgttcgaggaagcaaacctttactacgaggtgatctatcgtaattttaatggatagtgactaccgattttttggttggtatactaaggttgtcatttgcaatttttttttgccacaccttatttaaagttcatgaggtgtggtgccaagagaaaagagagaatcttaccacaagtataactgtaaaccaaataagtagtgatcaacttgatcaaactcgttcaatataagatgtagcaaccttgggctacatgtgacattaaaccttacacaatgcatgtagtgaatgtcgacggaggatacttgtagaccggatatagagggtattggggtatgctggtacgaggatctacgtaatacgacatcaagcaaacagaaaacagagattatactggttcaggccccttaataggcaatagccctaatccagttgatatgggattatatgatggaagtcacaaattacaaagggaataatggaactcgatgataccgacgagatcatagtcgagttgattcgactagatcacccgacgacttggctcctgtaggctccggcttcataggctatggtggttatcttggctatgagatttgatgttttaggtcctcccagggggtcatttttatatcgcaggtcaggcggtttccaagtagaactcggagacatcggaccctgcacgatacagtgacgaccatcgatggacttcgtgatgaatttccttagcgtatacagagaacgtctgtacacgcgcagatataccatattgctgtatagcgtatatctaagggtagaggatatgccttatctgtaaccctgacagtgaactcgtcacccacccataaaacctaaccagcagaatataaaataacccctcactccattttctatttttcactaattcaaataagtgataattatatgtggtgaacgagccgcctatgttttcactgcatttttattttcaacacatgtagataaatatcagtcactaacaaatgctactcgttctccaagctcaacgatgtggatgactctacctgtggtccctgaacacgttgctactacgaatatctttttttttttagaaaaaatgaaaacaacgaggctgctcgttagacgttgcgatcccgataaagacggcggtaagcgcacctccggtggtcaaacccccccaaacccccacagaaaacttgagcgctttttagaccaaagcaccaaaaaggcggcacaaacccaaatcgacaaaagacgccacggtgacccaggcgcccctccgaggaagacgacgacggctgcctgcctagccaaagcgagaagcccacgagctcgcggcaaaccaacctcgtgctcgcccaaaccctagccgccgccccgcacctacctaccccggggctccgccgccgcaatgtcgtcgtcgtcgaggccggggcgggccagcatctccccgttccgatcccgccgcacgtcggcggcggggggcggggcgggggtggcggcggcggcgcatcctcctccggcgaggacgtcgtcgggggggcgaccctcgacgccttcctcctcctcctccgccgccggcggtggccggcccactaccccgtcgtcgtcgtccgccggtggccggcccaccaccccctccgcggcgttcgcgcggtccaccaccccgtcctccgggaggccgacgacgccctcgtcggcctcctcgagggcggccgggagggcgccgcccgtcgcggcggtggacgcggccaatgccaaggagaacatcatggtcaccgtccgcttccggcccctcaggtgcgctgctgctgctggttcgatcgctctgtgggtatgggagtcccctgggctttgttgggtttttggtcgtcacggtgtctccgtgtttcgtggtgtagtcctagagagatcaacaagggggacgaggtggcgtggtacgccaacggcgacaacatggtgcgcaacgagtacaatccgagtatcgcctatgcttttggttagtgatcttcaactcatcctatataaaacattcgaaatgatgataagcagttgtactccataaaaggagggaaggaagcaatctaatatgggatttccttttggaaatgaggatgacattacttggcaattaaaagctggctctagtggaatcgaggcataccgtaaatgagtattatcagtttcagcggtagattgttacagcaatatattctggtagtacaacatagaaaaactacttaggctgcacatgggaagaatgacatggcggcattgtagctgtataatatgtcttactttggttggtcaaggttgctatatagaatgcaagatcaagagcaccagatcatgatgaaacttgcatgatcgttagtacaagtgcatcaggcggtaagaagttaatatgttattgttttgaatctgagtgttatgatactgag

SEQ ID NO: 2490 - DNA, 1336 bp, Oryza sativa
aaaaggatgagagccctagaatttacaagttacaactggtgacatgtgatatctctgcagtttattaaaaccatttttgttgtatgtgttcaccttttcagataaagtttttggccctgctactactactcgtcatgtatatgatattgctgctcagcatgttgtaagtggtgctatggaaggaatcaatggtactttcaagtctccttttggttcttaaaacatagtactaaatactttcaaaccgtaagtgcaaagttactgaactaggaactgtccattgttacatagctatgaacatttccaagtcgtaaatatcaggattccgatgccacctttaccccctcctctttgaaagaaatcatctcccaaggctgctgagatgagggccctaggtaggattatttttgtgttggtaggatcagattatagttacaatggcaggaatgcaagataatttgataacgtcgttatatgaagattgtaacacataggaacatcattataccattctgtgcctaagtgtcatcagaaccagaattcactgataatattttaggatattatgagacagatcataatcctgacaaacttggcctctactttttgctaggacttaaagcattggtagttgatgatgtttatttttgtctcttactctagtatatgtagtttattcagttcagtaatattgttctgttccttgtaggcactgtttttgcgtatggtgtaactagtagcggtaaaactcacaccatgcatgtaagtatcagtaccgttgttatgcttatgcatctgttctctttcatgcatctaatacatgccaatgtgttcttattcattaaacgcgagacatctctatttcatatagctagtatcctgtgtatatttttttaatgactatcgcttcaatttaattaccaattattttttttacgacacactcgaattacagggggaacaaaaatcacctggaattatcccattggcagtgaaggatgttttcagcattattcaagatgtaatctgttcatttctctgtgaacaattaaaatggttgggatcgtatgacaatattatttttttgttcacctcagacacctggacgagaatttcttctacgagtttcatatcttgaaatatacaatgaggtacttctattgccaagccctgtctttgtttcacactaatgtgcaaagatgtgttacctatttagtacttacttaccctgtagaagccaatatgtttccaatccgtattcgtataagtttgaagtcatgtgatccataacttgcgctcactctttttgttgccttgatcacttctaggttatgat

SEQ ID NO: 2491 - DNA, 519 bp, Oryza sativa
gagtaatattaatcattaattgagcaatttcatcacgtcttattttagcaatactgatcttataagatgtgcctgtaattttttttttttttgcaattgatcgaagttccgtaaacaaggaaaaaaaactgaacaactccttagttacggtttactgtttaccttacataaaaaaaactgccactcttctcacatataattataattgaatgggttatgtttcatttgtattattttcttaattcttacacacaagtatatttatacaattagactcattaagaattcatattcccaaggggcctctgaatctcttatgtttacgaagaaaaatatggactgcatgtgtttgtgatccctttcttctcatgggctcataccatcaatcacacacattcaccttcatccttttaactcaaccaaaaagatctaaagcctctatttgagattattgagcgaattattactactgattatctatttataaatttaatattttgacaaatacatttaacaaga

SEQ ID NO: 2492 - DNA, 5258 bp, Oryza sativa
tttactatgataacaataagtaaaaacaatatgtaagatagcttaaacaacataataagcttatataaacataagcttatataaacataagtttatataagttgatgcgatttaaatttaaatagtatgtagaatgatgattcaaatgtaaaagtaagatgatgtggttttattagagaacaaaagaagaaagataatttagaccatacatctaagagctaaaaaaaagatatggcttaataagagaagaaaataagagagataattttaaccatagattaatcatctaaggactaaaaacaattgatgtgatgtgacttaataagagaaaaaaacatgaactaagtaagaataaactacttcctccgtttcatattataagactttctagtattgcccacattcatacagatgttaatgaatctagaaagtcttataacctgaaacggaggtagtatataggtatataggatattataaaaaagatgaagagatatattgaaatattatgtgaattatgtgggatgatttaacattcttacattttaaatatctaaaatttaataaattatagatgatatatcatgcttgcatgatgcttaaatgtaataattgttagttgataatgatgtatcatttttacatgttaaattttagaaattagtgggatatatataagagaggattccgtagtgtacgttcctaacacttatgcatcaccgtgttcaatttgaagatcttagatacttaatactcgtgttagtctaaccacttgaagttaatgatcctgtggagtacaaatttattttatgtgctttatgaggtactccatcattgtcacactgttcagtactgttcactgcagtattcacacactaatacaactcttatcttttgtttcatctattcgcacgttacacatgtgcatagctttgaacttgaagcggtggtccaacaagtactaatcgtgcacaaagtcttgcacacccttgcacttcacaacagaaacatcaataattgggggagctgtagtttgaaattttgggttttcttgtgatagaactctaatgtcgcctttggtacaattatactacaatatgattaactgtatccactccctcttaggctgcattcgaaaactacaatcttttatcttctattcccttatttttctttagcacactcactgaactgctaaacggtatattcttttaaaaaaacatgtaaaaaagtttcttaaaaacatattaatcaattttcatgtttttaaaaccaatatttaattaatcacgtgctaatgagtcataccgttatgcgtggacggaggagaagatccaaacccctctatctgaacgcaccctagtccttttccaacctctagccatatgtatggttagtgtcaactataacaggttgaccaagggtaattagtttataaaaaaaactctatttcatctcgtatatgataatagccgctttatctcttatcgtgattgtcaatccaattttatttctaatatccctacacacgttgagatattttatttttttcaaggataacctttgacaatcattgacgctcgcaaccaccataccacattgtcctaccaactctcctagctaaaaaaaatgtatcatgtcgtcccaccaaacctcctagctatagaagatatatcatcgcgatacttcgtgttgaaacaagtggtgctatgctccatgactagagattaattccattgtactctctcatcgcccatggcaaagatctatggtcaggctttggtaactatggtaactatagctatgtttggatagagcttgagattttgagaaacatttgatgagccaaatacgaagttaagcttcttggcttctgacttttagtttatttttaattctgtaactataaattctcaaaatctttctgagaatccaaattctctacttacgagaagctcctccaaacatgcaacaaaaacctaagaaagtgaagtacgaatcttgagtcacgaacaatgaccagatcttgctaaccctggagagaattatttggacaatgaaaatactgggaaaaaagaaaatgttacagaatggtatcccgttcggatgggataatgcctttgagctactgcatgatatagctagtattgactgaggtatcatacgatacctggtaggtatcagctgatatcccgttcaaacgaaatgatatctttgaggtattacataatacctaagatgtataggatgatacctgtccgaacataatactgtcctgtaacattcttataaaaaaaaaacaattgaaagctggggccatgggcaccgtttttcttccaaaaacccggtagagaggaaatcgggaagcgaattaaatactcagataagccggggaaggcgacgtcgcgcgctctggtctcttcacccgggcaaacatccccacaacgagtggtcctcctcacctcacctccaaccccctcgtctacccacccactgccacgtgggaccagccacccacccgggcccacccgtcagtgaccaaacgtgacgacgaggtgaggcagatcagcggaggcgaggtcgtcgtcaacctcgcgccattaatggcgcgcgcggtaatcagttaatcaccgggcttaagccgctgggggcggagaggcaggcaggcaggcagtgcgccattagcgtcacatggggtgggctcttgtacactagccattaatacggcaggtcgcccatcccatcgcgtctcctccgcttaaatccccgcggctccctcctgtccgtggttgcagctcgctcgccgcgctagagcttagctccgccgccgccgccgccgccatcgccggtcgagctagctctttttggtagtgtagctaaggctagcaagaggccgggagcgcgggtggtgtggccgcggattatctgggtgcttgcttgtgcctccggatcggccgggggtgatcgaggcatggacgcggtcatgtccgccgccgacgacgcgggcgcggcgtccggccgggaggacccaccgccagccgtggtgctcgtctccgccggcgccagccactccgtcgcgctcctcggtaagcgtccttcggggcgggggaagcatttcgtcgaacgccttgccggcgcttctatctaagcgggcgtttgcctttttcttttctttttcttttttcccgttttgcagcgggcaatgtgctgtgctcgtgggggagaggggaggacgggcagctcgggcacggggacgcggaggaccggctggtgccgacggtgctgagcggcttcgacgccgccgcgccggggatcacgtcggtcatctgcggcgccgaccacaccaccgcctactccgaggacgagcagcaggtgtacagctggggctggggagacttcgggaggctcggccatggcaactccagcgacgtgttcactcctcagccagtcaaggccctgcaggggataaagatcaagcagatagcttgcggcgatagccattgtcttgccgtcactatggcaggtgaagtgcaaaggtgagtgaagatcgctgtaaacagccatctgcccatactatttactgtatataactccaggattgtatagtatggttgtcatgtgatcttgtttaaagctgcttatcagcaaccaaaacataatttatgggtaaagcttttatagttattatgtccttagtgatttaaaagtcaatgctaaaaaataaggcatgatgagaaaaaaaaatcccaaaatctacttcaaaattaaattttaaaattcaaatttagaagccgcagggcaagtgatgggatgcagctgctggcaacttttataaatgatgtttttgtttttctatattaccagaaggatgatctgggaattcgaagggttgtgcatatttttttttggatgaatattgaatagtggcaaattcttacattattctgttgtgttgcgatttctgagttttgggtgactgctgtttgcactgatcttctcatgactttttgttttagttgggggcgcaaccaaaacggacagcttggtcttggaaccactgaagactcattgctcccacaaaagattcaatcttttgaggtagaatattgtgtatcatattcatataattatacatattagaatgttgtgtatcatataattatgtatatcataaaaaggatagttttagtactacctcaccgtttattgatatttgtgcatggaaatagtatacgaatacattgtgctaaggaagagtgtcatgtgaaaatcactggtatggtggcatccattacgcagtctagtgcaaatctttggtcatccctgtacttattaactaaattttgtactccatatcatgaggtggactgcaggtgtagatcctctcacgttattgtaacagttttactctccaatatagacagcacccagagacaataaataatatgttcatgtaataataatctgaacatcctggcccacttattacgtgttgcttcaaagagaaggaagatggataacttttagattttctcaatacactatgcactgttgctaatggtctaacatatgtatagggagtttgtgtgaaaatgattgctgctggtgctgaacataccgctgcagtaactgaagatggtgacctctatggatggggctggggtcgatatggaaacttggggcttggtgatcgcaatgatcggttggtacctgagaaagtatcttctgtggaggtaaatattctaacaagcttgcccttcgcatcccctcctttcaaattccttcaatatttaattcattaaaaaggaatattccatccaatttccagaatatgtttttgaagattccatccctatatgctactggactgtattgtcagtcagtcaccatatcactgttatcatagagttaagaatgagttgaaggagacaagatccttttattttgtcagtcattttctcaatacactattaaaaaacaagatatttcctacatagttcagagcatcctgtattttgttatcaccttatattccaaagcattattagaatcagaacacctaagccaatcattttcttatgtggaattcaatggaatacaatatggtcctagagtcaattaattgaagctagatacactcatctacttatccagtagtgatttatccttggaaactctaatcataggttgctagtattatcaccttttatggttttcgcaaaggaaaggcacttgtactaatcagggacagggaaact

SEQ ID NO: 2493 - DNA, 14299 bp, Oryza sativa
caaccttcgggatatcaacactttttttctttctgtgagcatcatgggcctcttggcaaatcatgcacccatttcgacttccaccagtaccatccactgcgagtccattgtctaagggactaaaagacgcttcatgctccccaaacccccctgctatcatccaccccagacctgatgctgacttgtgccaactaactggaaacattttgtggcattcttttacaagtcaattttgaggtaacgtgagttacgtgattagtgataagctcaggttgtctttatcactaagcatagctctgatttgtatacggagcctagcttgcttgagttccagttctaccggctgcagtcctagatataccatcagtttgacatataatgtttcaaaaatgtttactttcttttgaactggtaatttaccattgtttttactgattctacctcatacttcggatatgcagtttgggcaagtcggagttggtgatactgatgatcactgtttcccagtacaggtcaagtttccagaggatcaggtatggcatatatctggaggaataaatgaactattgaagcatacaagtcataatcacaatatttatgctcaatcaagaacttgatgttccatttcttgtgttgttgctgcagaaagttgcccaagttgcttgcgggtggaggcatactcttgcatttacagaaaagaaaaatgttttctcatgggggaggggtactagcggacaacttggtcatggtgaaatagttgacaggtgtttcctatcaatatttctgtacccataatatcttgctcccaaaatgaatcatttttggtcttctgtaaattaacaatctaccattctgaatctgaaggaacaaacctgtgatgattgatgccttaagcccggatggtcctggctgcaagaaattagagccatcaacagctgtaccatttgcaggttggtcccaacgtgttctagctattgcagcttgccagcttgcagatactagcagttgcatgactaatggtgctttctgctgttttcagccaaagtctgggtctcgccatcagaaagatatgccattgttcctgatgaaaaagtgagttcctttgtgtacttgaagccctttattctcccacaagaacacgaacagttaaaatcaaaccattacacggcacttataatctgatactatactagaactgttactgaagttcttttccttctttacctgtaggttccaaattcaggtgaaggcacggcacgaggcaacggggcggacgcaaatgtaccagagaacgatgtaaagaggatgcgtgtgcattcgtaggggcctggacctcccaatttaactccctagtacactatccaaaaaccccctatgtgcaactgtttcaccgcacgtttccatccagtgctgtcccatttttgtgcatcccattctgcccaagtgatgatttccacgaacccctcctggtgttgttgagatccagtacctattagggttatcgcagctgccactgtctgtaatcgatcacctgcttagaggtgattttagcaaaaaaccaacctgcaccgttgtggacatgtgtttggaatgtttttaacttctgttggaagatgcaataagtgcttggttctgatctcttgatgatttgtcactaaagaatctccccttctgataatcactgagaatataggtgttcgcaaacttttcagaagtggcaaaccggaagagaacttgtgaaacggcacgcttttccaagtgatacaactacgctacagccctatttgtttagacgtttagacttataaactaatttatgagctaaaaaaaatctaagggtgtgtttagttctttgggtgtaaattttttgaagtatacggacgcacatttcaattattaaacgtaaactaataacaaaacaaattatagatttcgtatgtaaactgcgagacgaatttgataagcttaattaatccgtcattagtaaatgtttactgtagcatcacattgtcaaatcatggcgtaattaggctcaaaagatttacctcgcattttacatgcaaactgtgcaatcgattttttttccacgtttaatgtcccatgcatgtccatcggcgggagcgccaccggccgtgtcccgtaggtccattacacgggagcgccgccgaccgtgtcccggccgtgctgctcgccctcgccggttgagtctcggccgtgccgctcgccctcgctggcgctggcccataagagggggtcgcccaccaaaagcgagaagcttggaagagaaatggggaagggcaaggtgaattcctcattgtcgctgccggccgcggtgggtggtggcgatggcggcgctcggggcggagaggaaggaggtgctcgcgtcgaagggccgcggccgacgatgagcgcgcagggagatcctctttgccgtcgccgtcgctgccaccctccttcagggcattgccaccgtgggccgcctcctctctcgcctcacccagccagcgtcgcacccgccacttccccctgcctagcgccgccgtgtcgctcgtcaccggccgccggcggacctgctcctctcccacctctccccgctggcctcctacgcacatgccggccgactaccctggaacggcgagaaaagagagataagggaagggagagaagagggagaaaggtgatgatgtggtcgccctgacacgtggggcccacatgggtctcacgctgacttgatcggcacgtcggacaaaaaccaccgaaggatttaaagtgaacagttttataatttgagggatatcatatatctggttttgtgattaggggacgattttgtatcttgatgacaaatagagggacctttggtatactttttccccgtgaatttaatttcccggcccggccactacagtgagataagcggcccagccggcctggcctccggcgctcgcgcgatcgtctacaaagccgagccgaggtgggcgcgcgcgatcgcgtcccgtctcccgttgggctcgatcggtcgcgtttcgcgtggttggtgcatttggcagctgaggcggggcgacgacgacgacgacgtgaccgcctcacaccgggcggagtgggagaagcgaagcgggcaggagatcgaggagcaccggagcggagcacgtcgcgcgcggggcggtgcgtgcgcggtggggggacgtacgggaaagtgatgtgatgtgatccgcggtggcgccgcgcgcgcgcccgcctgccgatctctagctcggtgctcttgaaaacgaacgagaaaggtttcggccggtcggcgcgaaacgggccgggccgatcagctagagctacaaaagactttaaaagacaccgttaggaacatgaaagaattaatgaacttacgaacggactgtcgtcgcgagcgttggttaaattgtcagacaaaggcagtcgagaagggtgtgattgtgaagcatatacgatttccccgtacgttcagggttgcatccagcgtgtaccgtttctactacacagctgcgcagtctgcagacccttccatttaattttgtgaataagaaaaagaacatgttaagatgagagccctagacgggcgacagccacagctgcgggtgccccagccagccagcatcacgccattacgcacccgcaaagcacagcccaaatgaatcttatatacacggtcggccaccacaccgggaccccggacccccccacactctcccctcgtttccaaggagacgccccacaccaccacacatccacacgcccaaccaagacgcccggtcgatcagtccccacatgcagcgtactacgtacgtgcgtgactagttgtcgtcgtaagttcacccccaacactcgtcgacgcccaagttcgccgcgcggcgcgggcgcgggtaccagccaaggggcagcgtcacaggctcacctctcacagcaggctgatgcgacggcgaagcgcaacgtggcaacgtaccacccaccctcaacaccgtccaaaaatgtaaatgctttctctagtttttttttacgaagattaaagtgagatgtaaaattaaacgagaaataattatgatgggttgagatgaataaataaataaattaaacaataagagatatttgtttaagataattaactgagtagctagtcataagtagccactcacccgtccaaaaacataagggcggtccaacctcataagtagagtactcaatttatcaaatggacgctactttatggtatgtattagctcaataaccaactccttcctttgtcataaaatatatagtaatatactcaattaaacatcatcaagtattataaatattgataaattgtgtatagatttatagtattagtatctaattggttattttttctattaatgtttatggtcattaggatttgaactcttatgagcacacacgactctaccacagcaccaattgttcattctcgtgtctaatcaaatatttggttactatattctagaatggtagagtaacaattagaccaatcaggaatggtccttcagttcaatgaccgatatgatggtttatcttgttccttaactggttttaaaactatcgtaaacccttatatatatatatatatatatatatatatatatatatatatatatatatatatgtttgggatgaaattggaagtaattataattttcttttgacggcgagaatacgtacacaggagtagtatgtctgttacatggcccagcatgcatgcgcgcgtacaaagtagcggtactacgttcggtagctagctagcttgtgttgtaagctttctaacggccggccggcacagttgcgcagtgacgcctcttcctcgtcctgtcggtagatccgtgcaccgcagatctacccacccctgcttccgctttgtcgccacgcccgtacgtacgctgttatactatctaccgccttcggttgtgacttgtgcctgtggttctttgcatggcatatgccactctgccattggcacgcgcgcacacgctaggcgatggcgcacacccactgcccccattatataacaattttatatcgaattcgacatattttaattctatgaatttagacaaaaatatatttagattcgtgataacatgatacgtcaatctgatatttccttcgtttcacaatgtaagtcattctatcatttttcacattaaacattaatatgaatatagaaaatattataatgacttacattatgaaacggagagagtacttgctatatattgagctgtagggagtatttgctattagtactagctggcagcatttttaccgtacgtaattaggacgacctgttgagcaactatttttaccgtactttggagcgttttcgaagtaaccaggggtttgtaccagcactcgaagataaaatagtttattgtagtgttaagttatgcttaagtctcacggtactttaaaaaagaatttatatgaattatacctctcgttgcagaggaagtcctaaaagcgaaacaccaaggacgatttatatatgtaaaaaaaacataggatgaatttaagtgccatgcatgggtattttataattttttttaataaaatgtaccagtatattacgaaattacctgtaatatctgataggtctgatattctttttaaaaaaatttctgaccaatatgacattgtatatgtgaattgagtgtaacttggttttctcgtggtaaaattaacctatctgcggggattcgagtatccaaaaaatcaacttagcatggacacatatattagtaaaaagatgtctatgctaaactcatcagtgttaagatataccgatttattctatctcgaacaagttcgtaggagtggtgacagctaaacgcatataataaattcatcaatctctcgaatgtgcatataggaatggtgaacatgtcaacttgtgtaatcataagggtaaaagagtaagtacttgcgttcgcgtttttaccgtgtttctttaaaaaaatacagttgaaagcaaaactatattttaaaacacgacagtttgcatgaaaaactagcaagagtaaacactaccgtacttactactactgtttactgttaagctgtagccacctaaagagcaagctagggccacacccacactgacacacatatacaagccagagagattgattaatatccctgtcgcaaaacagcgtggcatttcaccaatttttctacacgcaaaccgcagtgtctaacagatgatggacgacttcaccttccctataaccgcagcagcagcagcagcggcggcagataccgccgccgccgccgccgcagcagcagagcccctccgcctccaccaccaccaccaccaccatcgccgccgcggccgcctccacttcgccgcctcgccgctctggttcccttcctcctgccccgtcgccgccgcgccacctgacgtgccggtggccgacgacgccgacaccgccgacgccgccgtggcgagcgccgtcaaagacgtcgacgtcgtcgtcttcgtccgagacgccatggaaggcaaagaacaagaacaagaagatgaagaaggaggaggaggcggtcaagaagaagcgacgtcggacgccgggcggcgggaggaggaggaggggaagaaagaggaggaggcgacagcagcagcagcagcaacaggagagctctcgcgcggcgacggcgacgaggacggcggcgaccatggcggcggtggcgcggcgcgcgacaaggaggagaagatggaccagctgtgggagaacttcaacgaggagctccgccaggcgctgcaccagcgggtgggctcgtgcccccgcgcggacgcgcgggcggcggcggcggccgggatggagctgtcgccggagacgtcggacgcagagtcggagccggcggcggcggcggcgctgcgcgggcacatcgggtgcgcgccgatgctgcggccctcgtcgagggccggcgccggcggctaccgccggacggccaccagctgggtgctgctcatgaagatcttcaggaggctcttcgtcatcgagaagaccatctcgtcgtcgtcgtcggcggcggcgtcggcgtccggccgccatgggagtgcgcgccggtgatgccgccatcattaattcacgatcagcgcgcggcatccgtactgctctttgcacgattaatcgcctgcaattaattaagaagcatcgctagcttctgatgatgctaattaaactgcagttaagtaaattataggcacacgtacgtacgaattgctcctgcatgctgataacgccatgtagctagatagggtttgttcagcagatacaagggactgagggagctagttaagcatcacttgaattttgaattcttcagttttttttacagtaatttatttgaattacaacattttttctttctttcttcctgtgctctcgaattataccatgatttcaggtaggctgaagggcactgctacattatgcatactgattttatttaggcctgtttggggaattagcgagattccaggaaataatcggtatccatccggtgataatctggaacccaacgtggcacgtttagattagttatattataaattatttcatccaattccacattgttatatcatgggatgtaaggagtagttcgaagctgttcagattggaaccaaaataaaccttatcaaattttgacaagttagacaatattatcaaaattttggcaggatttaagtctggcaacaaactaaatatatgtactttttttaataactttgtcaaaaaaaatggtaaggttgaaaatgatatcaatctgaacggcccattcatttcgagaattttggcattttgtagctattgaggctcggaatctccccaaacctgacttaaaagcatcgcttccttctcatgcaaatggtagggtgaattgcaactaattctagcttggtatactagctgtcatcttaatcgaacattaacatggaactgaatatggaattcattttccaggtcttcttcaatgctagctagtagtaatagatcatttaattatcacataatctgcgttaacataatcagaagagatcaagacctacccagattccttttatctctattggtcacgagatgctgtcatgatttgtgacaatatcatctttggatctggacaaggaaaggtgtacggccttttagaggtcactttttttgtgggggaagaaaaagcttccgtactgtgcttagtaggagaaatggaggatgcgtgtttaatttaggtttctcatatagggacaggggattaattcggggcactaaaggccaaaagagatcaaggacagggacatccaacctccaacctgattagagcagtaatgaatctctgctcctaagctatagaagctcctgaagacaggtgagcaccgagttgagtaaaaatgggagaaagcatttgattgtaccagttcagagtagattcagttgcagtgctgcatcaaacaaaatgacagcatattgttaaaccaactggtgtaactggagtttaaggtttgtgatttctggactacaccctctgtcccaaaatatagcaattcttggctacgaatctggacataggttatgtccaggtttgtaagcaggaattggtttattttaagatgaagtatcttttaagaaaggtaaaccagcaagttaaattagagctgaagtgacgggcaacttgaaaatctcacaatgaaggatctgaggtacaattgccagttcaattagcactgggaggaacagaacagttgttgtacaatctagaaacctaacctaaatgaatctcccaattgatgtcaaccaacagctagaggctagagcagacaacccacaagaaattatttgaaacacagaaacaagaatgattgcagctggccctacattcacctactatctcagagcaatgtagtgcatccagattatatatgcagtggataccattgtcaccaaacaaataatacaacaatgatcatatgaacagagggaatcaccctagctgagggaagactacagttatgtaatcgaagatattgacacaaatgcaatctgatttgagtacttaactactcttattttccagttgcgtaatttctgaggtcctgtttgtataactgaagagttgggtatgaatttaggaggatttacccccattttctgtgaaatcccttcattcccaataggaattgacctaagcaatataaataacagaaccgccatcaatctatgcgtttgagatggacacgatcctattttagaacaatatacagcactgacagcgtatgacaaggtctagatagtaaagagtttgacatgatcattttggtatctaggaaaacctcatagtttgctagatacagcgaggtacttggtatggcgggcctgcgctatcaatttgcctgtctttttcttcctgaaatcaacagagacaacaccgactgattttccagcgcgcaacagctttccctcaacctctatttcttcctggaaaattaccaaagtaaaagcagttaatggaaatgtcaaacaacttcttgagtcaacacagtagtggaaagcgaagataattggaaaattaaaaacaccttgtcataagaatcagaagaaattaaccaaatctacatttttttcatccaatttcgagccaattaacaagctatatatattttttcacaaaataatggacaggtagaaacaattggtgtggttacctcttatattcgaccaggcattttgccagcaacactgctagtcaaattctaatatcctgtactggtaccaggaacgatgttttagccagcaagttttgatctcaacttatccttgagtgccaacaaaggaaaaaggaaatcacaaaaggaatgcaggcgcattcacttctagtcctgaaccaccccttttgcctagagactacacacctattgtcctacagtagaaaagtgacctaaaggtgaaaggtaagaagtaatgacccttttttttaatctaaacaattgggctgtcatcctccatgttcaccaacgttaacccattagaatactaccttccacctttctagacaaatacaaatatgagattgcaaaaaactttagggagtttttttttaatctgctgaatatttacttattccaaagaagaaatagcacgcttgcacattatctcatgtcccaagacagtcctagaatttattgtgcccgtttatggaagatattgaagcacacatgtgcatatgcactattcttgagcacataaggctcaaggtcattactcttcacaacactatttccatcaacttatatacttccacatacaacaatagttaagcatatcaaacagtgaaaaatggacacgtaggtggaggaaatgaagagattagaagtacactgtttagatatgctatcagaataccaaagcaccgtcactcaatgattaatatgaaaataatgcaggaaaaatgcattcaaattcattacaagaagtattacaagtccaagagacatccaacatccaagatgggcaaatcactaagaaaattgcattcaaatcaccataagagaaccacaaatcacaaaaatgtgtcctaactaataactagattaaagacacagactttagattgatgtgaccacacttacggaaaataactccaacatgatgatcaccaatggcacaattggagcctctgtttattatgaatatgtttaatctctcatgaggaagtactgataatactctgatgaatgctgtgccacaccctaacaacagcaaagtacttgcgctataaaaagctgtatgcaccctaaaaaaatccatgagcccacacacaaaatatctgatttaggcagaatcttaatttatgtcatggagccagaaaactaggagaattcaacaacttccatcaagttcaaagtaattgttaccctggttcacccctagttcctgctttgagcaattcttacaaaggaaaaccaactactactacatattctctccctctctctctctctttggggtactcagtggcagattcagctaagacgcaaagctgtccttaacaactgctgtagcactcgtaccaaccatccacgacaacaacctcatgccctcatttggcattcacctgcaaagcatcccagcatcgtgacagaacttgatcaaggatcactaatacaaacaacaagaacgctagacacctgcaatagttttaaccaaccgcaatggtattattgttgggtaccactcccccttccttgccaaacgtgactgccaaacacgagcccactcggagaaaagcctcgcaactacttgcctaatctcattgtttcaggctcccagcaattcggcgaggcctaatttgacaaataagcaccaaatgcacaaaatttcgacagaaccgcagcatcgacggcacaatttgttttcacctacttagccccaaattagttgattgcacatttacacagacaaacaggatcaaaaatttgtactaactggcaattgggaagagaatccttggtctcaccccgatgctggccacgtcgacgtaggagaggttgagctcgagcgagacaccgctcgtcccgatcccgctggagaggaacacgcccgacccgagctggtcggcgagcgtcgccgtgacgccgctgaggaggtaccccgccgggctctgccaaaaaaccaccacgcgcgtccgcgccgtcaccatctcagacccaccgaagcttattagggtttgggagggagtgggagagggggggggggctgcgggcgcttacggcgatgcgcggggtgacgacgaaggagcagaggaggcggccgtgctcggccgcgtcgatgcggacgccggtgagggcgaaggcgtcgtagcgcaggctcgcggaggcggggccgacgacctccttggacaaggcggtgggctcgaggctcctccgcaccgcttccgggtccatctctacggcggcggcggcggcgatccggccggccggcgacgaggtcgcgcgcccggatccgacaaggggacacgggttgggttggtaactccactagctaaccgccacgcgacttccccaaacgatggtgaggcttgcttctgtggagggtgttccatttacccgtttcgagagttttaccgccggtttaccgcacccgaaggtaagcctatttacgcattgtttggttaggcttggattcaattcgggccgggaataagtatagtaaaaaatttatgaatgatccaataagaacccgaaatttatttcgggccgagaatcaatttactcatgatagggacaataagagatcgggattagttccacatctcttgactagtggattgattcctggtctcttattgcccctatcatgagtaaattggttttcagcccgaaataaatctcggtctcttattgtatctatcataaattttttactatacttgtcattcccggcccggattgaatcgaagcgtaaccgaacaaggccttactacgcaaccgagaaaaaaccaaatacccacttcattttatattattaatcattttaacttcttttctaattaaacttcttttgaatttatcaaatcaatagaaaaatttaataacatctacgacaatgaaatagtttcagtaaaactaatatttaatatagtttaatagtaatatgtttgttttgggttagaaatgttgctattattttctataaatttagttaaattttaaaaagtttgataaaaaaatcaaaacgactaataatatggaacggagggaccgagggagtattgacaatttactaattcggtcccaaaatatagtaatgtaaagtaagtgcaattatatccattctagtgctacaaatatttctaggactacaaatcggaactgattcgtactacgtagattgatggtccaaatttctaatctcatcctatattgctatattttgagatggggccatgaaggtagtaaaattttaaatttttgtttaacttttttttaaagcttaggggttacttgctgggtccatatttccgattgagcacgggatcctgacccatgacggtatgacaactttcaccaaatcttaattaaatttcgatctaaattactgttttaaacttgaattccccaaaaacattcaaaatcttactcggaatatgttttcagtacccggaatggtgtttgtgaggcggacaggtgggaccggcgggccacgaatgagctgacaagtaggtccagccaggcactattcctgatccaatggctttgtgtgagactgaagctacatttgaactgcttttcagtacagatcagatcggccttaatttcctttcccttcaagtcatagcaatgccggaaatgtttctaatgaaacgaacgcccagatgttcaacggaacaaaagacgaactgtattgaattattcaatgcaattaagtttagacagcagatttccaacaaactgactagtatagttcacaaatttcgaacaaaatggctagtgttcctgtaagagaatggtgacaagactgaccaaactcaaacttggttgggtcacgggtcatatttaacccactctgaatttctatccatcttgctgaacaactgcactgcatactcattttcagtagtctctgttgtatgcagtgtagagaccatcagtgtcctgcacaacacaggtgcctctgagcattaaattttgcaaagcaagatacagggcaaaatacatggaatgctggaaaagaaattaaagatgcatacagcaccttgatcagagttcatctttaacaggctctgatgatgatgttacctcctcttccacagcatcaatatgggttttctcatccactgcagcagatgcaccagctttcggtcccctgttctcgttgataaaactgatgatctcctcagctgtccttgcaccgtcgtacgacaaaaggttcccacttgatgaatagaagtagatagttggatatccctcaaccgtgaagtctgttggtatatcgttcacagttccatcctgcaaaaccgtaggcattgatttccataacacaaaaggtatgaataaacgatccgcaacaacagcgaggaatataaagtcatcaactcaagacgaagtaccatctttgctatcactatatcttggtcatcttgcaatgacactgcaatttcctccaggatcagggcaaacttgcggcaatggccacaccaaggtgcatagaactcaagcaaaactgcaacgaaattgatgtcatgcagtggtgaaacaagcaatcaaatagaa

SEQ ID NO: 2494 - DNA, 3552 bp, Oryza sativa
ccacaactctagtacttttgtgagagagctctacccaactccactcccagttttggtggagctgaaactgtttggctgagctccagctccaggaggggtagagctggagctggagctgtgccacacagaccctaagataaaaaaattaccttatttttcgttagcagtataaactgctaaatgatgtattggatacgaaaactttcttatataaaaaatgttttaaaatatctgataaatttatttgtaagaattgtaataataaaatttgattaatcatacgctaatagttttcttgtttctcgtgcttttagctttatctttggatctgatcggtagtgcttgttgcggctgcgaccagcccaaatctacacaaaatagttgatttgaagtcagcataaacgattaaggcctttatctctgagaactccaccttaattgaattaaaatggagctaataactagggacagatttgggtttgaaggaggagagctagtgtttggtgggcattagcaaacgcgatctccttaattgtttggtgatcctgcagcgaaggtgtagataggtagtggcagggagtgcttgtactgaagatgcacaaacacaccatgaccagcacgagcacgagcaagaacacgaacacgacgcgtgatgatgtcagtggcagttgatggaatcggaccgggcaattaatgcgttgccgccccatccacgtcgtcctctcctccccctccggttaattttttttccttccggtgaaaactttttcggacagaacagtgacacacacatcctcctcctcctcctcctctctctctagtctctgccgcagctacagcgccgttgaaaaatcaaccggtaaaacaaaaacaaaggggtgtttagataaaagtttccgtgtgtcacgtcgatattatatagggtatcgtatagggtgttcggttactaataaaaaactaattatagaatacgtcagtaaatcacgagatgaatttattaagcccaattaattcattattagtatatgtttaacgtagcaccatattattaaattataaagcaattatgcctaaaagattcgtctcgtaaattagttataatatgtgtaattagttattttttatttaatactttaatattcaaatgttcgatggatatggtaaaatattttgggacgagatctaatcagagccaaaacaaacaagataaacgccgtgaagaaacaagatggccattgccactggctggaaccagaaggaaggagaaaacacggaagagacagagcgagcgtgaggtagtcgtcgcagcagcatagcagcacgcgggggccatatgatatgcaatgcgaagcgtagggtctagtcgcgtcgcgtcttggggcagcgagcggcatcgcagctcccatcttgtccgcgctttctgtttgctgcagcggctgcggcagaggcagctgcagggcgaggcgtgtaggagtagaggctagtactgctatagtagctttcggttttgtttgcttgttcggatcaaaaagctgccgcgagaatcatttcgctcccacctgcttcctcttcttcttctctcctcctccactgctgcgtcgtctgcgtgtttttcttttgttttcttttggttccaggggcgctgacaggttgatcagatggatggaggggatggaactggggcttttttgcctccccgtctccagtctcctaccactactgcttctacttctactgcgtctggcagcttgtgtttcccgacgcatcgatctgcatgtttttgggacttgggagcgatcatttgctagtatacgaatacttgtacgcgagcgacacggaatgatggagcgctaatttttcagtgtgccggtgtgtaaatttgcactcaatgaactctctctgcattacgacaactacagttttaatggggatggttgttgattgttttgccgtcaagaaagaaaaagaagaagaaaaactcaggctgacgatgggcttgtgataggggcagtgttttagcgcggttaccgcatctcgtgttaaggtacggttaccacgaaaaaatgtgtggtaaccacgagacataccgtggttttaaaaattaaaaaggttaccgtgcatggtaaccgctcggttttgtatttggcccttatttagttcccaactttttctttaaacttacaacttctttctttaaacttttaattttaattaaatttttaatttttaattttgacatggaactaaatacactcttaaccttgggaactcgggtagggggcaccctggtactacacgatcttttaatgccatgtctcaggcgaatgattccaagttccgatcagcgatcaacaggacaccgtgattgaccggtgcacagtgaagctctgtcaatatgtcatcagcgtttgttgtgaaccgaagaccttgcaaagaccttcacgcggcttctgtttgttgtgaactgaagacattggctgtgtttacgtcagcgtaaagtttaaattttggttaaaattagagatgatgtgacctgaaaagttttgtgccaaacttcagtccttttccatcacatcaacctgtcatacacacaaaacttttcagttacatcatctccaattttaactaaaatctaaactttacactgaactaagaacacagacttacgcgagatttctcagtaaccaccattggtaatcaactacaatgatgatatcgtgctatggcaaggctggagtccatccagaaccaccgcagaaacggggcgcttccgcttccgcttacgcagccacgcgcgggcgacgcaacggccacctactccgccaaatttgcgcagagcgcacgagctgtcacgtcgcgtcatccgtaaccgacgctgggtcaatgggagagcccgtaccgctgttccggcgagaccacggtccggcttttaaccgctcaagtcaatcccgcattcaataaagtacagcgtcaggtatatatatgcatacgctatttaaacatcaaataaacaccaagacgactactagtactagtactaaactgcagctttgctacaggctacaactacgagtgtacgcgaaaaaaaaccacggtacagtccgttcggctgtctccacaaggagatgtacggcttggctacacgccttgggcgtcaatcgtacctaagtccctaagtaaatacagtaaccgtgctacgatcttcctaagtcaaatgaagctgtacaagaagggggcagcatactgcggattagcaccagggctgacagtcagaaggcataaccacattccacttccatgagattgcttaaactccgttgtactagaatcgtcagtgctgcttcggctgctggagtattgtgtggtgtggtgtgaatggatcaacgtcagctgatgaattggagggcaactgcaaagctgtgacctcgccctgctatagcacctgatttgccatctgtgaagcataaatgaagatgagccaagcaggggcagaaagatactttgcaaacaaaaccccaataaatttcaggagctaatgtgcgtatgttagtc

SEQ ID NO: 2495 - DNA, 3207 bp, Oryza sativa
tttgcccttcttcgtgtaacaccttgcctgtaatggttaggatgaagcctggtataaatctgaccagggctaacgtgccatctctaagagataacacgctagctccggcttgagacgagtgcctagaggctttcgtcttgacgggatggggcaaggcgtgcgtcagaccgccagtcgccacctaacccgtgatctgaccggtctgtgactggtcacagaccgaataaaggaacgcgctgtactgcgttgcatgcagcgtgacacgcttgaccagactgcaataaatgctgttaggtgagcacagctgtgctcacttatcccatatatgtggcgcagacttccttaaggggtcggggtgcctcggccctcggggccggggcaagcgcaacccgaccccccccctcgggggaaatcaggaggagggcggacacctcaccctcgggcccgacgtccccgaaggtgccaggccacgtgggcgattgtgtctgcctcaagcctctggtcatgatactcccggtcccatatcaccgacagtagcccccggcgttatgccagagcaatttcccttcccaagggaagcggtcaggtgtgacgccacccctaaagcctggtgacaggtgggaccggtctccgtagttgggcaaaatacccaacggtctcaatccatgcacattggtattggtaactttggttgtccataatgggcggtctattcaagactgccacaccacttgagcagcgcgcgaatctgggtgagcagatttgtctcgcccggagatacggtaacgccgcttcggtcggcgagcgtaattaacgcgcgcacgatacaatccatttcgattgccacaaccgcatatccacttcatgcgccgtaagcgggcgaatgggattagtggaggcgtgggcacgggaaacgagggagcgagatagcgagatacgagggagcgaggtagtgggcgcgagaaacgaggagccaggcccagcgatggcaagggtataaaagcatcgagtaaaggatttgctcccttcctttcgccattgttcctcttgccttcgccgcctgagctctaactctttctctgctacgccctactttcgccacacgcgctcgttctcaatcatctcttcctccaccaccatggcacggggctctgctctgcacgacggcagcgtactaccgccttcccgcatcgtgagcgagaggcacgccggactgccgcgccgcttcataccggagtccgccaccggtcgggagatagtgatgctgggcgaggggcgcccggcaccagactacccggggcggtccatcttcttcctccccttcgcaatggctgggctggtcccgccattttcttctttcctcatggatgtcctggagttctacgatctccagatggcgcacctcacccccaatgcggtgatgacattggccatcttcgcgcacctgtgcgagatgttcattggggtgcgcccctctcttcagctgttccggtggttcttcaccgtgcagtcggtgtcaccgccgtcggtggttggcggctgctacttccagccgcgggggccggtgttgaaccgctacatcccctgcgtccttcgcaagaagtgggacgactggaagagcgactggttctacacccccctcgccaacgaagcgcgcctccgacttccaagtcagcccccggcgcaggtctccagctggcgggcgccggtagatctggggaggactacgacgccgtcctcgaccgcctggcgggcctgcgatcccaggggctcaccggggccatggtgtacggcgattacctccgtcgccggattgcgccgctccaacggcgcgcccggagcgcctgggagtacactgggcctgaagactacatgcggacccaccagggagccagatgggattgggctcccgaggacttcaagatcgtggtccaaagggtgctgaatcttagctccgtggaggcgtctcgcattcctcaggagatcctccccctctgcagcgatcccgaccgcgcctccattctaaccattatgatgggggtcggggcctcagaggagagagcccctaagggccacgacggcgcgggcgagcgccgccggggggaacaatctgccccaggagggggtcgtgcttctgggccccgcgtcgggggctcggggagcagccgccctgccgacgcccaggggaagaggaagctgggaggaacacctcccccatctcctccccgagggggcggggcggcgcgtgccagcagtcggcgcccggagggggccgcgccgacgtcgcagcccgagggggagcgcaagaagaaacggctccgcaagacgggggagacggaaccatgccggggaaacctgatttcccctccaaggtggtcattcaaccgaccccctcgcaggttcgtctcactctcattgcaaccatctttctcccaaaaggaagttttttcttactcattttgttcgtcttctggtttttttcttctgcttcagcgatgtcccgtcgcattcctcccgccaccccaagtccggccagttcgaggccgaagatccagcggccgcagaggagcggaggcgagaatctgaccggcgtgaagccgcagaccgccttcgggaagctgaagaggccgcccgggaggccgcccggattcgccaagcggaggaagctgctcgggaggaggccgcccgggctgaggaagccgctaaggaggaggccgcccgggctcgccaggctgaggcaacagctgctgctggcgcgtcaactgggcccactccctcgggcaaccctcaggcgacagcctccggggaggcacgcgacgaggccgcgggcacatcgcctgggcccacctccccgggcgacgcccaggatcaaacgggtccgggggacatccccgagcccagcacgtcctccgggggggccgagccgcatcgccttctctccaaggcggctcttctcctcatcttccgtcgccccgctgagcgccgagcccattctgcaggccttggccgccgcaaacaccgcggtgctggatgggtttagcgcccaagtggaggccctgcgcgcggaacgagcggagctcgaggccgcatgggcacgcgttgaggaggggcggcgctcggtggacgccatggtggaggtgggccgtaaagctcaccgccgtcacgtctcggagcttgaagcccggaaggcggcgctgacggagatgg

SEQ ID NO: 2496 - DNA, 9126 bp, Oryza sativa
cagctccacctcgctgtcactactttcttggtctcatctcatggcacgtcctagatcgggtgctgctagctggatgatagggaagggaagagggaggagagcttgagagttggatgacatgcagctctcacgtgagtcccacatatttgttgggttacttgtctaattggactttcacttacatttgggccttacgtatttgtttttatttttgtctaaccggactgctgttttttgttttttatttttctcggtgccatgtatgcgccatgtagaacgaagatcaagccaacaagatatataagcgtcatgtcagtcaaaccactctcaatattactgagcactcaattcacacttaatttctcgttacatcagaagagattgattttttttttggatgaagggagtattttataatttactagtaaagaggctctataacctggtttgatggtttgaggatgcgaatcaaactggacatataatatataactagaaataaaggcgcgctacgctgcgcctggctgacgatgaatttgaatttgtaggaacaacattgtgaatagctataggcatgtttactttgacgttcaataatagcttaagcataataaaaaatcatgtacataatatatttatgcacatagatgtattaaatcaaagtcgatttccaattacattggtgttagaataggcagaatgaacatgtgtgtccaactcccttatttagccatgaccagggcaccgtaagaaccaaaaggtttagctctattatccttttcattgtgccagcatcatttatcaaagcatgatctgccataccattcagtacacaaatatatcatcgacaaccccaattagatcaaggatattgtcaataggaagaagggatagataagtgcggtgcagggtttactgtgtaagcaaagaaaatatagacctactaaaaaggcaccagttagcaatatagtcaacaaaagatagggaactcaacagagcaaccagtcagtcagtgaataaatataatttttcttttgtgcaagttaacatccaacaaaaaacccattggatatgcaaatcaagctatttatacaaagattaaatcaaatgtaggaaccaatagttgttttagttgatccacgtaccaggaagatgcatagcatggaggcataacatggcataatggtgtaaccaccttatgagaacgtgaacaggaaagaatagaacccgattacaccggttgtttgggaacttcgcccaagaactaattattaccaaatgataaattcatcctttgtaagttgaaatcaactaaatctaacattaatcgataatatggatgggtaactatgtaaatggttggctcagctattttaggtgtagttgaattgtgaaatgcaataaaacggactgactttttgtagagtgaccataccagttgcctttactaatttcggtaggtaaagagttaaattggttttttcctcttcaaacactaacattaggattctgtgccataggaaatatccacataagctacttcaattggttgtgatcaaatggaagcattgttgaatcaaatagctgttgcacataataaaggaattaagacctcattttatatttaggatacattttatatttaggataaccgacatatctaaatggtatggtacaggtgagttgtgggtcctgctgtactaaaattaagttatagtatatgtggttggtgtgctccttataagccttagtttggtcaattaattgattcaatcaaataaccacaactttttggctaagcttatgtgattgtaactaattaagcttgattttccattatccatgtccaactggatcactgtctaccttctctttatttaggccaaatgaaacattgccacatcatacgcatagataggaaaaaataaaactggaggcttattaaacttactttgagtactccaatttaatagcacgctcattggcaacgatctactcaatatgaaattaagatggaatgtatgagaagtcaattcttataaatcggcaatacttcttctgacagcagcagaacacacctcttggaataagaccctgtgttaaatcttctcaacaacggatatttttctgcaacatattagtgcaagataatgattaatgtaatgaaatttataacctttaaacaacaaaaaatgcagcgtacaaaatgaactttcaatacattatttccatcatggatcaatggtagatatggtttatttaaatgtgcctattcggtagagaaaagggagatgcaaacatttttgtaatgaataagcataactgaaattcaaggaaaaaataagtcaatgaacatatacagataaatatagtattttgttccacaatgctgttggcaagcaaacttgagttggtattcccagagtcgataacctgcagagatcatgtacagacctatttgcctcttcagatataacatggtggagaaaatctgctcagttgtctgcatcctatttcctctaaccgcaggaagaaatatatgagaagctatatccaaatgtaggggaaacaataggtctcacttggctaattgggagggggaaaagcaagaaacacaaacacacatacaaccattagtttgaagcccatgccatccacatcgaataaaccagaaaaagacagttagcagccattaaaaccaagatcgaggtagccatgcactattttgagcggtggtatctgcaattaaaattatatgtgcaacatacaaattagaatatcaaacatagcacaacaccataattatcaagagatggaattggataccgacaaaagcagaatgtgtgagtaaaggaagatatggccaaacaatgggtccaatcgcatcaatatgcatgcacaataggagggggagaaagccccaacctcaccttcggtcctctcacagaagcagtggtcgctgccggctcccgtgaaaccccttatcatgtgcgactcccatgccagcgagctgaggaagatggagagggatcctctaacatgtgaagatgaaagaggagaaaagggtggtaacggctgtcatcctcatccgggtttctggatccgcctgtaaggaggacggggtcgccggacctggtggtcccgagctcctcgctgggagatgtggcggctgaataggagggaggaacgatctcgtcgtggcgacgactggtgaaggatcgtgaggcgacggcacctacctacatgaggcaagcggcggcggcggcgacggtgacaccagaggagacagcaacggaggtgaaatagggagagccggcggaatagagggaggtggcgacaacggtgaagatgacgtggcggtgacgctggcggagagagccagagggcagcgaagagagcgagatagctcaagcagtcgacgccgtcgtggtcgtcggggtcgcggaagaacacctctggcaccagcagcgcgcacacgatgtgcgcccaccgcgcgttcgtcgtgtgcttcatagcgccgcccctcgccgggcagagaaagcagcgtggccgcggagatagcgagagggcggcggagagagcgagaggcgacgccgtcgcggccgtcggggtcgcggaagaacgcctccggcaccaacaacgcgtacacgatgtgcgcccaccgcgcgtccatcgtgcgcttcatcgcgccgcccctcgccgggcagaggcagcagagagggcggcggaaagagcgagagggcggcggaatgggctagagctagggttttgtttggtggctagggttcttggcaaatccaggccatcaattcctgatccaacgatctcatgatggtggaagagcagccacgctgggacacgtggacggccagatcgtccctcgcgcatgatcgaacggacgatagcggcgggagccgacgcacgattaacaggaagtacgggggttttttttgcaaaaaaaaaacaatggagtggcgcacctagttctccagaacctgattaaccataggtgaggggtgtttccgaaaaatttgatgatgtggcgagctaattctcagctattcccacggcgtttaagtaacctaacgattttgtttcccctatgaggtaaaaagaaaattaatgaacccgcaaatatcggcaaaacaacaagtattgttaaccaaggaaaaaaaactcacgataaagtgataaagacaagatacgttttgaccagaaaagcccgtgctcgattattttgggcacaggcttcttcggtaaagaggaatcacacgattcaagtggaattttttgtaaacctatattcagggaagtagagtggacatttctttttttccttttcaatcttccgcctcttcgttcaaacttcaaaccaagctttggcctttggccccgggggctcggtggcctcggcgaaatccgccgaccttgcgcctctgtccgcctccgccgctgccctccgccacctcgggggaagggaaccgtcgggccgccgccggggttgtcggtgaggggggctcgctccagtcccccacaatcccaccgttccccctccgtcgtcgagatcttcccgactactacgagcggaggcccggcgcgcgcgcgcgatgccgccgaggaggaagaagggcgtcgccgccaagcagaagccgccggagccacccgccgccgacgcgccgctgcgggaccggctgaggtggctcaacgaccaggaatgtacggcgcctctaatccctattcttcatcccctttcacgaattttaggggttttttttttttggccttgtttatgtattctatagacccggccttgtaattactgtaagttgggggcaagattggttggttggttgtgcgttttggttggtcgattaataattgcttggctatgcttcgattaatagtgtagtgttatagtagatgaatcgcatggcttgtttctcattatttagttctgttgggaattaggttttagggattttcttaagtgtaatgtaactcattcccctccaaaattaggagccattttggagacctgacaacaacatagggatcattatgtaaactaaatatagctaatttgaggtgtgctattgacttgagaattatcagaacagaaaaaccaagaactaacaatcataagaactgcatggcaattgacaacatgtgaagcagaaaattactattttccatggctggtttggagatacttatctcttttgaaaagcatagcagattttatagctaagcacccaatctaggggaatgcgattttatagcacatccatggctgctgattttgatgtttcctttcattttgccgtagagtttggatgttctagaacatatttgagagtgaactatcaaattactttttttcccttttcttttgaaatggtataactttcattttcccttgtggaaacaaagactatcaaggtgtaggtaacataagcctgctaatccagagagcaatgaaacaaatagacataatttactagagagttaaacagaaaaagggactgccaaaactgaaaacaaacttgcatcgtctcaagtaggcaggcctcaaatctcaatccatcagatccactgctcctttttacctgccacctattcaatcctgaattgctgacttgcaagtcttaacccttgtattgagttggtgccttacctcattagttgcaaccaggtatttgcaaacctgctcggtacccagtgtgagaaacgagcaaactttgtactccaccagtcctggttctctgattgctttctgatgaaactaatcatttctggttctttgttgaggtagatgacatgtaattccttacttgtagtaatctaagtaatgtattcctgatctctatatctgaactatcaataatttgaataaaacttgcatagtttctctttaccaagctcatacaacttaagtgagcgatttaggtcaaatgcttaatcaacttcctctcatacaagaaattgttcatccggcatcctattgttgactgtggtttggttatttctttgtttctgtactctgtgatagcttttctaacgtgctttgaatttgaagagtaataaccccccaagaaattgattaaagatgctaaaataatcaatccctttagcagttagccctgttccagtcttattttcttaaaaacatatatcacattattactactctgtagaatgcaattgctcaaactaacaagaaactataattgtgtgttgaaatttgagtttggagtcgagacagctttcaaggatttaccatccagttatctgtaatttcttcaaaggcataaccagtgcattaccattatcttacaattaatgctgaagattgcaatcaaatgtgaatgaaaaggcttaaaacctggagcacacaataatgtagcattgactcgtaatctattggctttaggatgcattattcagcacaagatgccatcttttgagggagtactcccaattattgaagatcattacctgatcttcctgcttatccctagtatttgataaaccaacaataagtagtataggtttgttgtcaatttgcgtaatgtgattatcatgagtccactgctaatccagtgcccacaataaatagatgaacatcggagtgctgccattaaagctattcaagcagctgagattgagagtatactttctcggttgcgtttggttgaatcctacatttccaaggagcaacaagagggatgtgccttgcaatattttcaggagaacttacccaacttatcagttgtccggaatgaggagcagaatgagcttgagttgaaacgggaagattgggacaaacgattaattggagaccactgtgatgacaagatttttcgggcttcagtctcttcgttaccaaatgttggttatgttcaattctcaggggattcaggttcgagcatgctctctacctattgatggttatacctttattggcatcaaataataaatgactgttttaaatgtttttgttaccttgtgtgatgtatgcagtgcggaaaagctttattgagagcatgccttttaattttaatgactttgtaagtgctttttgaatattgatatcagctatttcttctctagtcattactaatctcacccctctgttgcttccaaggcttggggtgagctacctgaggatcaactggcaggaattgcagatgctttacagacacccggggtagcattttacgctgtccatatttattgaaatgatatatgagtagcaaatgaatgaatcgattctgtgtttccttttaagcttacctttacatgttttaatatgatcttgagcaggctgtgagtactcggctctcttttggtatgacaccaaaaactttaaggttgcccaaaaagggcgagatgctcttatctgtgcgtggctcacctcttggagtgtacaaagaagaaaatctggcagctgttcatggtatttatcaccttttttttcttggctcttcacaagcatcccttactatggtcctgttaacagttggctaaccccccaaaaattgcagaatctacaaatggaagtgaagatgctgcctcatagtaccagttgccacatatagcatactaaggatgctatgtgatctatccactcttttcgtttagtcgtgtgccccatggttgatatgttttgtctattgcagggacttatcaacccttgacttaacctttgggatattggtgtttttctttttcttacctaagctgggatactcacccagaatcaagatgcaatcactagttcaggtgagttgcagtatctatttgttatccttgtgtagttggcagtccgcacgtgtgttgttggatgctgatttcattcaggtgaaatcgtgtattaagtaatgtgtcaatgtgtcaccgttgttaactttgctgccaaggaagtgggcaaaagcagtctaaatgcgcgtgtccgtgcactcgtgattgtcaatgctgtattagctcattaccagagatgagacaatgtgagctgttgtaaaaccgaattgaaattgtgaatcatcagatttaatattcaaattgcttgcaaataattggtaaatatggaattttagagtaggaatatgtaaaatttgtccaataccctcctggcttatctatgtgtttttcttactgttgacttttaataattcctttagcagctgtttttatataaaatgcaggatcttgtttttaagttttaccaattccttcctctgatttaccatcaacagaaagaagactacattaggatctatttttctgaggtctttggttatgattgaattttagggatagttatagttgctgtcttgcagagccaccaagtttgaaaacctgtctcacatgaattttggagtaacatggacgtgtactgcatactccactagtgaatgtgcaccaatggtttttccatgttagtactccctccatcccaaaattctagatttatttttttccaaaataagtgtaattctaccatgctacttattacatcaatcacatataatttgaatttatctccatcctacctttaaatatcctctcactccataccatctcttatttaataggggatgcttaggtaattttctctccctcttgtttttccctctcactataaaaaatgcacttatagggggatggagggagtagaaacttagtcacattttagtattcataaaaaaaagaatatatgtgtagaaacaaacacttgttggttgttgcattcaaatcctatattttgaactcaaatttgtagcaatagtcaaatttcacaaactgaaatctattatatactaaaagtttattaaacttcctacaaacactctcaagccgtgacggagctcgtggcccctcaccgggagaccgcgcaggcctccctttgccagttcggccgggggcttagggtgagatctcaagctctctctgtatctctctgtatgtggaaagatcacccgcccgcaagacacacgagacacggacgatgtatacaggttcgggccgctgcgaagcgtaataccgtactcctgtgtttttgtggatttgtgtatggacaagttacaaaggattaacttcctttcccctcagccttctcccagggaa

SEQ ID NO: 2497 - DNA, 7669 bp, Oryza sativa
cttgcagaaactccggattgaacgaggagtctgccatgggtgtggtcacttggattttctccatggaaattgctagccaagatgttttctgtatgtgtagttgttatgatgagaagggagtgatttatagccttgaacttgataaacacaaggtctttgctacctcaatccaagccaagaaaatgaatgcaatggtccactagctagcatgacatctgtcaccattaattttaccctgcaaccctccactaactggtatgccacctgtcattattaatttcaccatataacacaccactgactaatatgccacctgtcaatattcatttcaccatacaacccaccattagctggtccaatcagcacaaatgtcaccagtcctccactatatggtatgccacctatcaacattaatgccacgaaccctccactatatgatatgccacctgttatcattaatttcaccatataaccctccactagatgatatgacacatgtcatcattaatttcaccatgcaaccctccactaacttgtatgccacctgtcaccattaattgcaccatacaacccatcactggttgtatgccacctgtcatcattaatttcaccaaccctccactatatgatataccacctggcagcattaattttaccaaccctctaccttatggtatgccacctatcatcattaatttcaccaacctttagggatggcaatggggcgtgttgagggcaagttggaccagaacaccctagtagggttgtcaacgagccgagctcgagcgagcctgcttatctaggctcgagtttggaatagacttgaaccgagcctcatcatgtctcgatctttatgttaggctcgtattcggctcgttcgaactttgagcttttcacaagctcggagtattggcatagctatattataggcatgcgagcttgactgtttgaagtggtagtacttagtagcagcgagcttgactgcttgaagtagtagtactactagtactttccttgcaggctttatagcaagtacaatagcaggctataagctagctataaacatattttaaagagataaaggaagaaagagaagagcagcggactacagatctgtagctagctgcagcatggactccaagacgtaatgtgtatatgacagatgggaccatatattaatagtatagtaagcaattattgtatgaattggctattacattggctatagatgatttggagctagtagtagactatactattaaacttgctcttatgggaaagatgatgcaacaatgcactgcaccgatggagaattggagatgcaccctattactgacaagtctaccatgcaactttttgttggaaaatgtgctggatggttggcttcgtggagaaaactagctgttgtgaaaaattaaatgaagataggttcagacttgccgtgagcttgtaacgtgtggcaaagtaacaaggtgtgcttttttaattgtaagtgatcagttgggctcgtcgagccgttcgagctcgactcagtgaggttcgcgagcctcggtgtgagagctcgggcttggctcgtttgatgttctagtcgagcttgaaccgagtctaagacgaatcgagtttaagtagcttgcgagccttgagcttttctgacagcccaacgccccagtacctgacccccgacttcgtcacccggccccagccccgatctccaaattgggggatatttgcccccgtccctagcccttacgggtccccaccccctaccgggtcctcggtggagaagataacaagaagatgaagccaccacgaagctgccatgttagaggagcaccgggtgccgctgttatgatggagggagaggagatcgaagccagttgccggctagctggcaagctggaacgtacacaaggtagcggctaggtggactatcgagaagaggtggacgaaatataacagaagacctcaccagcggtgaactaggggtgcttccggtggcgaggcgagaagcgtcgattccactagcagcgccatatgcgagcagcagtgtcgggagtcaggatggaaaggggccatgtgagaaagcgagaagcggcgaatgtggcatcaggatggaatcacgagcgcatgacggtgtgtgctagtgggagcgaaagggattgagttaaagatatcgagggttacttgaggtgtactttccttgggcctagtgggctttatttgtaatgggctattaagtgtttatcttttgttttgtattttcgaggccccttaggtcacccgggggtaaaactacaaacacgccccaggcctcgctcaagatcagggccccgccctgactgccccacgggtagataatttgacccggccctatccacccctaccaaccctccactgtatgatataccaactgtcagcattaatttcaccaaacctccactttatggtctgccacttatcaccattaatttcaccaattcttcactatattatataccacctgccagcattattttcaccaacccttcacaatatgatataccatctgccaatactaatttcacctccactttatgatatacaactttcaaccattaatttcactaatcctccgttgtatgatatacaacctgtcagcattaatttcaccaaccctttactatattatacgccacctgtctccattaatttcataatgcaatcctccactatatgatataccacctgtcagcattaatttcaccaaccctccactttatggtatgccacttgtcatcattaatttcaccaaccctccattatatgatataccacttgctagcattaatttcaccaaccctccactttatggtatgccatttatcaccattcatttcaccaatcctccactgtatgatatacgatctgtctgcattaatttcaccaaccctccactatatggtacgccacctgtctacattaatttcataatgcaaccctccattagatgatatgccacctgtcactatgcaaccctctaccagctagtatgtcacatgtcaccaccatggaaccctccatatatggtatgccacctgtcacagttaattttcaccagccttcctctatatggtatgtcatctatgactattaatcattttggcaaaatttgctacatgacataaaaaaacgtgtaattagctaggagaccgtaagaacacgtatttgttttagggcatcacaaaaaaatagtaattagctcctggacacctccaacattattttattattttcggaggaataggagagagaaatagttgtgtaagtacggttctataagagagagaaatagctgctatgtaagtacggttctacccttcgaatttttttcattttctttattctttcttattcttttctctctttctctctctactatatcttcaagtgagcccgagggcagtggcggaggacgagaaaaaaataggcaaattttgctacaggacactgtgacttcgcggttttagctgtaggacaccgcacgaagtgacttttggggaagacaccttataaacgtggtaatttgcttccgcggcagcgctggccgtggcctgcttccggtggtggtagtgggttcaggacgacggcggccacgtggctaactggctatggtggcgcccttgtccctccagtccagggagtccggaagagcctcgacgccggcaatttaatcgagattcgctagatgtttctctctcgtggcaagaagatggagaatcaacagaactccaaaattaacagctcataggcttaccaatgaacaatctttcccaaatttaatgagcacaacgatgagaacagggtattagcagcctaattaaacagcaacagtgccacatgatacattcatcaggatccaccggaggcggcagggcgtcgacgacgaggccgcgcatgccggccttgagctcgttgtcgcagaacctgcggtactcggcggtgtcgccggccttcttgcacacctggaccatgacgagctcccgcgtgagctcgaacaccttggaggagatggcgagtgcgcccttatgcccgttccgcgtcgcctcgatgctcaccatgccggcgatctcctccagcttggcgatgatgtcggccaccagcgcgccggacatgaagtgcatcctctcgccgcgctcctcaaacagctcagacaggtcgaagctcagcgacgacgcgatgatgtcgaacgcgttcaggctcttgggccgccgcatgcgcggacgctgtcgtggcggtacgcctccccgacgtggcgtcctctgctggcgagcctggtgccgaggtaggtggcgcgaaactcgtcgttggtggcgcggaactcatcgtcccacaggtcgtacgtggcgcgcgcttctgcctccatccgcttcaccatccccagcccccgcacgccgtgctccgtgttgtacctgatgatcgacatgatgtccagcggcgccgccgctgcgggggagcgaaggcgacgaggaggaagcaggccacgaccagcaccgcggcggcggacttgctgccgccacctgcctgagagagaaaaacttgtgggtgagagagagaagagatgggagagctaacacgtggatccaggggtattttcgacatttcactcaatttctctctccccatttaccgaaaattattattttaatgggtgcggtgtccgctagcaaattaccacgtttatatggtgtcttctcccaaaagtatagatggccaaaaggcccaaggcccgacggcccggcccatggcacggtattttggcccggcccaagcacggcacggcccgacggaggtcgggcccgtgctggcccggcccgaccaccgggccgtgcctgagcccctccaccggcacgttgtgctggcccggcccggcaagatgggccgacagctaggcccgatacacaaaaaaaataggggactaaaaatagacatattatatgccatggacgaaagaaaagggacctaaaatagactttttttatctatacatatgtcagccaaagaggagggacagagaatagacttattttagctatacatatgtcagcccaaagaggagggaaggaaaatagacttattttagctatacatatgaaatagcccaaagaggagggatgaaaattagacttattttaaaaaaggcccgataggccacccatgccttcgggccggcacggcacggcccgacaactagtgggccgtgcctgggcgggaggtgcagcccatgagccggcatggcccggcacgaagtgcctattgggccgtgccggcccgatggctgctgggccgtgcccaaccgtgcctgggccgggccgtgccgggcgggccctttggccatctatacccaaaagtcacttcgtgcggtgtcctacagctaaaaccgcgaagtcacagtgtcctgtagcaaaatttgccaaaaaaaaaataaggtgtggcagcaaaaacaacataatactttgtaggtaatatggtatagatttgcaatgtgttcccatgcatatcgctaaaagttcttacaaaagttgttttgatgcaacaaatcatattgatctgtgttaggattcaaaattcccgaatgaaattttccaaattttggaaattttcaaagaaaacttttgaatatagcaaaatctatccaaatttgatcaaaatttgttcaaatttcaaattatttcagaaagatagatattgccaaacatatagattaaaccttgatctgggttacatcatgtaactagcttacagcccatgcttatacaaccagctaatcacaaggagtgaaaagaagatactaggttagttgcttcacgtaactaactacaataacatccaagtcagctaattacaatgaatcattgaatgttaatcatgcaagcatagtctccaccagtggctaatagaattgaggtatggcgagtgccatatctcgccataccggaagctccgccgctgcccgagtgacggagcgtggggctcctcaccgggagactgcgcaggcccccctttgccggttcggccgggggcgctaagtgagattcttcgccctcgatctaaggaacgtcagcgagagaggaagcgcacaagacacgggcgacgtagacaggttcgggccgctgagaagcgtaacaccctactcctgtgttctggtggatctgtgtgtgaaggaatacagagagctcgagagcgagagagaggtcaggctcttctctcccaaaaatcccaaatcccctctctcctaggcctgggcctcctttttatctggtcaggggtcaccacatgggcctctcgctgcctaagaaaggaaacatgctttttacaatgagggctagtctacagccggaagtgacctctgacaagcacagcacacgtcttctgctccgctcgtcagctctcccggtggacgcccgtttcaaccttcattcaatggccagcgactttcttgccatgcttgcgctgaagcctagaatggatctgaccgggactgacataccaactccaggagtcagcacgccagctccagctagagacgagagccaggaagctctcatcattccgacgggacggggcgaggcgtgcgacaggacgcctgttgccacctatcccgcgatctgaccggtctgtgaccggtcacataccgcgactagtcacggaccggataagcatgcgctgcgccgcattgaatgcggcgtggcgcgctcgtctaacccgctataaatgcggttaggtgagcgctgctgtgctcacctaacccacacacgtggcgccaacaccacagggggtcggggcgccccagccctcggggccgaaacgggagcggcccgacccctcggggagacagagggaggggtggccatgtcgccctcgggcccgacccccccgagggggtcaggccacgtgggtgaccgcggctacctaagcctctagtcacgatacccccggccccatgacaccgacagtagcccccggcgttacgccagggcgatcgcctccctcgagggaagcgcccgggcgtgacgccactccttaggcccggtgacaggtggggccggtccctacaggcgagcagaaacccagcggtcgcaaatcgcgcgcatcagcaagggaaaaccgaccaacaataatgagcggcctctttaagaccgctacattactcgagcagcgcgcgaatcgggacgagccggttcgtttcacctggaggcatgatgatggaacaatctaccccgggagggggtcgtgcttctgggccccgcgacgggggcccggggggcagccgccctgccgacgcccgggggaagaggaagcaagagggtacccctcctccatctcctccccgagggggcggggcggtgcgtgccagcagcaggcgcccggagggtgccgtgccgacgccgcagcccgagggggagcgaaagaagaaacggccccgcaagatgggggggattgtgccatgccgggggaacctcatctcacccccgaggtggtcgtttagccgacctccccgcaggttcgtccccgcgcccaccgcggccgtattcattctcccatctcccaaggcgagttttcactcacccgtttctttttgtcttttggtttttcttctgcctcagcgagatcccgtcgcgcccccccccct

SEQ ID NO: 2498 - DNA, 867 bp, Oryza sativa
gaaacattatttatcccaatagtgtgctaatgtttctaagcatggctaagcaattatgtctaacatctagctgaaccaatatataaagctcaactagtcaaattatcacccaaggtataaagaatagagtaaggaatgcaaagtgctgatgaatcccctaatgattttggtaaaaatcattaagttaaggtggatacacatcttgtcatatgatcaaatggtttcgcgaaaaatcaataatcagacaacaagatgtgcgaactcgatattttacacgactctctttaccaattctgccccgaattacacttaaaacgactcaacagcttaacgttggcttgccacgcattacttgactgtaaaactctcactcttaccgaacttggccgtaacctgccaaccaaagcgagaacaaaacataacatcaaacgaatcgaccgattgttaggtaatcgtcacctccacaaagagcgactcgctgtataccgttggcatgctagctttatctgttcgggcaatacgatgcccattgtacttgttgactggtctgatattcgtgagcaaaaacgacttatggtattgcgagcttcagtcgcactacacggtcgttctgttactctttatgagaaagcgttcccgctttcagagcaatgttcaaagaaagctcatgaccaatttctagccgaccttgcgagcattctaccgagtaacaccacaccgctcattgtcagtgatgctggctttaaagtgccatggtataaatccgttgagaagctgggttggtactggttaagtcgagtaagaggaaaagtacaatatgcagacctaggagcggaaaactggaaacctatcagcaacttacatgat

SEQ ID NO: 2499 - DNA, 1561 bp, Oryza sativa
aatgttgagaatataggcatataatgatttaatatattccataaataaatcatgacattacagatatataatagcattaacgtatcattagatctacacatgtaaactaagcagtaaaacatgaacagatcaaatatgcgcaacatgtcgaacacgtaccgaggtggcggaaagaccggttgctcggcaagaactacttgcggttgtgagcgtcgatgaaggcgcgcagcacgcgagtggagaggaaggtgaaccgtcgcggttgaacagggaacagtcgcacgaagcgcttcccaaaaaccttattgccgctttctcccagtgcaggacgtcgaaggcagagattccagagacctgctctcccgatcgccggtgcacgctggcgagcgggatggagtagtccacgagcgacgacgcaacacagaggaggaggcaaaccctagattgatttcgcgtgtgttgcgtgaaggcggtggcacggtttatatagagataggtcgcttgatcagggcgcccgcacgatctccactctgcgtaaccgagccggataagtcgcgcgtaacttatccggactccacgccgttttcacgcaccggatttttcggaatgttttcaacaacaaaacaaatccgaatttttctgcaaccaaacaaaactgcaaaaggaggctacttctgcgcaagggtgaggagccaatttttcggaccattcgacgcatacgtcgtgcacgcgcgccgcctgccctgccctgccaggccaggcaagcgcgcgtgtgtgttccccctcttttctccaccacacatgcttgaagtggctaggagggcatcctcccttttaagaaggtccccctctcctagaataagtaaggtggtactaaactccacatgcatgccatcccatgagatgggcttttgtgatttttcaaagaattaatcttcgaatgggccttagcccatctattaattccaacaatcccccaccaaatctcaaaatcccattgagattttccttttccaatgtactgtttatataccagcggttcgatggagaccgattaaggttgaacatccacctagaactccaagctacacttactcacaacttgaacaatggactacgccttgaattgcaagtcttgtgcaagcaagtttcactcagagtcttatctggtactagactgtttgtagactactcctcgggtggagcgtataagtcatactcctaggtctttcgtaagcttcctagaagattcacccaaaatcttcatagactgcgaccaacagtcaagcttacaaaggtaagttctttcaagaatgctctgtaggacatcatcttcgctaattaaagccaacagaactcattaaggcatagccaacctgccttgcagctcacgagagtacatacatcttcacttagaaagggtatagattggtactctcctctagtttactaatggtttgttcttcccaggttctaattcacgggatctccgatcacatagataagtttaccaccatagtataactcacatgggtctcaaacccatctccttcgatgcatt

SEQ ID NO: 2500 - DNA, 745 bp, Oryza sativa
ccaagttgcctctagttcaaatgcaaccttaagctgtggtggtcttcttgccagtgaatttcacagaaatttacttagaattatgaattgcttttcctgataaggacactgtttactatctcaaaatgactactatcacttgtctgataaggacactgtttacttgtcggatatttacaatgacacaggcatatttacttgtatgatctatcttctgacactcttccttttttcccctctaatttcagcaatctcctcagcacaggcccttctatggttttgggacaccaagtgactcttacggaagagtgttctctcatggtggatatttcccacaggccactaattatgggggccctttccctagctttggcctgaatggtacgagttctattccgatggaaaaaggccgcaggagaggaaggggcaatgctcttctttgcagctgcaatggttcacttgacttcctcaatgagcaaagccgaggcccacgtgccactaggcctaagaagcaaccagaggatggcggcaaggatgagaagccttctgcaggcgttgattgcgagttgtacaacaggcctgactttgttacagagtacaagaatgccagatttttcatcataaaatcatacagcgaagacaatgtgcacaagagcatcaaatatggtgtttgggctagcaccacaaaccggaacaagaaactagactcagcctaccgtgaagcaaaggagaaagaagagcattg

SEQ ID NO: 2501 - DNA, 1615 bp, Oryza sativa
gaagaagagagaagaaagaagatgccgcggagcttggtcgggaggaggtggcggtgggagaggtagacaccggtgcgcggatccatccaccccgccctcgggcacttccggagttgggcggcgacggggcgtcgaccgcgtctcccttctcgggccggtggtagggatccttgcggagccgggcgggcggaaggcggcggcgacggggttatcgtcgcggttgatgccaatggaggagccatccggtgtcgaagcagcgacgccaatgccctcctccttctcctgcctcccgagcctctccgaccctgagctcgcatacgcggcgatgccctcccttctctcccgctgccaccgccgacgtcggcggccgtcggtgcggtgccaccctcctctcccacctcaccccaccgactggcctacaggtagagaagactaagagaaaggaggaaccgaggaagggtgagaagaggggagatagagatgacctgacattctgacatgtggggcccacactgactcagccgccccgcctaacaaaacagaggtcaaaaccaccgaagaagtgaatagttttattagtgagggatgttgtatatagttttgtggttgggggacggttttatatcttgacgagggagggattgtactttttcctcggtagatccacacctccgaaggaatcgaggatgtcgtttccttccccacctcagcgcggttccaggcggaccgcgggtcccacgcctggccgccgcgggagctgagcggtgccacgtcagcgcgcgacgcgagctccaatccacatacaccttctcttccctccacacacacacgcccgcacactcctcgccgttcgcctcgcgctcccctcgtcgtcgtcgcgcaaatggcggcctcctcctcctcctcgtcgccggccgcggcctccgctcccttcgccgcgccggggccccaccgccgccccggactcgcgctgcgcccctcgccgccgacgccgccttcctcctccttgtcctgctgccgcgcttcccccgccgccgcggccgtctcgtccgtctccgccaccgccgccccgaatcgcgggcccagggttcgtgcggtttcggcttggccctctcgtttgtccgatcgtgtgcactgggcacgctcgcggctgttcccatctggggctaaccgccttgtggtttggcaggggatgggtcttcgttgccgggcatcggagggagcggcggcggcggcgcggaaggaggccccgctcaaggtgatgatctcgggtgcacccgcgtctgggaagggaacgcaatgccgcatgatcgtcgagaaggtataatagaaaaaaaaaacaatcgacactttttcttaatgccatttcccagatattcacattgaccatttcttgtagagagtatggaaatatgggtttgttgaatcaaggctcttgaaaattttctagatttggtttccatttgaattacatgtatccatgtaggtctttgctcaatgttatgcatgtatgtgaaagtacaaacgtttcatatatgtttaggctacttcttctggattctttgtaaaatcattatattcagtgtgcaacatgcattctattcaagcgacttct

SEQ ID NO: 2502 - DNA, 548 bp, Oryza sativa
cttcatcagactccgaaccaccttcgttgacatcactgccttcctcgtcactatcaccatcatcattgccatctctcccctcataatctgattccgattcctcatcagagtcacccacccccgactctggcgatgagatgtcctccgtgtagatccgaattcccccaatggacaaaaatccctcgttgcgcttgcccttaggcttctccttcggcttcctcggcgtcactaaggtggcctcctccaactccacctcttcgttgctgcaaccccggaatcccaatccgagatgcagcccagcctcaccagcctcctcctcctcatcctcctcctcgccgtgaaaccccagcccgatcccgccaaccgggccgtacgagtacaccgggacggaggcggaggccgggtcggcgcagggggcggtgtcgatggtgacatccagcacctgagtcgccccctcgaaggaggcggaggggcggagcgcggcgtatctgaaggggacggcgtgggaggacgagtcggacgcggagttcgacgacccgcctccgccg

SEQ ID NO: 2503 - DNA, 2088 bp, Oryza sativa
ttttatttttttaacaatcttgtgatgatctgccgtcatacaggtgaggatcttctctgcagcaaatgtccgtcaggagcttcaggaatctttgagagactatgtccaagcgtctgttggtataagcgaccgagggaaactgctaatcccaaagttactgcagagctatgccaaggggaatgtcgaagattctttgctcgctgactggatctgccatcaccttacacctgatcaagttgcagtcatccgagattcttcttcacagcggaagcagcggcttcttggagcacgcagttttactgttgttgcattcgactcaaaattccgctatctgttcttgcctgacagcagtggctcccagaagccagaacccaaacggacttcgtgagctgtgttcagaaaacacatgctatgagcgagtatgtttggtcctagaaccatttcttgcatactggacaatggagtagctagttgtatatgatgtaaatttttggaggaagagtatatgatgcaacaaagatgagaagctggagggtgatacaaagagctccagtaaggatacaggatagttcatatgtatgatcagattatctcagctgaattggcgatgaaggttcatctggatctcattttgttctgttactgtctttccataatgaagataaccttttgtaatttttgttttcgacatacctttttttgggggtatagttcttgatcttggtcaattgatttgtaagttgtgctctaaataatgtatagtgcttttacctctttataataatgtgagttactttgtcactgtctggctgttactgctggaataagtaaccgttctatgagatgcaacctttgtcagatagataaagtttatgccttttttattcgaaatgcttggaatttacaaggaaaagaaatggaatcgttttgaatacaaacaatgttggcaataatcactttttttttttgggagcaaaaaccataacccttattatcatcatacattggagattttgccccctttttgtaaggtaatagctcaaactgctcgtcttagggctagtttgtgtatgcagtgctatattgttacaatgatatttaagaacttgttttttttttttcaaaacctatccttctgaactccattataacttctgcaaagataaaaaaaccaaaaatattaaactaaaatcttgaaatattaaacgttatattttatcaaaggtagccttcaaaatcaacaaaatttatgttatccctttcaagcaactcacctcaattacatgtggggccaaacccacttatttttccagcttgtctttttttagaaaaaaacatttcaaaaaatcctttagacggggcttttaactatttgccactcttacggatgttgcttaacgatttgccactagggcccacatgtcatagacacatgagggctcgcatgtcattgacagggtgtggcgaatcgttaattgccatgtcacaagagtgcaaatagttaaattacattgggccaataagtgggccgggctgcccaagaggcttgggccatctcctctctctcctctcctccttcacgccgcgagatgaatcccccggcgactccactccagcgccggcgaatgccgccgcccgccggcagcggcggcggcggtggcagagccgtttgattcccccagaagtttgtgcgggggaggcggcatccagctctccactcccagggtcagttgattcatccgcgctttttttttccttctgctcgttgctcttcacaccacagtgatctgctgagccgggaggggtaggagtagtagatcggctgttgctcgggacccgtggagtgggatggattgcgttgagctcatgccaaattgagacatgaacatccttgtgattttgcttttttcagaaacatttttactagtctcaggttccttatatatttttggggtaattttggtgcccatatcagttcacgtggtattattagttttccttgccacttccatcgtaataatcggatcagtaatatgattcacatatttggttatattgtaatcatgtattggtctgtcacttattatg

SEQ ID NO: 2504 - DNA, 13891 bp, Oryza sativa
gaagggatttccgagctgactaggatgagtgacaggacagtcatttatagaataagtacgctgcaggacagaaaggtgtgtatcagtcatgttggaaataaaaaacatagtattacagtaggaaatataaatgggaactgtgcaggatatatccttgccatattcatgagaaacaaaaaatacaaaaaaaaagaaggctaaattcatatgaatcaagtagaagaatgcaacatcaagtatttaaatccacaaaatgtaaaacagctccgttagttagcgaaaaagcccatgtatcagcacttccagatgcaaaagaaaatgtcagatttcagtattaactaacaaacaacattcatctttacattgcaaaagtaaaggtcaaaaagaaaagctctcatagcaacactcatcttgataaaattaatcttacaaattcaaattttgcattgcgattgaatagcacagatcatgcatcataggtaaatctaattgaatgatatcaaatataaaacttgacctgacgggggagggagggtaagaccttctcacgcatgtcaagaaaaccccctaaccccccttacacagcggcacaggcaggtcaagaaaacccccgaacccttgccccacccttacacagcagcaccgtaacccgtgaaaataggctggtccttagacctatgctttggcgtgggacaaacgaggggattttttttcaaccccagcctgaaattcgctcccacaaggagtcgaacccaggacctgaggagtgctactagagccacctaaccaactcagctagaggtccattcgcaaatgatatcaaatataaatgatagagaaaaggagggtttctagatctcatcatcaagagtagttacatcaatcatatgctcccttatcagacggtactgtctctaatggatcacaatgaccaagttgtcgcttctgcatgcatctctttctgcaagcattgctggtaaaaagcatcagagaaggagaacttacaatctcatcctcagtggataggctaagcttgatgctcttgatggcaccttcagcaaccggaattgctgactggtcctcctccatctatctgaaatagacaaagggacatggctgtgtccgtaaaaagaattgaaaagaaagaaccggtaataccaacaagctagaacccaccattagctccaattaaacaacaagaaatagcagaaacaaacagaaaacagcaacctcaaattcgcaaacgtaggataaaaaccgctgtaattatttgttggcttctcggaaaataccactccaaatcaaacttgcttttgattttaatcatttgtttccttttcctaatgggtgcactaacaaatatattcccttagagagtgtgcccttgtctccaagcaagttaattagggcaaagtggctaagctaatattaggttactcctaccgctgaagctgcatttccttctgtttcatcttagctctagcatcctactacgacccaccaaaagtacacccaacaacaggggaagatccaaaagtacaaacaaactgttacttgtatcaaggttaaggctctgaaattaagagaaagagcttcttccagatctagaagagaagctagggttaacgaacgaacgcgagcaaattccacacaaaagcactccaggtggtagagtgagagatgaatcatcagaaagaggatgcggatgctcaccaggatcccctcccctcccctaactaaaaaaacatttcgcacaatcatcaggattcgtttagattcccagcacaccacaaacttccccccaaacccacacggattactccggtgaacatttatcatacatgagatagaaccccttagttgggaaacaaaaaggcatatcaaagtgcaccaaaattgaataacccacgcctctccgcacgacccaaatcttcccttccctcggggaaacccaaaccccccacaacaagcgacgatgaacagacaaacaaccaaccacatcccctttccccccatttctgcgagtaacccagcgccccccacattgcggagacgggatcagagccctcctccccctcacctgaacacccgcgcgcgcgcgcgcgcctgcctgcctcctcccaccctcgccctaaaaccctagccaccgcgcggggggtgggggcggagagggttttagcctgcagccaagccctcgcctcggagaagccgagaagggaacccacacgagcgcgagtgcgagtgcgagagcgaggcgacgatggtggtggtgggaggtcaggtctcaggtgcagttcagtgtgcaggtcaggctaggtcacccccgcgcgccggcggctgttcgacgccacgtcactgacatgtgggccataggctggtcgtggcgtaggtgggacccacctcgcagtgagtgtgggggtcaccgggggtcacgtgttgggagctgggaggagagagatggggggattgaccggaaggcattgaatgggatgacgtgtagcaccaactgttgggtgaagccagctgatttttggccattctttgatttgggtggtttttggcagtaaccaatgtcataaatgggcaaattatcaagcgccaaaaatgaacacaggcctttacacaatgccaaaagaaaaggtgacacgcaaaaggagtagcaagcagtatatcatttttgcatggaaaaaatacagagagctagaatgaacgaacgaactcaccaacgtggctgatagaaatacgatgtcgttgatggctagaccaagcaggatgatgttgagtagtcatgagaagcatgtgaccatagtaaatagaagggactcaaaaactgagccaattcgatgaaatagaagtcaaccaatgtatctgcatcaatactcaactagcattaccaagataaatttggacgctaaaaaatgttgagacgagcttgcccgaacaagctttattgtgcactaggctatgctttctcgtgatctctcacttatcaacaatacacaccatgagggcttgacgatgattatcattgaccatgaggatgagttgtgtcatcacctcttcgtcgtaactcaaaaagacgataagccaaccacctctttgtccaagattagggcatctctagtgttgcattgattagttcagtccatgcaaacgaacaaaacttatgtttgatctctgcagcgtataaatcgttttgtgggacccagtgggactcacacacgtgcacagtctcggccttacccacgtcttcctctttctcacgtagcccgatgaaaattgtctgtattcacttgtgtttgacacctatctaaaagacgattttctcgctgacatgcacgattcggctctcgtagtgtgctctgctcgatatttcaatgtaaggtttgatttaatcacatgatgttggagtaaatgggctaggcccaatttattcccaataaattccattggctcacaaataatgttatagaattaataccaccttgaaaatttaagtggagatatctcaacttaaatagagagctattagagagcacatgttgaccggttgaggtgatggtgggattgccatatgcgcacgcgtcacgccgagccgggcacaggtgaggcatcacctgcctgcacgggtgctcgggacgagcaggcctccgaaactccatccacttgtgtatctgcacgagtaggcaggtgatcaagttttgggggagcatcctccggcacgactactttgcatcaactacgtcttctgctacactgcatccactatatcctctgctacgtctacttcctcttcgtcgcgtgcgtcgactacatcctctgctacgtctacttcctcttcatcgcgtcgactacatcctctgctacgtctacttcctcttcgtcgcgatgtcttccactagcaccagcgttgctggagacgaagagaatgcccgcgcaccaggaggaggagggaacggtggtacaggagagagcatcaacggaggcaatactaatgcctgatcatccagtggatcattctatgggtatatatctactctgatattggtgttaaacatgttgctaaatgtttttatacctgttaacatattcatattcatgtttatcactatgctaggatcgctgtatcttgttttttttggattaaagtatgccgatttattaccaaatttccaacaaatgatgtgcaaaattatgcacaaagatgaaaatgtcacctccattatccaccaaaactcaaatgcatcatcgccactacctttacgcctcttagctaggcgacaagccaatcacccctctatccaagctcaggaggatgatgagcaagaagaagatgcgaagctatatagagaagtgagaatgtcaccagaaggctccaatgtgtcatcacctctacctccacgcctcttatctagacaacgaaggagagcacggacaaaggtgaaaagtagatgggagcgtctcaccattgctacacaacaaacaaggccataagaaaggtaggtggtaagggagagcgctgccaccacttggtttgaccaagggaacctagaaccatcgaagggttctcttatataccaacgattggtttggtttgggcttctcggataacgactctttaacgacccaaaaggccagctagtaatttttgtcccttttttaaaaaagaatttgtggtaaaagcccaaatactccaacaaactatatgcatactacgttttgtgcctcgtgcaactgattcatggagacaatgataggttgaacccacatagcagtggcaggtaggtgggtaggtcgttaatgatgttgttttcactctcatcatctcatggtaggaggaaagtacgattgtccgaatttttattaacagcttgaggttttgatacagttggaatatcttgcgatatttatgacttattttccatatcatctcttagtgcaagaacatagaaatatagtgttacgcttccaagcgacccaaacatatataaaccacttgtctactcactcctatgcacaactcaagcacgagctcggaacatgcatgaaccctagctgaactctcaagggaggccatcttgccttcccactagaggagtaccttgctccaacatgactaaagattgaatgagtttatgactatacatctcatagtcataggttgggaccgagggaacgtggactaaaaagccaacgtttatgaggtgaatttcacttgtgtattatgcataaagtagaaaatcagaaagaaaaatcacgagtgagagaaaggggtggcatcacctaatgtaatcccttcatttttaaatacacgacgttgttaacttttagacattacatttgaccatttatcctattaaaaatttagtgcaaataaaaatttaagtcatgcttaaattactctaaaaaatatgtcacaacaaaacaaatgatacatatattgttttagtaggatgaatgattaggcatcatgtccaaaagtcaacattatcatatccaacagtatgttaacgatttttcatgcaaacaaatgtgaaatgtcactgttgtatgcaacatatagttatgcagtattgagcccgcaatagttctattgaaatttccaaacacttctcgcaacatatccaatcaacaatctcaacaaaaaattcacatttttaaacacctggtccattgtcactcatttgcctcatcaaggcccttcaaatatcatgtagctattgtcattggcctttgatacaccagtctcagctttctacatgccattaccatttctttccagaaggctgctacactccattaccatttctcaggcacaattctcacttgacacatttccagaaaaggagtttcagataaggatgcaaatgggccagtggccagccacggatcgacccgcttaaatgatttataagtgggtttacgggtcagcccacttgcatttcggatcgtcgctaaagtgtcctatgaaacaaaccaactattggggagcgagcccattgtcatagtcactgcccctccttgttccattctgcaggttcctctcaaactccctcaggtaatcaagaagcaaaacgatcacgaacaggatgaatccaccggcagagttgctgccgcctccacctccacctcctcctcctccaccgaaccggaatggcgggaagccggtgcctccatcgtcaagctttggactcctcactttctctgaaagcataaggtcatcgaattaagaagtgagaatcccctaaaaaaatgtaagaagtgagaaactgtgagcaaatgcagtgaaaacatagctgttatgtacaatgagattcagttcttggaggaggaaaggactgttatgtacaacgagattcagttcttggaggaagaaaggacgaacatcatggattttgcatttttgctgatgctttgcattacctttaactgaccctgatggcggtgaggtaggtccagagaaagatttgcgtcgtgcagtctgtgtctggtttgcgcaacatgttattctctgcagaaaaaaaaaagcaaattcagaaacagttagtgttaggtggtttcagaccttttgctggttagaacttcgtgtctgcacttctaaatttagaagcatcatgctgcacagcaacttaacatttgaaagttattacaaaccatagctacttaaactcatgctgtggctttcttaaaaacagcacgatagtcgcctaataaaacttaaactcatgctttgtgaagtgatgagtataatcagaattcaagctagcaccagattgaacatgaaaagattaaataattagcagtttggaatttgttttcgcttcacctatcttaggtctcaattctttttctctagctaaagcctgaagctctgaaagtctagttaaaattccctatttttgcaggagtgatttactttttgagactaatgattactccaatatgaatagttgaagaatatatgttccgtgaaatggaccaaagtgtcacacataaataacatttttttaatattaaaagtacagctgggagaaagcactctttcacaacatcacaattttatatgagatatacatctcttgtgttacaaaaatccaatacttttaaatctgtgattttttttagaatatgcaaggagcgcttctttatatataaatctgtgaaatgtccgacctattctaatttcatgaactagttcaagttcaaaactttggatttgcactgaagcctgaagacatgaactttctcagctatcagatttgctgatgcagtcatacctgataaatgtatttctgagaattagtatattataaccaataaattgatctatgaagcttttgaccgtgtaaaactaaaacacaagtatgacgagcaggcatgtcatagcaaaaccaagaaatattctacttaaccacagaacagacaggcaggcacgtcctcaccatggatgcttcgcatgaagaaactgctctggcagaaacgctgagtttagtcttgagagatcgtgaagacgagatagattgtccttcctggctttgtcctacattgaataacaataagtttatgctcatactaaagcatcatcacctaatattaaattacattctgaaatagtactcatctctctttttccttacagcactttatgcgattgacaatatatcagtagcaattcttcttttttttccctttaaaaattcactcttttttagaaaaaaaaaagttcttgcgagacgagtgcagacagcatttcttgggtaagacaaattaagggagaccgattatattaccaacctccacgatttctcccaatcccctggtacacagcgggggtcaacagaagaagcgaacctggcgatgacattgtggcaagtggaggcatgatatgcagcagctgtgtagacaaaaaccactcctcaaaaaccactcctttctttctgagctgagctgtagatacaaccaggcactagcctgagcaagaaaactgcagaaagaaatgggagaagttcagaacgagattgcaggtgcagtacagaagaattggtgcaagaaaatcatgttgcaggagaggaggagattacctggattttttagcttgcagaagtgtgtaatttgcaaatccgcaggagagaagaagatgagagaagagatagatttgggtgggaaattggggttttggatgagagaagagtgcagagtggcagtgacatgcggctgggacgtttggcaacgaatgttatccgtatagactctggggtcaggtcgcggagtcgtcgctgatccgcatcgtccaaaataaatccaagggtcaagaacaaagcagagggccagcgaagcgaagagcaagatagctcggcaagacatctaagatgctacttcgatgatcctcctgagaacgatgtcgatgatcctcttttgaattacagtaaagtgtatgggttgtacttacaacttgtagagatgtgtcatttatatttctaaactcttaaaatacatatccaaatcgcagaacttgtcatagtgtgtcatctaggtctcaaatcaccacagccccttcaaaatcctacgtggtgctgatgtggcatgccacacgaacatttaaaaattttcactttctttttttttctctttttcttctccttcttttatttttttcctttcttctcctttcttcgtgacccgagcaaaagaaagggaaaaaagaagaatgagaagaaaacaaaaaaaaaagaaaagaagaaaaaaaagaaaaggacacgtcacgtccacgtggcatgccacatcagcgtcacgcaggatactagaggggctatgtcaatttgggacctagatgatataatttgacaagttttagaacctgaatctgcattttaagagtttgaagacctagatgatacaaccctataagtttaaaaaccgccaacgcaccttactctgagaattatgtgctacgcgtggctcgtgcacttccctgttagcatgagccaattattctagtacagataatttatactcattcatgttgtttttttaatatattacacaactataagttcgaccattgttcttattcaaaatattagtgtagatattaaaaacataaaatatagtatttaaagtacacaattaaattacaacaacataaaaaataattacataatttttcaaataaaataacttatgtccaaaagtcaaacgaacaaagagagtattttttttacataaaattaatgtaataaattcatttcaaaatgttttttaaactcatcgtaaaattaaagctctcaaaagttagtcataaatatacacaatagtgtaatgtttaggacttaaatccggtgaacaagttataccaaaagaaaattaatcagctgagcgctcactgacttcagcttataattatgcttttgattacatgaacgaagcttttttttttatggagagagtatatcaatttcatttttattttcaaatacactaatacaacctatatatttttcaaatatataaatttctctttttaaaatctgctctgtccatttcgtattataagtcgctttgattttttttactattcgaacttctttagattcaactaagtttatagaaaaaactacccaatatctacaacatcaaattaatttcattgaacgtaatattgaatatattttgataataagtttgttttgcgttgaaaaatttcattattttcttataagtttgactaaacctgaagacttaaacttgtttttggagaaaaaaaatcaaaatgagttataatataaaaaataaaactgtttattacaacaaaaatagaaactaagggtgtgtttatttcacgacaaaattaaaaatttggttgaaattgcaatgatgtgaaggaaaagttagaagtttatgtgtgtaggaagttttgatgtgatggaaaagttggaagtttgaaaaaaaagtttggaactaagaccctatttacatgggactaaaacttttaagtccctatcacatcagatgtttggacgctaattataaatattaaatgtagactattaataaacccatccataatcttggaataattcacgagacgaatctatttagcctaattaatccataattagcctatatgatgctacagtaaatattctctaattatggattaattaggcttgaaaaatttgtctcgtaaattagcttttatttatgtaattagttttgtaagtagtttatactatttaacactctaaattagtgtctaaaaatagataacaaagttaagtcctgatccaaacaccggcctaatgatgaaagtaggtgtacagttacgtagggtaggaacatcatatttgctactgctattgctacccctgtggaacggccgccgtcgtcaccgctccacccacagtcgtcacctcacttcaacgctcgtcgtcctcctccactcctccacctccaacctcctcgcacgccctccctccctccataaacataaaagccctcgcgcacccacacgcccttgtcgtttccattccacccttccaattcaacgcccctacaatggtggcgcccatcgacccacctcgaattcgtagcgcgaatcctcgtctcccaatgagcatttaatcggtcccgttccgttcgccgaggctgcagtgagctgaatcttttgcattcttgccttcttggcttcttgctgctggagaagaaggagaagagcgcgcgctccccatgccgtgcgcgcgcgccgaggacgcgctgccctccgccgccatcgccgccctcgagatgccatcctccgccgccgccgccgcagcagcgtgagtgtgattgttcttgaatctttctttctttccttttttttttgttttgttctcgtgttgatttggtttccatcttgttgctccctctgaatcttgctgaatgctgggagtgatggtttcagaggcggtctgatccagaaggtgggcggcggccggagatcgggcgggtcggggcgggcgttgcatcggtcggcgcatctgtcggcggaggacgacggccacgcgccgccgccggcgagctgcagcaaggttcggttcctgtgggcttctggttgactcgtttctatctccacagcccctgcccagcatccagacatcccagaaattcacattctttgttcggattcggggacaccacggtttgggaacactcggattactggcacagaaaagcgagatttcaacggcaaatgcccccgcaaaagcggtgtccttttgcgaaatgccgtggtgcgcagggcgctgtcggcttcggctggccgtgcctgcaaaaattgtttttcattgggtcccccccaaaccaaggatgaactgtcccctaccccatttgtctccactttccattaatcgccgcagactgtgtggtcaaccaacaatcttgttgtttattgcttcctgggtttatttctgccaatcgaagtaatgtcacagcaatcgtcgttttcattgttgtttttgtaggatgataagatcggtggtggtgggaagagagaagggagccagaggagcaggatgaggaagtacaggtcgcagctcgagcaggaagtaagaacttgctgattctctttattttgtggccttcttctacagactacaggcagatgatgttagtgtgtaaatgtgatgttctttatactatcgaaaattgtgcaggtcaagaaattacagaggcagctcgaagaagagattgatttgcatgttgcgctggcagacgctgttatgcaaaatgctggacctgtactgaactcctctgtgaagattccatacaaggtgaagagctactagctagttttcttgtctttatggaatgccatttctgagccaattcagtaatttttgttttgaccttttcattctccaggcacaagaattactaactaacattgcctccttggaaagtgccgtatcgaagcttgaaaaggacttaaatgaactatattaccagctttgtcatgaaaggaatgaaaggttacttgccgaaagtaaaccagggtgcttgccatctacatccccagatcactcattgtcaacttgcacgtgcacatgggaagaagtaagtttttttttttttttaagtaaatatatctgtcttctttctgatgttggagttattgataccttcttgttatctttcttagcacatatcatcattgagagatttaaagtttggaggatctgagtcaatgaggtcaacacaacaagatttatactctgaacttgaatatgaacaagatgttggagaagatcctgaggagagacaaatggtttctctaaatagactatttgaaaaacaccgggatgtttctttaaatagacttctggaaaaacaccgggatgaagaggtccttctcatgcctatttgtatagttttggaagatagttaattgtgctagacatattcgtgcaaggtttgatttatctctctgcagatgcaagaatcttgctctactgataaagaaggcgaagaagatgagaagattgatactctatcatttgaacaatccatactaaagataactagcatgaaattagggaatctttggaacaatcctaaccagctctcagaggagatggttcgttgcatgagaaacattttcctccgtctatctgaatcctcgaagatgttaccaaaggaatcttctgattgttcatcttcctcagcagaacgtctttctggttctacactggcatccttctcagattcatccatcattccctcaatgctacgaagtccttcagttgactcgaatcgcaatgatgagatgacaactgaagccagcaactttgatccatataaagttaatgggaaggaaagccgaagagatattggaaattatcattcagcagctgaagtatcttggatgtctgttggaaaggagcaacttgaatatgcatctgaagctctaaaaaaattcaggtttgatgctgcaacctaggctaaaactgcctgtcctaatgtcaaacatactgcatgttatgaggttcatatgaagcatgtttttttttgaaacactcgttcatatgtatgatactatcagcatactatgcacatttctaatctcattttactgttgatgcctaagtgaatttacaaacaattgaactgttatgaggtttgtaccgagggaagaatgagatgcttcttgtaatcttttattttcaggaaacacaaaccgtattatattttatattttggaaccccacaacttgttgtcatttttagccctgaaaggaatccctggcagtgtgtaatttatccatatttgaatgtgttaacgagcactcttttccatgccactttgacttatctttgatgtatgataaaactttcaaccccaatgtcttgctgatgagcaaacaaatgttaacacatactcactacatctcataataaatgttttctttgcgacgctttccaagttttttggtctattttctgtcaattacggtgttcctcattgaagaccatctttaattcttactaatacttatgttgaatgtaagtgtaacaaataaccatgcctttgtatttacagatttcttgtggaacagctatcaaaggttaaccctaatagtatgaactgtgatgagcggctagccttttggattaatttgtacaatgcactgattatgcatgtaagtatgttaccaaagagactggctttgcaaacaagtcctgcactgatgatttatgcatatttctgttcctcatatttcattttgcttttactacgtatttctttctcactagactaatactatatactaaattttctgtactgtttctatcaggcatatctagcatatggagttccacgaaatgatatcaagcttttttccctaatgcaaaaggt

SEQ ID NO: 2505 - DNA, 2410 bp, Oryza sativa
ttcctgcaccccccctcgggatctgttgacataagggaaatcagatttgatgaaatagatgatgaatatatagttacaggagcaatgcccggcattgcagcatccaggaggatcgccagtcattacaggtgtgtgcatataattttatttttcttgctttctgttgctattaagaggttatattgccaaaaggacatacacttcagctctcaaaagacttgaccgtagccgaaagctgatatgaacgcatgaatacgcatgtcgacaccaaatgataagatgcgaaaataggcagagttttgtttgacattcttccttgagaaaaagtttattttctcactaggaaaataggcatagggcatgagacaatcactaggaaaactctattttcaactcttgagagaagtcttgagtgtgtactttgaaaagccagcacaattaacacaactcttgtttgagctcgacactttctgatgcgccttctactattattgatctttgcagggatcctagatatggacgcagacgttcatactactaggatgaaccagccagctgaaatgtaatgcagtgcagccacaaccagaatattgtgcctctacccgcctctttttcttgttctctcaaaaatctggaagatgctatcccagcccaaatttggtgtgcatataagatagcagcaaacccttcattgttgttcatttacagcaggtttcaacatcttaggttcctatgtaaatatgtaaccactaccctatagcaatgttgatccaaggtttctctccgggaatccattttatcttaaaaatgtttctctggaaatacaccaaacttttacaggaaaagctcacaaatttgccaagtcaatttgttctctctgctatctctctaacacgataattgtcggaaaattcagaattttgctgatgtttcacatggtgacacaagtgtgttggattgtgagaagcatacgcatgacaggaacagcctgattgacgctttgcttctgatgctggttttgtagagaagatttcgtgttggagtgtgctgagatttgtaaatgattttgattagttaaaatgttgcttgttgcttaggctgttcttctcgcgaatggcagaaagcattcgtgctaaatcatctaaccgttgttttgctgggttttcagagctttttcgtgcaggataagaactgctaatgttgtcagaatgctggttgcttctttggcttatctacttgattctggttgacttccattagggttgcgtcaatggctttaagatgcctgccttgttcaggatgtgcatcttaatctttatttagttcttaccgtctttgtcaatcataggtaaggaaaattaagacccaaaaacatgtgaacatatgttgacatttcaggatatcagcaaaatctccataaacattggcatattaatgtttaattgctgcaaaagacagatgtttgtatggaagcaaaatctccatgttttccaatgatcaatccaggtgctttcagctacaatcaaagttacaaaagtataaccgtgtggtctatgtgaacagacattgtcatcacaatgtttaaagattaaacatacaacacatgtgagagaggagagagaaagaggggggggggggtgatttctgcagatatggtgtcctttggtaattgacactaaatgtattgccagagaaaaaaaaatggtgtacaactaatcgaacagttttgcatgttcaacaaaagatcgaacaatttatcagaaatattggatcagtacagcatcatcactatcattttggcctttgaagagcatgcttgttgcattgcatcagagcttccaactatacaattccagatccttttggttgagtgtaggaaacatctgatgagaacaaacagataattattaggttatgggtgataattattatctattattttgtagtaggccaaacaaatagcgacgcagagaagcggtgagtaaccagataagtggatctactacttgagactagtcatcatctctttccaaccaaacacaaactacccttccaaggagaataactcactttgcttgcacatttcaattgtgtttctgtgtggcttcaacggtgaaaatgtccaggcttcggtcaaatgaaaacaatagcttctctctgtatacatcatcacttcaatgaagctggaagcctgctggggacttgacttccatcctcagactaaagagcttaccagagaaagctcatgcagttcagttagtgtccactcctctccagtttgtcctccaagaactatcgcctttgtacctcccacaacacaggtactgtggccccaggcaaatcgcggagggcggccaggaacattcagtatcctccaggtaggcttctcttcagtcggatccagcaggta

SEQ ID NO: 2506 - DNA, 6089 bp, Oryza sativa
tggcaattcctccaaagaacacaccaaatgtaactgcaagaatggctttcttgatgtgtcgttttttggagatgtatgatgtttgagctgaactgcaatggtttgcaagcataggaccacataattttggattgccatcaaagatagaacttgggaatgtgctaagctgacctacagttggaactggtccttctaggtcattgttagaaacattaaatgctgaaaggaagtgcaatttgttcagtgcttcagggattgtaccagtgagattattgtttgacaagtcaagcatctgaagatttgtgagattgcagattgattctggtatctgtccagacaatttattggagctcaaattgagtaaaagaagtgccttcaactgaccaatctccttagggattgcgccagcgaagttattgatgcctagattgagcactttggggaaagcactgtttattcggtactgaagtgattgggctgtaaaaattggcagctcaaagacttttggtgcaacattgtctgtttttagcattggcatctccattaatgctgttggaatttctcctgaaaggctgttgttcgttatgtctagatagaagaggaagtttaggctgctgatccagataggtatttgtccagttagttggttgtcatgtaaaaataacatctccaaatttgtgagctttgataaccaatgaggtattttcccagacaatgaacaaccatacagggaaagaacctgaagattctcaaaaccatcaatgctatcatctaaaggtatggtttcgtgcatgaagttgatcgcgattatcaaggttgtgaggtttttggagctctgaagcatctgaagtgtactggttatatttgcaagagagttcttaacaagtgacaggaatgataaggacttcagattacctattttctctgacagctgcccacgaaagttgttgaaagataatcgtaatgcagttagattgctacatgagtaaatgctttctgggatcgtcccattgaatttattccacacgacatctaaagtttttagattgggtagtgtggagaagttaaccttggtgagctccccactgaagttgttcttttttaggtcaatggttacaaggtttgtgcagtcactcaacgttgatggcagctcccctgacatgttgttgttgtccagatggaactcctccagtctcttgagctgtcctatggaatgtgggatgctgccaatgaacttatttcctccaagatcaagggtgaccaaatttatgagcttggtgatgccgtcaattgatccttctaactgattgttaggaaaagagaggtgcttcaaagaggtaatatcaaagatctcatatggaatagccccagtgagattgtttttgccagagctgagcaatgtcagtgtggaacaattactgagccctggagggatgcccccactgaattggttataactaatatcaagcaaggcaaatgatggtgcactggcacagaacgaagttggtatcttcccagtaaagctgttattgctggcgttgagcgctacgagactcttcatcacctcccatgttgttgatggaaaatttcctgtaaacaagttgcttgatatgtttagtacctgcagaggccggtcatgggtcgaagatggcagatcgcttaagtctcctgtcaggtagttaaaactgacatcaaggatcatgatgctgctggatgacaccaattccagtggtaagccaccagacagtgagttgtgggacaagttgaggcgcatcaagcctatcaggttgccaagggaaggtgagatgatcccctcaagccctctagtagccagaaacacctcattgactgtcctatttgggttgcaggtgatcccttcccatacacagcagtccgtgccattcttccatgacatgcccaggccaccatcctttgaaagccaagcgagaaactggatcagggagttgctctctttctcggtgcaagaactggtgggagaggccaagaagagcagcagcgcaagagcaagaccaaaggaagttatggggaatctgttgctgtagttcttgttcgagaactggaggggttgcatggttttctccataacctagcatcagagccaatagtttgaagaagaatgatcatgatatgaagggaacaagcagctgctgcctcttctttgttttatcttctcaggtcaaaatcaccacatttatgagtcaggactaagctgctattggttagatgtgacatcactttccaaattcactgttcacaccagcaagctgctatagtctactggtaagtctgacttccattcactaatggtttggtaatacttataacagacatccatgattcggccattattgaacttttgtagcgtgcgttaatttactcgatatgacaattatacaagtttcattatgtttaacttttgctattggcataaacatttaagactaacaaagatgaatagaaaaaaaaatccctttttgctgggcaagaaagtggctctctcaaaattgcaaggagctaaaagagtttcacgaaaatgaatgagcccgcaagcattgaccataccaatgaatatttgtctgtaactatcagtatatttcagcatgtcaggtaacttttttttctcgaaaatatgtcaggtaaggatcaaaaagaaaaatgtaggtttttttttcacaaagtggttattacagtcccattaggccatcaccaagaataaaatgtttatccatttgcttcctttttttttattcgctaggattttttttttctgagaatatgttagttttgtgctctctaagaaaacaaacaacaaattgattcatatattttgttactacatggtaatcatgtgttgagctgtcacttattaaattcctggtatttgcctcttgaatcatgggctctcgataatgttgtgaatcttcgtgttgtttatcgaattctaactacagaatagttacaagaagggaaaaaatgggtttgaattacaaaatagtaaaaaaagataattcatgagagactgtgcaaagtacagtgcaacactcagcttctctctgcactctaaagtagatcatcatgtgttatctaattctattttaattgagttttgttgtctgcagctcggtgcctatgatgtcaggcaggagacaccctcttgtatagttggtctcattccaggattatgatttacacactggcatgcaacttcaagaaccttcaccatctgtttttcatatcctgtgcctcggagtgttggatccaggacctcaatatacgttcggtcagatatcatctcctgcacccactcgacaagttgttttgatgaagacaagattggaacaggccgccttccggtgagcactcgagcaggactactccaaagctgtacatgtcacctctcaatgtagccacccacccttgtccatactctggggggatgtaaccgaaagtgccgactagctctgttgtgacatgggttctgttgggaaggatcaaccttgatagcccaaaatctgcaatgtgagctttgaattctttgtcaagtaaaacattgctgcacttgatgtcacggtggactatttgaggcttgcagacatcatggatgtaagatataccctggcttgctccttgtgcaatcttgagccgcattggccagttaagaaacgagctggcatcatcattcctgttatgaagccaatcatccaggctgccattctccatgtaggaatatatgagcaacattgagtttccctggatgcagtaaccccacagcggcacaagattgtcatgctgcgctgtagagagtgcgtcaacctctgcactgaattccctctccatcagacacatgtcgctgttgagcttctttatggcaaccatcgatccatcagataactcagctttgtagactagcccatatcctccacaaccgatgatgttctccttgtcaaagttttttgtagccttcagatcagtgaatgtgagcttggtttgctctccctttccttgtgacagcatcaccaaggtttgctccgacttgatgttggacaatgtttcttcggtgccatcgtttctgcatctcctgttctcagtcacgaaattcttgcccctcaagaagagaataagacgagctagcaagaacaggatggtgatacctccaaaaaatacaccaaatgcaagtgctaagatggctgtcttgttatgtcgctttttggagacatacgatgttttatctgaaccacaatggtgtacaagcataggaccacacaattttggattgccatcaaagctagaattcggaaacgtgctaagttggcctacagttggaactgatccttctaggtcattgttagatacattaaatgctgaaaggaagttcagtttgttcaatgctgcagggattggaccagtgaggtcattgcttgatatgtcaagcacctgcaggtttgtgatgttgcagattgattctggtatccctccagagaatttgttggagctcaaattgagtaaaagaagtgcctttaactgaccaatctccttcgggatgacaccagtgaagttattgatacctagattcagcacttttgggagagcactggttcttcggtattgaagtaatggagctgtaaaaacaggcaactcaaagacccttggttcaacattatctgttttgaacattggcatctccattaaggcttttggaatttctccggaaaggctgttgctcgataatctagatagaagaggaagtttagactgctgatccagtcgggtatctgtccagtaaattgattattatataaaaataacaccgccaaatttttgagctttgataaccaatgaggtattcttccagacaacatacaattggccagggaaaggacctgaagattctcaaaaccatcaattatatcaccctctggcattgtttcttgcttgaagttgcgaccaatgagtaaggaggtgaggttcctgcaactctgaagtacctgaattgtccttgtgatatttgtaagagagatattaacaattgatagaaaagagaggtactgcagatttcctattctctctgacaactggccatggaacccattgtaagacagccgtaatgcagttagatttctgcatgagtagatgctttctggaactgttccagaaaaattgttccaaacgacatctaaagttttcagattgggcagtgtggagaagttgacattggtgagcttcccgctgaagctgttgctcttgaggtcgatggttacaaggtttgtgcagtcactcaaagtccatggcagctccccggacatgttgttgttgtccagatggagcttctccagtcttttcagctgtcctatggaatctggaatgctaccaatgagcttatttcctccgagatcaagggtgaccagatttatgagcttcatgatgccctcaattgatccttctaactgattgttaggaaaagaaaggtgcttcaaagaggtaatattgaagagctcatatggaagggtcccactgagattgtttctgccagtgctgaggaatgtcaacttggagcaattaccaagccctggagggatgcctccactgaattggttattactaagttcaagcaaagcaaaggatggtgcactgacacagaacgaagttggtatattcccagtaaagctgttggtgctggcattgatcgcgacaagactcttcatcacctgccatgtggttgatggaaaaattcctgtaaacaagttgcttgatatgttcagtacctgcagaggccggtcaggggttgaagatggcaggtcactcatgcctcctgtcatgtagttaaaactgacatcaaggaccacgatgctgcttgatgacaccagttccagcggtaagccaccggacagcaagttgtgggacaagttgaggcgcatcagacctgtgagattgcaagggaagtgagatgaccccttcaaggcctctagaagccagaaacacatcagtaaccatcctgtttgggttgcaggtgatcccttcccatgcgcagcagtccgtgccattcttccatgacatgcccaggccaccat

SEQ ID NO: 2507 - DNA, 11059 bp, Oryza sativa
taatcaaatttttaggagaaaattataggttttttcactttctattttcagtttagaaaacccaaaaatcaaatttttaggagaaaattatagataatctgttggtgatgctctaggattctattctggaatcctttcgcttttatcggtttctcccaaaaagccggatcaatagcaattatagccgagtgcaggaccgtggcagaagtgatttctggtgcaccaacgggtgatgagccctgcagcccctgctcacatttgtagaatttttttcgtttttagatttttttttaatatttacagaaataatctatcggcgagaaaaattgcaaaaatagaccctgccgcccaccattggggcggcaagctgacgtggcagacggtgggtcgaccgcgccgtctgccgccgtcggccaaaattccgattaggcccttgccgcccatacagagggcggcaagggtctaatagaattttggctgccctcaggagcttgcggctgtactttttgcatctgggtcccttgccagatgtaaaaagtacggccaaaatatttttctatgtaatgttaataaaaaataaagaagtatttgttggtaaaacttgttaatattgttataaaaatgtattgaagttggttgttgcgcaatttcatatgttaagtgaggtattattttgtaccttattcgacgtattagtactcggataattaatataggcctatcgcagtctcggtcgtagaaacattatatggacttaaacaaggagaattatgtaacatgaagaaatagtagtacaatttgaacatgatacaactatttcgattgcggttacatagatgatattagattcgaactaggagggaggtagtgtaatagttgaacacaacgacgatgtagtaatgggacaaggaagcatgacggtagaaattttaatttgccaagttgtccgataatagctaacccctacgtgaggatccctctcctctctcaaaccgcgctttagtaaccctgtattgctctggtagttcaagctgcacaacacggcaaggtggagttagaacccttctggtgtctatccattctctgtattgacatctccttggtggttcctgggaggaaagaatagatgtaaagcgagcaaagttagtaaatgttgtgagaaaataatgattaatgtaatcaaaatattcttaccatgaaatcgtcgtcaagaatatttggacaaacaaagaaccttcgacccaatgttgtaggatttatggaacgaagaacctgacaacgatcaccacacctgcatcttggacgggcttcccatggagggagtgccgtagttagcacccgccagtcgctctgttgttcacgacattgtcgttcataagccgcttttctctttaagtattgctcagtactttcggatgcgaaataccagcgaccttcttgtaaacaagtggttaggtcgagaacgggattttctgtatcgacccactcgatgtatgcgcaagccgtagtgcgggtctgccgaatagagtagtgttacgaagaataaagcgattgcccatacggaatgaataagcatttgcagataataaaatacctcacggtcatagttagggcacctaaaaaagcgccttcctcgaatatcaggattcctcgaagccattagttggcatcgatcaccgcataggcagagaggacgctggcaccaaggtggtagtaggtatacacaaggatcgctgcgccagtttggatcctcaacaccccggcgtctagccattgacgaaagccggtaggatttgtaatgaagaagtggggaagagagtactgaatgtgactgagttctgaaagattgtgaggcctcactcgttaaggcgacttatatatgcgcaaaaaatcgagtgatatccttgacatgtgaacgtggtggggcatggcgggtacgactgattggcgccgaaagttgcacgcttgatcggcgccgaaagttacgttggtcgtatgcggcaaatggcgggcaaatactcgtagagcatgcgaataaaggaggctgcatcggtgcgggagaaagcaatcgtgcatgcgccgaaaggtatcgtgcatgcgccgaaagatatcgtgcacatataacaacaacgtagtcattacataagcatacagtactggaaagtcaagcaaataaacaaagagaagattgctctactggccctgccccgcgccgcgaccacgcttggtcctccgggcctgtgctcgcacgtggtcctgggagtaggtgaaacgatccggtggcacagcacgggtagcacgagtgtctggcggaggagtggcctgcgcctggtcctgcgtctgcaccggcggtgcgcctcccagctgtgaggggccgatgacgtcctctgccgagcctgaagcgaagtcgaagtcagtgatgtcgaagagcacggtggaagacagcaagcggtccgacgaggtcctagcatggtctagtggtggaccttgactcgacgtgccggctgcctgtgacgaagccccggtgtactgctggaactgcgctgagtgcgaggtcgacgcagctggctgagacgctgaccctgcagcgtgggagaagtaggcggcctgcgtcatagcgaactgggcgaaacctacacatcgacaacgggaccttgtaagctaagacataaaatacatgtaaattgattatcgaagtaatgttgttttttaagtacctatggggggcacacctgaaggcctagccgaggaaggtggggtgctgaacggtgcacgaaaccctgaatcaatcggcaagtgaaacggctcacatatatgtgcgaggcatgtacagaaaaatccttaaaaatacttacctccgtgcggagggggagtcggcctaggaacgtgcgcagctggacggggaccagtcggtacgggtggccgctgtacagctgcgtctgcccgagcaatgtcgtctgcacgacaggtgagcactcggagaatcgagcgcatcgactccaccatccgcgtgtacgtcgtcaggtgctcctctacgggtaccggaatccctgcgtctaaacgttggatcgtcgttgaaccgtcaacgacgacccggttgatgtcgtcgacctgcatggttaatttgttcatacatattcgtaacatttgacgatgagaaagacatgaaaacataaaggaatggtgcgatgcagggtactcacagcacgagcgaagtcctggtcgcggtgcctagcatagaggtctctagtgctcgcaacgtggggctgctgctccaagggagcgaaggtgaccctagtacgggtgtgtggctggtaccagcgtaggtaggcctggtacgactcctcagtgtgtggctctccctcgtggtccacgacctcctcggttgcgagcaaccagtcctcaacaaaagtcgccaacttggcgggccagtcgccagctgactgctgacccttgcgtgagtacctacgaattaatgtgtaatattagtgtgaaacgacagatgttacaaattattgcaacaatggaaagcgtagtgcaagatcttaccggtgaacagcagctgggacggtggtcggaaacggtactggaaagggctgacggaagccgaactgccgcatcacgcggaaaggggcgtgaggctcaacgcagatgtcgaagaccatcggaaccgtagtcatccagtacgcctggtccctggtgcagagtgtggacagacccaacggcgcacgagcctgggtagccgcggcactgtagggctcccacacgacgtcaatcggcagaaggcggtcgaactccataacaaactcaggatacgaccgcctaatctggacgtgagcccatcggcgctgcaatacgagacgatcgatgtgatgtacaatgaacttagcaattaacttaacaatacgataagatcgatgcaacgtacctgacgacggcaccacagagtacccatcgtagggtagtcgacctctggtcgctcctcgtacagtgactcctcgtacgcgtgctggtccacctcagggcggccgatcgcaatcctctcagctgcccagatagaaagaaagagagggcacccaccaaaggtcgcgctgggatccgtcttcgtgcaagactcacaaagtgcacggtacagagccgccaacaacgcggaaccccagctccactgaggcacctcgcctaccgcggcgtcggcgatgctcctggcgtcgtgcacgagtcccttgtcgaccgcgtgcccgtgacggccacagaacatcacccagccaaaaagccagagcaagtacgcctccaaacatcggctgtaggagtactcgtcggcctccgcctgtagctgctcaacctgcaagcagtcgataaaatgttaggcaccttaactgcggactaaagatgtaatacgattgtcatttcggtaaaaaacactcacggtgaactgaagtagccacctcttcgtaggtccggtgttgcggtggtgtgccaacggctggagcgggaggtgcggtgcgcgctgtactagtgcgaaacgtgccgtcagttcgtcctgccagtctacagccgtggtcactggcccaacagcgtctcccgcgagcggtagccccaacaagcacgatacgtcctgtagggtaggggctacctcacctcacggcaagtgaaaagtgtgcgtctctggcctccatcggtcgaccaaagctgctaggagggacctgtccacagtccatcgtctggccgggtccgcatggccggcggcagcctccaccagccgacacatcggtaggaggccggcctcacgcagcctgcaataagaaattaatatgtcattacaaaaaatattacagcgcaactaatttatagtaatatactgttcgtacctctcgacgaaggagtcgtgaaccgtgagtagctcaccgcacgtccgtgcccggaacgtcccaagctgagccccctgcaccgcagtaaggtgagaccggtgtcggagatctatcgccgggtccaacagctgaggtgtatcctgacgtgccatctctgaaaaatatagtgtttcgtattagaacaattcaaaaagtagtaatgtaaaacaaaagatgactcgcaagttaatgaaatagtaaaaaaatcatgagaataattacgtacaacaagagtacagcctatttaaataaagcaaacgttactaatggtacataacgatgacgtgcaatttaacatatatgtagagttcgataatataacataacataacataatattacgtgtcgaagtccgacatacatcagcatacgtaaagacactaggtgccttagtctgacgttatatcacgagacctaaagacatgacaagccgaagtctgaaattacacgacgaaacataaacacatcgataagttcgaaacagattacaagcaaacccacatgccaacatagaacataagaactacaccacgtagccagacgtggcacgacgacgcctaggacgtggtcgagtggaggtagtgccttcacccgtagggcgagctccatctgctgctgatcctgatagtcatgcctccgccgcacttggtttctccttgtctttaggacaatgcttgtaggtgtgcccacgttcatcgcatttgctgcaacgcttcaccctgccagcctccgactcgtccatattgttgcagatgcgacgagtcctcctccttccagccttgcctcggagcttcgatgggtcaggaatattgagtacttcatcgttagtctctgtgaactccccagctatgccgaaccggtaaatctcgccgctccatgtatgatatattgcttgcttactgaagtactgcgacacatatactgcatctggtatgccacactccgctgcggcagcaatgacatgggtgcatggcctgtggagcagcttcggctttgaacaagagcaatgacatgtgccgtcggttttgagaacacactcctgcttcactctcttgcggtagatacccctgcctgccttatcttgacatagtatctcgaacctatgttgttgggtaccttgcactagagctcgatgtttcatggcctttttatgcaactcctctagctttttctgcatgaaagttccaaacaaaatgctgttgttcggcatagagggaagaattgcctggaaccgatccctaaaatacctgtatgtcccatgtaaaatgaactccactatgccaactagtggcagtccacggacaccgcgcatcacccagttgtaaacttctgccaaatttgttgtcattattccatatctagcaccaccggtgtcatacgccttggcccatttctcttttggttcatgcagaatccactgagaaaatttccgaatctccaatccagttcttctaaccaaagttggactatccgttggaagaggtccaagagcttgaggagggtcatcaacggcagtcgatggagccgctgcacgctgatcactgcatttggctgtcaactcatctaatctcttccaaagctcattgaattttttctcctggttctgattgcacagcctcctgaacatgttcacgagctccttgttcttgaattgcttgaagaaattagctcccatatgacgcatgcaccacctactctgtacatcgtcccaaacaccagggtatcctcgttccatgctcccaaactgcaactcttctatcgttcgcagaatgccagcgtgcctatcatgtatcaggcacacatttggcctcatactaacaacttttgttttaaccaatttcaggaaccagtaccagctgtcggtattctcactctcaacaaaagcaaatgccaagggaaatacctgattgttcccatttacccctattgctgtcagtatctggccccgatactttcctgtcaagaatgtcccatcaatgcagataactggacgacagttcacgaatgccatcttgcatgcatgtagagctaagaacgccctttgcagcacactcttgccaggatgttcaattgatgggaatttcttcacttcgtaagagctcccagggtttctttcctcgataacaccaagcaggcgtggcaaattgtcatacgagacttcgtatgttccaaatctcatctctattattttctgtttggccctccaggccttggcatagctaatagtatacttgtatgtctcctcgatgtgtcggattattgaccttggttcgtatgtgagattatcgatgacatgcgcatacatctcagatgcgacaaatgcacatgtaatgttcctgtggtatttctgaacaccaggtagaaaacatgtatgcttggtaacgactgacactgtccaataatccttccatttccccttatacgcgtgcactctccagggacaaccatctttttccttaacacaccgaacttcatattgcgaccggttggacttggcagcccaaaactctctatgaagtgacactgcaaaatgctttaccgcctccttcatatcttctgttctactataaatcgctccctgaataacctcattttctttgtattcccatctcacactatcctcttcagagacgatcagcccagaaaaatcctgactagcccattctgctggattaatatccgtctcctcatctgacgaatcaccttcctctacacgcccgttgtcagaatcctccctctccatttcatccacaatggctgcgacagtctccccctcgtcggccactccacctggttgaatgcccactggagctactacgcccccgtccactcctgcgttgacctcctccacagaagtctcatttacttcagcgcttggtccctcgctatcatccatgttcatctgcacacctggatccttcgggtgcacaaacggaaccaaagctagaggccacccacgttgcattgcattttccacataccatctccacacttgggagttttgaactggcattagttcccaattgcccgacttactataacattgattgttatgtcacttgtctgtggatcaactctcaaacccctcattaaccatccttttatagaaggtacactcctctcagccggtctctcaattcccctttctgatacaataaaatctgacagatctaccccagttggcccgtaacggacgtttcctggtccatggtaaacttgaaatattggtttgttcgacatatctgtcaacgaattaactagatcatattactctttcatgcaataaacatctacaacgtaatatcttcttgtgtaagccaatgcaacggtaaaatattgattccaaactagcagatctacgttgttaccgatatctacaatacgcacttctaaattagtacaactaaaaccataaaaatataatgcatttattcaaataaattttttaaaaatacacactatttaactcaatagtcacatataggatctacgaatattacctgaaatcggcgtctgaatccggcagggcttcgccccttcttctcttctcctcccctctcttctttttttttcactggatttgagaggtgaggaatgagggctgggggctgggtggcaggccttttataggcagcgaggcctgccgcccggccagagggcggcaaggggccgcctgcaaaatggccggccccctgccgctcttttgcattcggaccccttgccgccccaccagagagcgcaagggttttcatgcaaaaaacccaccctccgtcaacgcccgttcctcccccgtttgtcacgtcagcttgccgcccaccattggggcggcagggtctatttttgcaatttttctcgccgatagattatttctgtaaatattaaaaaaaatctaaaaaggaaaaaaattccgcatttgtacggatcctctcccggcccaaatggcccaaacaaatccgatccagccagcagcccgaggcccatgttggaggcccggtcgatctcctacaggcgatctgaagaaccatctcctcaccatcctcgccggccaaactgcggcctccaacacgcgccggcgggcggaggctcgcggcagatgcgcccggcaggtcaggccgccgccgtagcccgtagatagggtgcgcgcaggacggagctgttcgtggaggccgtggggtatgcgctcttgaggtaaatcaaagcttcttggttgattctcctgtctttgtttagggattgggacgtggctgcaaaaactttggttgagatttctggcatttctcgatgcggattagcggcccactcgttgtaaatcacacatgaaaaatattcgaaattgtttagggattggggcgtggcagcaaaaactttggtagccactaattaatacaagaacattttgcattcacgtatgattgtaagacgatgcatttactaacagatttcagtttacttcagtcctccccgcaaaaaaataaaaaataaaaaataaaaaagagagagagtttaattctcagtgttgtaaactcatagtagaaggagcatcatttgattagcacactttgttttgtgtggtaaattaacatcttgcatcttatatattgtggatcaggccatataacttatttcttttttgcaatatgtatgacttgaaaatgcttgttttctttttgcataattgatgctagctaatttggagaatttgatctctcaatatggatatgtttacagctatatttagctgatattatgttgatgtacattttggctttctgctaacaagttgtgtactatttccagtccaaagagagatctttttttttttttttttttggggcaaagagagatctctttaacaagctaagttttgtataactgtgtgagtggagctaaaatgataatataaagctttgattgggatgtgaaaatccatgggtggactcaggtgcatggggtctatcaagaatttagataattattgttagcaaacatgttttaagtgttcctctgctttgtccagtacctttgtgtattgtcacattgctattagctttaggagcaagataagggctaaagatcaaataggttccagcaatgccaaatatttcaccatgttacaaacaccaatattggttaaagtttctaagtattttggtttgttccatttggtttttggcagcttcagtatggtttttgtgagctaactttttattgaaaattttgctttgcattgcccagatgtctaatctatcagagccctcaaaagaagctgtgtcagctgacgattcaagtgctgtccagaaaactggagcatggagtaacacgttgaacattcttctgcaacaaacttcagtctatggtgtggctgctggttattgcctgtcagcatctctgctctccattatcaacaaatgggcagtcatgaaatttccttaccctggagcattgacagctttacagtacttcactagtgttgttggagttctcttatgtggacaactaaagcttattgagcatgatggccttaatttgaggaccatgtggaagttcttgcctgctgctgtgatgttctacatctccatcttcacaaacagtgaacttctactccatgccaatgtggacactttcatcgtgtttcgctctgctgtgccaatttttgtggccattggagagaccttttatcttcaccaaccatggccatcactcaagacatggctttcgctttcaactatacttggtggaagtgtgatctatgttttcacagacaaccagttcactgtgactgcttacacttgggcagtggcatatcttgcaagcatgtccattgactttgtctacatcaagcacgttgtcatgaccattggcctgaacacatggggccttgtgctttacaacaatctggaagctttcatgctcttccctcttgagatgcttctaacgggggagcttaatcagatgaagggcgacaatgctaaagtgacaaactggctttcatctgatgtcattcttcctgttgctctgtcgtgcttgttcgggctatctatatccttcttcgggttctcctgcagacgggctatctcggcaactggatttaccgtgctcggtatagtgaacaagctcctgactgttgtgattaatctccttatctgggacaa

SEQ ID NO: 2508 - DNA, 6263 bp, Oryza sativa
aagattgtcatgtcgtgccatggagagcgtttcaacctctgcactgaactccctttccatcagacacatttcaccattaagtttcttgatggcaatcatagagccatcaggtaactgtgccttgtagactaatccataacctccacatccaatgatgtgctcctggttaaaattgtttgtagcttccacaatgccagtgaatgtgagcttgttttctgcttccttgccttgctgcaacattaccaacaaatgatctgaattggtgttcggtgataatgcttctatgtaatcattgttgcacctacttttggtcgtgaaactcatacccctgattgacagaaggagataccccaacaacaaaagaatgacaatggctccaaaaaggacacaaaaaacaattacaagtatgaccttcttgttttgttgtttctttgagaccaaatgtctatcaaatgaactgcaatggtgtgtaagcataggaccacacagctttggattgccataaaagctagaatttgtgaatgtactaaactgtccgccagttgggataggcccttctaggtcattatacgagacgctgaattcgataagaaaggttaaattgttcagtgcggctgggattgtaccagttagattattgcttgataaatccagcattagcaggtctctgaggttgcagatcgactgggggatatctccatataatttgttaaagctcaaattaagcaaaaggagcgctttcaactgaccaatctcttgagggatcaaaccggtgaattcattgttacctagattcagcactttgggaaaagcactggccttgcggtattgaagtagtgttgcatctatatatacgggtagttcaaatgctctagtgtccaattgtgctgcagccctgtctgaccttagcattggcatctgtaataaggccatcggaatttctcccgtcagattgttatttgatacatctagatagaagaggaagtttaggctgctgatccagtcaggtattggtccagttagttgattgttgtctaaaaccagcatctccaacctcgagagttttgataaccattgaggtatttttccagaaaaggagcatccacttaggtcaagaacctgaagattctcaaaaccatcaattctatcatcgtctggtatactttcattcatgaagttgttgctaataagaagggtggtgagtttgctggagctccttaatatctgtagtgcattgttatgtttgtgagattgttgtaaccgagtgacaggaaggaaagggacttcagattgcctagtccctttgataactggccttggaatttattcaaagatagccgcagggcagttaggttgctgcatgagtatattgtttctggaattttaccactgaagatgttctgccgaagatctaaagtttgtagactgggtagattggagaaattgacattcatgagctctccactgaaattgttgctattgaggtcgatggttttcagacttgtgcagttgctcagggttgatggtatgctcccaaacattttgttgttgttcaaatggagttcctccaatctgttgagctgaccgatagactctggaatgttaccactgaagttgttctctccaaggtcaagggtagccagcttaccgagtttgacaacatttgccccttcaagtgttccttgtaaattattgtttggaaaagagaggcactctaacgaggtagcattgaagatttcatcagggagagtcccactaaggttgttatggccagccttgaggactctcagcctggagcaacttccaagttcagggggaatgctcccactgaattggttgtaactgagttcaagcacagctaaggatggtgagttggtgcagaaattagttggtattttcccagtaaagctgttgttactgacattgagtgcggccagatttgtcatcactacccatgtggaggatggaaactgtcctgctaacaaattacttgagatgttgagtacctgcagtggcctggcaggggttgaagatggcaacttgtcgagacctccattcaggcggttaaagctgatgtctatgacgatgagtttgctggaagacagcaattcctgcggtaggacactggatagcaggttgtaggacaggttgaggcgcagcaatccagtcaggttgccaagagatggagagatgtacccctcgaggctcctagaagcagtgaacatcagtcacggtcctatctgttctgcaggtgatcccttcccactcgcaacaatccacgccatccttccatgacatgctgaggcctccatccttagaaagcccggtgaggaaattgaggagggagttcttctcctgctctgtacatgaactggtgggagaggtgaagttgagcagcagcacaagggcaaggctaagaacaggtatgggcagtctgttgctttgtgtcttgtatgaaaaatgaggtggctgcatggttttctggtgatactagcatggaagttggatgcgagtttgtatcctgagttcctgactgcgcaaagcatcagatggtctaatcaagaaagaacatgaggaagaagaaagaattagctccaacttccattttattctgtctttctagtcatggttataaaaaagaaacacaggtcaagaactttataaaaaagaactgctatagcagcttcttggttcacattatgacgttgcactagcaggtgcctgctatatatatatatattgaaaaaccaagtggtcggcctccctgaccgtacaagttgttttccttttaatcatttttatttcaatccttatgtcattgacattgttacagcttgcctaaattcacttgatctgatgtcatttctcttccccttgacagacctggttgcttggtactaacacacacaaatctttacacagcttctgaaggacgcataccttttggtaaggagcaaaagactcgtctctgtgaaaagaaacacagcttctgaagatttgcaagatccactttgcagatactacatgcaaagcatcattccgagaggtgcatataatttagagcaatcatcggcatcgtggtcatggtgtgtacatgctctggaaaacaacatagcacgactggtgggtgattgggtgggtaatctggtgctctcttcttcaattcttcttcctgttgacccaagggccaaggcgtttactttctgttatcaagcgtgcgttccggcttatttgctccacacgcttgcagttgttttccattctcccggctccactggtgtatctttgtagaccatggattatgactcttgtgtctatctctgaattttggaagtgcttgaagacttgaagtaagctgcgtagcgtgtgagggctgcaggctgccagtgggagctggcttatcatttgggacaccacaggggagactggttcttgtgtagacatggtctatggactatggaacggactgaagccacacagatcttcaggtttgtgagaattccatttcttccttccttcttttgtcataatcatatttttcttattttaattccaatttgcatacggagctggtttaaaaaagttcaggtgagatcatttgatgctttgtagtaggtgtagctgcactttaattaattcgtcccattgtctttgggacataattcagccacccagaccttaatctttttttaaggggcacccagacggccagaccttaatttagctgaacagttgttgtttcgaaaggcatttatctgcagatgagatcctctaataaaatcaacccggatcgttctgatatctgatgatctgtagcaggcgcaattgcactttatattcatgtccagcttctgcggtatgatgttccatgtgctaatacaggtagctcaaaattgtttgtgtctgcattaactgaaaaaatatagacagcaagtttctgtcaccaaacaccatcaggatctccatatgaaaattacatagttgcaattacatatgccatccctcctgcttgtttatttcccatgctttcattttctctcttatacgtgttttatgtcgttggttatatggttcttttgacaccatttcaggtgcagcacaaactggagaaatccttcggccagaacagaaacagcatggggaacacaagatgattacagaagatcggctgcacaaagaccaattctagaaacagcatagaggccatttccagttcagacgactgtagtgctgtactgctgtgctgcacgtcgtacacgtcgaagtctgaagaggattgctgcactgcagatcaatcaatgattttccaattttcgtcaaaacaagaaaccaatgattttccaggctcatggacacggtctacccaggcacccatccgtagacggtaagcgatcctaatcatcactgtaggagtagcggggccctgtgtcttttgtcgtgctgcatatcatatcgtctatggaagaatacatgggccgtgtttagattcaaaatgttttcttggaacttccaacttttccgtcacattaaatgtttgcacacatacatgaagcattaaatatagacgaaaaaaaatcaattgcacagtttgcatgtaaatcgcgagacgaatcttttgagcctaactgcgcaatgatttgataatgtgatgctacaataaacatttgctaatgatggattaattagacttaataaatttgtctcgcagtttacatacagaacctataatttgttttgttattagtctatatttaatactttaaatgtattttaaatgtatggccgtatacttaaaaaaattttggaccacgaactaaacacaaccatgattaaaattagtctcgcctagcgtttcacacctgtccacttgcagtgcaaaattatgaaaaactgatggcgatctggcgatgaatgaatgaatgattcggaccgccgctacgttgttgctgccgacgcgttcgttggccgtgtgtccgtgtctcggtctgcagtcttcaggttcagaaagttttctccttgttctgaagtcttcagaggaaaattttgtttgttttttactccatcgtcccgtggattctgcaatttttttttataaaaaatgtaatttgttgtttcttcagtgtctcagtccgatcggaatgaaatggaatggaggagatggcggtgtgaactgtccttggtagtggagttgtggattggctcgtatacgacaaatgtatttggatatttggcacttgttatcgctggaaaaaatatagtcaagtcgtgtacgaggaaaactgcatgctactaccatacatacgaaggatatcaagttcttgacattttgatatggagcatagcaaaactgttctagttctcgtttgaaatgcgagaatgtgttcacaaaaggctgattcattttatttaaaattcacgcaatattcctctgttcgaaggaaaggtcttgttgtgtttttctttttcttttttttcttttctagtgcaggctgatctgctgtgctgagtgcagaccgtggcagaagtgatttacttttccttgtataagggggtgtttaaatccggggtgtaaagttttagcgtgtcacatcgaatattatataaggtatcgcatgtggcagggtttacattaccggttgaccactaaatttcgaaccccatcggtatcaccgttttcgataaattttgatcggttttcgataaatttcgaccaaatctattgtttatccttcgaaattccaatcgaaacttaattccgagccatgtaaacatcgaaatttcatggaatttgaccggtttttgtcggaattatgaaccctggcatgtggtgtttgggtactaataagaaaactaattacagaattcgtcagtaaagtgcgagacaaatttattaagcctaagtaatacatcattagcaaatgtttactgtagcactacattgttaaatcatggagcaattatgcttaaaagattcgtctcacaaattagtcgcaatacgtgcaattatttttttagcacatatttaatacttcatgcagatgtttaaacgtacgatgtgatagggtgaatatttttggggtgtgctctaaacgaggcctaagagcatcaccaacagattatctataattttctcctaaaaatttgatttttgggttttctaaactgaaaatagaaagtgaaaaaactcctctctccaacagatagcctaaattcaatccccaaaacttaaaagtgagcccttctgttaaactaccaaaagaaaa

SEQ ID NO: 2509 - DNA, 11155 bp, Oryza sativa
agatatggtaggtaatttgctgctatacctgttgatggaaaatggagtgctgcatgattctctgatgaaactatgatcaaaacaagatgcttggcgtgtaaagaatcaattgtgtagtcaagaacgagccatgaggaggatgaaagaagccacttttgcttctaattttgttttggacttaccggtcgcagtccatccaggattagatatttagatgcaatagcctataaggagtacttgctaagttttcacaagattgatgcatggtctttgttaacgcgtgtgctgttaaattctctaccggttgactgtagaatgatctattgcacagtcaaccttcctgggtatactagctactaccggatgggatatatcatagtactacgaatctggacaggtctctgatactagattgctatattatggcacggatcaatatgttttttttttactgaagcattaattctttactcaatccttatcacgttgctcttgttacatcatggttaatatttgaccgtatatatcacttatgttaccaggttctccccagcttgtattttgtgataattcggttgaagatttgcaattgtgtacatggaaaatcatcattccgagaggtgcatataatttggagaaatcattggcgttgtggtcatggtgtgtacgcatattttggacaagaacaaattgagcacaagtggtggtggtgagtgggcgacccggtgtgttgctgtcttcttcttcttgaccgtttactttctgttatcaagcgtgcactttggcttatttctccacacgtttgcagctctttttccatcttctaccggctccactgttgtatcattatagaccatggattatgactggaaatttgggagaaatttgataatttgacactttattcattgttgttttgctttaattgatacttgtgcgaatgatatgtgggaccatctgagtgaatgaaagtgaccagaacatgatgttaaatactccaagcccacttttgtggaatgtcaagttgtcaaatctgtcgaaattttggaagcgtgaagaaaagtacaatgggtaccgtatgagggctggatgatgtggggcaagctatatcacttgggacatcatggtggagccctgactcttgtacagacatatgtggtctatggaacggactggagccacagaattgcactagaatctgggctcattttgcaagctggtgtaagacttgtcctcctttatcatggacatatttttctaattttaattccgatttgcttacgaaggtctgttaaaaagttcaggtgatatcatttcgatgctcggtagtaggtctagtgcacttcaattattttgttccattgtctttgggacataatgcaagtatgcaaccacctagacagtctttctttctttttttcatgatcatttttcttttctgtttcttattccaatttgcacatgagatatatgcagttttactcattagtttatggcttatatgaaaatctgtgattcgagtcgttatatgcgcaaaaattatatagtactaccttcatcctaaaatgttgctatctaatgtaagatgaggcactacctagtgctacgaattttaacaatgatgtctcatcttatattatgtagtacttactctgtttcacaatgtaaatcattttagcattttccacatttatattgatgtcaataaatctagacatatatatttatcttgattcattaacatcaatatgaatgtggaaaatactagaatgacttacattgtgaaacggagggagtaacattttgggatggaggtactatctcattcaccaaatgttgaggtaaccaacataaaaaaaaaaggagcgagtagtactacctctgttccaaaataagtgcaactatggatatccgtgtccaacgtttgaccgtccgttttatttgaaaattttatgaatttttttaaaaaattaattacacttaaaaggactattcatgttttatcatttattaacaataaaaatactaatcatattttttttcaaataagacgaacgatcaaacgttggacactaatatcgcaaaactgtatttattttgggacggagggagtactatcatctctgtttatacaatttataattgaatttctgcaatgatcatactagtgcttctgtccataaaatcatagacatcgccgttatgccaagggatggattcatcgattagccttaagttgggctggaatgtgtgggcctcgtgtggtcgtttcccttcgggcccaacacgagcccgaaagcttccatcttcttccagattagcggcggggggaggcgacggcgaccggcggcgacgggtggccggaattgcggttccgtatccctctcctggcttccgcccaccgcgccctttgactgttcgacgcaatgccagggctggcctggtggagcggccgagcggaggtggtggagccgcttcttcgctgttaggcggtgcgctcagggtgttcggcgaaatgctcgagaatctggccggcggcgagtccggccgttgaagatctcgtggaggcgaagggaccatgcttcgtgagtgcgtgctgcaatgccaagctctctccaagcgcttcggcttcgcgaggttagtgatgctgcattatctccccgtcccatgctagggcttagcatttgtgctggtgtggttcacttatctattctcttccggtattaagaatgcgttgatcggcaacaaacatctggcaacacctagtatcttcacttgaaccgaaaccattctgacttaatttctgagttaaaaacttaatgttctcagtcattgttacttttcatgcctgtgcaacttgagcacgagtagtgttcctaaaaacttttgtttagtttatatccatcacgcacatttcacctttgagcttcttgatggcaatcttggagccatcaggtagctttgccttgtatactggagttaatggcttaccacattcttcactatatcgatctttttacgtggttggtactctcattcttttgattgactagatgcgtgttcagcttctggtgatcacagagttttatccctaccaccccaaaaactgcgttgcattctcattctcttccatacttgaatcacacatttctggcatgtattcattagattcctgtggtttctatgtacgtcaatcagaaacaagagtgctgatatcacctaattgccttagcatttgcactcgatttgtttgagcacacaaagaacaggatgatttggcaggaggctggcctagtctagctctggttgtagacaagtgtagctcctagcgtttcactgccgtgaggcggtgctgccccggcaatttaagtttgccgagcatttatgtactaaactccttttaaaatctaatgaaattcagatggcgtccttctgccgtcccagcgaaaaaaggaacaggatgatcttttcacttgtttatacttttcctcatgcttttcgccaattgagcgtactcagcacttccttcagtggaggagaaatgtctggttatgaaactaaaaactcctgagaagatacaaaagtgcaaaatggtaatatgtcagcagctgtacacaacatgttacaagaccagaaaaactactactacgtaataccacatttgctctatgcactgagctacaattttgtcattgtataactgcaatctaccttgactgccttgtgccttctatatcttcagtcggagcctacactgtccaggcaggaaactacctctgtgatagttggccgcatgcaaggattacagttgacacatttgcaagcaacttcaagcaccttgagcatctgctcttcattccctgtgccttggagtgttggatccaggacctcaagcatgtttcccttggacttcatttctagtacccatggaacaagttcctctgatgtagagaggattgaaacaggccgtcttcctgtgagtagctcaagcaggaccactccaaaactgtacacatcgcctcttaaggtagcaacccatccttgtccatactcaggtgggatgtaacctagagtgccgactagctctgttgtgatgtggtttttgttcggaaggatcaatcttgacaacccaaaatcagcgacataagctttgaattctttgtcaagtagaatgttgctggacttgatgtcacggtggacaatgtgaggcttgcagacatcatggatatacgaaagaccctggcttgctcctcgtgcaatcttgaaacgtgttggccagtcaagaaatgagctggtttcgtcatccctattatgaagccagtcgtccaggctaccattttccatgtaagaatatatgagtagcctcgagtttccctggatgcagtatccccacaaaggcacaagattgtcatgctgtgccatggatagggcttcaacctctgctgcaaactccctttccatgaggcacatttctccattgagcttcttgattgcgagtgtggagccactgggtaactcagctttgtacactagcccataacctccacatgctataatattctccttatggaagttatctgtagcctccatgagatcagtgaatgtgagtttgtttgcttctccactgcctcgtggtatcattaccaacaaatgctctggatcagaggtgaacgaaccggcctccagatttccactagtgttgcttttgttttcgattttgggaattgcatccctgagcgagaaaaggaagtgcgccaatagcaaaacaattgcggcccctccaaagcaccccaaatactattgcaagaatgaccctttgttcaactgttttttggatgctgaggcttcttctgctgatttgcatttgtgagtgagcatagagccacacagctttgggttaccatcaaagctggaatttggaaatgtactaaactgagctcctatgggaataggaccttcaaggtcattgtttgaaacattgaatgctgaaaggaagttcaggctattcagttcaccaggaattgaacctgtgaggttgttattggataaatcgagaactcgcagacttgtgaggctgcaaactgattgtgggatctgtcctgataaattgttgtggctgaaatcaagtacgacaagcatttttaactgaccaatttgtggggggatcacacccatgaacttgtttaggcttagattcaacagtgtcggaaaagcagtacgtgtacggtattgaagaaatttaccatcataaacaggtagctcaaagaaactaggctctgaataggtcttattctgggttgttcttatcattggcatgtccatcaaggtaattgggatttctcctgctaggctgttgtttgatatatccagatagaacaggcggtttagtgagctaatccagtctggtattggtccagttagttgattgttggataaaaatagtaacttcaagtttgtgagctttgatagccaaagtggtattcttcctgataatgaacagtggtctactgagagagcctggagattctcgaaaccatcaatggtttcatcctgtggaatgacctcttccatgaagttgtacgcaataaacagggtggtaaggttcgtggagctcttaaggatctgaagagctcttgtgatatttgtaaaagaattgttactcaaagataggaacgagaggtacttcagcttgcctatttctgatgacagctcaccgtagaaattgttatacgagagccgcagtgcaatcaagttgctacatgagtagatgctttctggaactttaccactaaagttgttcatgtcaatatctaaagttttcagattgggcaatgtggagaagttgaccttgcctagatctccgctgaagctgttgctcttgaggttgatggttgtgagatatttgcaattgcccaaagccgatggaagctcaccatgcaagttattgttgtccaaatggagctcctgcaatctactgagctgacctatagtatctggaatcatgccactgaagttgttccctccaagatcaagtactaccacattactgagttttactacaggtgtactaccaatgtttccttctaaattattgttgggaaaagagaggcagtccaacgaggtagcattgaagagttcgtctgggagagtcccactaaggttgttgttgccagccttgaggactctgagcatggagcaatttccaagttcagggggaacgcccccactgaattggttgtaactgagctcaagcacagcgaaggatggtgagttggtgcagaaattagttggtatatgcccactaaagctgttgttactgacattgagtttgaccagatttttcatcactttccatgtggaggatggaaactgtcctttaaacaaattgcttgagatgtttagtacctgcagtggcctggcaggggttgaagatggcaactcatcgagacctccattcaggcggttaaagctgatgtcgatgacaatgagacttctggaagacactaattcctgcggtatggcaccggatagcaggttgtaggacagattgaggcgcaacaatccagtcaggttgccaagagatggtgagatgtgcccctcgaggctcctggaaggcaatgaaacttcagtcacggtcttatcttggctgcagtttatcccttcccattcgcaacaatccatgccatccttccatgacatgctgaggcccccatcctgagaaaaccccgtgaggaaattgaggagggtgctcttctcttgctttgtacatgaactggtgggagaggtgaagttgagcagtagcacaagggcaagaccaagaacaggtatgggaaatctgttgctttgtgtcttgcatgaagaatgaggtggctgcatggttttctggtgatactagcatggaagccttatgcttagtttgtatcctgagtttctgactgggcaaagcatgagatgatctaatcaagaaagagcttgaggaggaagaaagaagtggctcttgcttccattttcctagcacgtgacaactttattctgtttttctactcgaagtcataaaaaagaaatacaggtcaaggacttcataaaatcttctattgaaaagtctgagtggtctgcctccctgaccgtacaagttattttcctttaatcatttttatttatttcaattttcctttaatcatttttatttatttcaatccttatgacattgacattgttacagcaatcctaaattcacttgatctgacaccattctcttcccttgacagatatgtttgcgtgctactaatacggtcatttttttacacaaggatgcataccttttggtaaggaggaaaggactcatgtctgtaaaaagaaacaaagcttctgaagatgcttgaagagtttaagtaagctagggtgtagtctagtgattgcagtgacctgagtaataccccaaggttctgagttcaaatcttcataggagcgaatttcagagattaggttgtttgcggggctaagttccctatttcaatggccgtatatatccagttggatgtagaggccgggtaaaaaatacccttctctaaaaaaaagaaggtagcgtgtgagggctgcaagtggcagcaggctgatcacttgggagttgggacaccacagggaagcatagaaaaactttattctgattgtacgagggatatcaagttcttgacattttgatatcaagtttcttgatacgacctatacaattccatagcaaaattattttagggcttgtttggattgaagctaatttttgccctaccaattttattacgattgtacgaggaatatcaagttcttgacattttgatatcaagtttctcgatacgacctatacaattccatagcaaaattattttaggcttgtttggattgaagctattttttgccctaccatttttttgacaactttaataatatcgcatagatatttggtttgctacttaattttggcaactcttaactagattgatgcatgaatatatgctttgcggaattgttcctttgaagttgttaagcataagatgtaaagtttgtaaaaattgggtaaggtggagaaaatgatcttggagagctctccactgaagttgttgctcttgatatctaatctatggtttcgagatttgtgcagctgctcggagtcgatggcacatctgatctctccatacatgttgttgtagcctaaatggagttcctctaatttcttgagtttacctatagattctggaatccctgccactcaaattgttccctccaaggtcaaggttaactagattacttagtttgcaagattgctgaagatttgcaaagattcacttggaaagatggtactacgttacatggaaatcatcattccgagaggtgcacataatttggagaaatcattggcggcggcgtggtcattggtgtgtacatggtttggacaagaacaaattgagcacaactggtggtggcgactggtgagtggtgacctggtctatttctctcatcttcttgaccgtttactttctgtcggaaaagcgtgcgctttggcttttttgctccacacgtttgcagcggtttcctcttctggttccaccactgtgactctgaattctcgtgagaaatttgataatttgacactttattcgttgtggatttgttttaattaatacttgagagaatggcacatgggaccattcggataaatgaaagtgggctataatgttaaataatcgaagcccacttttgtggagggcgaaattatcaaatctcatttttggaagtgtgtgaagacttgaagtaaaccggttagcgcgtgaggcctatatgtgacaggggcaagctggttgaacacttggaggtgggagggacaccatggtggaggctgattcttcgttcttgtgcagacattatcatttcactgcttttgggcataagcgaaacggtatatttacaaatgaaaaataatttgtaaataaaacttgtatatacgtattcttaacaatctaaaagtaaagactaaaaaataaaccatgatgaaaaaaatctcaaaatcaaatctaaatttaaagttgaaaattcaaaatttagctgataagtataagtatataagcgaaaagatgaggccgctggtttattgaaacggacgggagccacagaattgcacaagaatatggggctcattgaagctggtgtaacacttgccctccttttctttttatcatgatcatgttttgtaatttcaattccaatttgcgttttgagatccttctaaaaatttcaggtgagatcattttgatgctctatagtaggtgtagtgcccttcaattattttgttccgttgtgttgttgaccaatctttttgtaataatcatatattttttcctgtttctaattccaatatgcgcatgagatatctgcaattttactcatttattgcttgtatgaaatgttgtgattctaatcattctctgtttatacgatcattattcaatttctgcaaacattatattaggacttccgtctatacagagagtagatagacatcgcagttttcttttcttttcttctctttttttttgagagaagacatcagtaagacagtaactgtcttaagttaggctgaaattcgtgggcctcatgtggtcgtttctcttcgggcccaacacgagcccaaaagcttcccatcttctcccagaagattagcggcgggggaggcggcggcgaccggcggcgacagggtggccggatttgcggtcccgtctccctctcctgggcttccgccaccacccgcgggcgcttctcctccaccgggaagcctgccgtcgcgcgacggcgactcccttcgactgttcgacgcaatgccagggcaggcctggtggagcggaggcggagccgcttcttcgctgcttgaggcgaggcgttcagggtgttcggcgaaatgctcgagagtcgcttgtccagtcctggtcggtggcgacttcggccgtcgaagatctcgtgggcggcgactgtgcttccgcttcgtgaggttagttgtgctgcattctcttcccactccaagctagggctagtagcatttgtgctggtgtggtattcacgtattccgcaactaatgatagtcgtatctactacatatacaatgcgttcatcggcaacaaacagctgacagttgacaacacatagtatcttcgcttgagtagaaatcattttgacttaatttctcagtgcaaaactcatggaacataacaacattctcgctgcttgttacttttgttgtcatgcgtgtacaacatgagcacggttagtgttccaataacaggaaaaataaaacacattacatgaactcttatctactactactaatatagtgaacggcaatgcctcaaaatgacattagtctgacataagctgtacagaatgaactaaaagaccaatcagaaatactagcactagtgagactagatcaactcagttcactgaaagtacaagattatttgtcatattattgtatctttaggtcaggccgtcagggtctatactgtgcagactggctactacttctatcatagtaggcctccgcaaaggatcacctttgacacacttgcaagcaatttcaaggacctttagcatttgctcttcacaccctgtgccttgaaatgttaaatccagcacctcaatctgctttccatttgataccatctcctgtacccatgggacaagttcctttgaggtagacagtatcggaactggcctcctcccagtgagaagctcaagcaggaccactccgaaactgtatacatcacctttcaatgtagcaacccatgcctgggcgtactcaggtgggatgtaaccaagagtgccaactagctcagttgtgacatgagttttgttgggaaggatcaaccgtgataatccaaaatctgcaatataagctttgaattctttgtcgagaaggatgttgctagatttgatgtcacggtggacaatacgaggcttgcagatattgtggatgtaagaaaggccatggcttgccccttttgctattttgagccgtcttggccaatctagaattgtgctggtatcatcatccttgttatgaagccaatcatccaggctgccattctccatgtaagaatatatgacgagc

SEQ ID NO: 2510 - DNA, 16178 bp, Oryza sativa
tttatgaaacgtttagactgccatgtgtcaaagttcttgtggttttgtgaaacttggaccattatagatgaggttttacaaaaattactccttttttaaaatcaaaatttaatcacagaataatttgctgaacgaaaaaataggtttggatacaaaacagtaaaaaaatggtaatctatggaggactgtgcaaaaaggaagtacacaaatattaattcttctgctactatgagcttctctgtgcacttcaaaagtttaagtgcatgatcatcatgtgctatcatattctgatttaattgagttctgttgtttgcagctcagtgcctatgatgtctaggcaggagactacctctcgtatagttggtctcattccaggattgtggttgacacactggcatgcaacttcaagtaccttcagcatctgctcttcatgtcctgtgcctcggagtgttggatccaggacctcaatctgctttcctttggatctcatctcctggacccactcgatgagttcttttgatgcagacaagactggaatgggtcgcctcccggtgagtagttcaagcaggacaaccccaaaactgtacatgtcacctctcagtgtagccatccacccttgcccatactctgggggaacgtaaccaagagtgccaactagttcagttgtgacatgggttttgttgggaaggatcaatcttgataacccaaaatctgcaacataagctttgaattctttgtcaagtagaatgttgctggacttgatgtcacggtggactatgtttggcttacaaacatcatggatataagcaaggccctggcttgccccttgtgcgatcttgagtcgcattggccaatcaagaaatgaactggcatcgttgtccctgttgtgaagccaatcgtccaggctaccattctccatgtaagaatatatgaggagcctcgagtttccctggatacagtaacccaagagtggcacaagattgtcatgttgtgccatggagagcgtttcaacctctgcactgaactccctttccatcaggcacatttcaccattgagcttctttatggcaagttttgagccatcaggtagctctgccctgtagactaatccataacctccgcatccaatgatgtgctccctgttaaaattatttgtagcttccataatgccagtgaatgtgatcttgtcttctgcttccttgccttgctgcaacattactaacaaatgctctgaactgatgttggatgataatgcttccgtgtaatcattgctgcacctatttttggtcctgaaactcataccactgatcgaccaaaggagataccctgacaacataagaatgacaatggctccaaagaagacaccaaaaacaattgcaagtatgaccttcttgttttgttgtttctttgagatcaaatgtccatcagctgaactgcaatggcgtacaagcataggaccacacagctttggattgccataaaagctagaatttgtgaatgtatcaagctgaccaccagttgggataggcccttctaggtcattgtatgagatgttgaattcggaaaggaagtttagattgttcagcgcagctgggattgtaccagttagattgttgcttgacaaatccagcacaagcagatctgtgaggttgcagatcgactgggggatatctccatataatttgttaaagctcaaattcagtgaaaggagcactttcaacagaccaatctctggggggatcaaaccggtgaattcatttttgcctagattgagcactttgggaaaagcactggccttgcggtattgaagtagtgatgcagatatatatatgggtaattgaaatgctctacggtccaactgtgctgcagccctgtctgaccttagcattggcatctgtaataaggacatcggaatttctcctgtcaggctgttatttgatatatctagatagaagaggaagtttaggctactgatccagtctggtattggtccagttagtcgattgttgtctaactctagcacctccaaccttgagagtttcgatagccatcgaggtatttttccagataatgagcattcacttagggatagaacctgaagattctcaaaaccatcaatactgccatcaggcattctttcattcatgaagttgtggccaataagaagggtggtgaggttgctggagctgcttaatatctgaagtgcatttgctatgtttgtaagacagtttcctgcgagtgacaggaaggagagggatttcagattgcctagtccctttgataactggccgtgcagcttattggaagatacccgcagagcagttaggttgctgcatgtgtatatgctttctggaatttcaccactgaagttgttccgcataagatctaaagtttttagattgggtaagttggagaaattgacatagatgagctctccactgaaattgttgttattgaggtcgatgattttcagacttgtgcagttactcaagtttgatggtatgctcccaaacattttgttgttgttcagatggagttcctccaatctgttgagctgacctatagactctgaaatgttaccactgaagttgttctctccgaggtcaagggtagccagcttactgagtttgacaacatttgcccattcaagtgtcccttgaaaatcattgtttggaaaagagaggcactctaacgaggtagcattgaagatttcatcagggatagtcccactaaggttgttgtggccagccttgaggactctgagcctggagcaacttccaaatccagggggaatgctcccacttaattggttataactgagttcaagcacagataagtatggcgagttggtgcagaaattagctggtatatgcccactaaagctgttgttactgacattgagtgcaaccatatttttcatcactacccatgtggatgatggaaactgtcctgctaacaaattacttgagatattcagtacctgcagtggccttgcaggtgttgaagatggcaactcgtcaagatctccatccaggcggttaaagctgacgtcaatggtgatgagactgctggaagacaacagttccttcggcagggcaccagacagcaggttgtgagacaagttgaggcgcagcaatccagggagattaccaagagacggtgagatgcgtccctggaggctcctagaggccagggaaacatcagtgaccgtgctatcttggctgcaggtgatcccatcccatttgcagcaatctgtaccatcctgccatgacgcagcgaggccgccatcttgagagagctccctgaggaacctgaggagggagctcctgtcctgctctgtacatgaactggtgagagaggcgaggttgatgagcagcaccagggcaagggcaagaacaggtatgggaaatttgttgctgtgtttcttgcacggagaatgaagtgggtgcatggttttcttgtgaatctagcatggaaacttgatgctgagtttgtatctaagtatcttcactgggaaaagcatcagatggttatatcaagaaagagcatcaggagtaagaaagagtgtctattggttccattttattttggccttctctgacttggggaatgcatcagatggtcatacctagaaggagcatcaggaggaagaaagaaacgtctataggttccagtttatttcagccttcttgtcattgtcatcacaaataaatgctggtcaatgatttgatgctatagtatatgggtactcattaagatttaggacctcacaaaaactgtcagtgcagttttgttcgtcgcactatggcgttccagtagcggctgccagttatactattggaaagtcaacttctcgacattggcggccgtaagtaattctctccgtagccatccttaatttttaaccttaatcacgttgacattgttacaacatgccttagtttacttgatcaggcatgacttctcttaccagcttcaccatggatctcttcggctcttcgctagctattattccggaccaaattttgacacaacgattgaactgaaggatgctgcatcacctttattcaacaggaaaatgcactgtatttgcgaaagaacaaaaataattgctgaagatttgtaagttggagagatagcactacatggaattaaagcgtcattccaagaagtgtatatgatttacagcaatcatcatgcatcggcgtcgcggtcatggtgtgtacaacaacaatgaacaactggtgagtggagggaccaaaactgctgctcccttcttcggcttgaatcttgaccgtttacttgctgactctgttgttatcaagcgtgcgctttggtttatttgctccacacgcttgcagttgttttccgctttccactagtatataatgtaggttttcgctcttatgcttatgcctatgtttatgaactaaaatttaaattttaaaattattcttatcttaaaattgattttgtggttttatttatcatggtttattttttttgtatcactaagaatataaaaattttaccattaaattatttttttctttgctaataaacgttacgaatagacgtaagataagcgaaacgatggatcacgagcataaaatcctaagcatgtgatggatgggtggatgactagttaactcagacgatcacttatgtccttttttgttttttgaaatgagattataaactgattcactgggctttgatctattgtcagataccttctctgcatcccgccgccgccgccgtggaggcgtggaggtgtgattatttattggagaatgggcgcggagcggtgaacggtcgccttaccgagcggtggccatctggtctcgtttcaacggttcggatcaagtcgcgcgtgcgagcgattatataatacttcgtccgttttataatgtaagactttctaacattatctacattcatatggatgttaattaatctagacagtatgaataatggtagaaaatcttacattatgaaacggagggagtagtaacattttgcacgtgagcccttagactactgtgcattcgtgcttaagggctccttaaggaatgagccctttagttttttaggaattttagagaaaaattagcatgaactcacacctcctggaagtctttgtatcactcttttctccaaatcctatagcgttttcatgtgaagcatccaaactatatgactagacaattcttgtgttctatgatttgacattatttaggatgagatggtattataccgtcctaattcctttgttttcctgttgcctgtgtttttgaattctgctttttaaagtcgttccgggtaggatcactaccaatagtagcgatctgtatgctgcttggatcaaggttacaggcaacctcatgatatttctacttagaccatgttttttttcttcaactctaaattttaattttctcgatttttgttagtacgtgttttaaaatgttaaataatgtgtgtatttgttaaaaaaaatatacagaagttgtttagaaattcaagtaaaactattttttttttaattttatgatagttaatatttaataaatcatgtactaaaacatttttctcgtttcgaatgctttgatttaatcattaataaagctctctctttcatgtaaaaaaaaaattcccagcagctacgaacaggccattaggaatttaggattccttggactttttttttttttttgctcttctttgagttgggccggaatacatgggcctcaactcctcaagtggtcgttcccatttaggcccaacacaatccacaggcattcgttcttcccccagaccggcggcgacaatgtccctctctgccgccgtcgctcctcaaatccctccggcgagtggcgtgctcgcggctccgtatcctgtcctggcttccgccaccacccccgcagcgctgcgagcttgctcctcccggcccgtgcctggcaactctgggggaagggtgggccgcttccctgtgtatcggcgcgctctcagggtgttcggcgaaatgctcgagtgtcttgccacgggcggcgggtgaccgtggccgtagaagagctcgtgcggttgagaatgtcgatcagggattggttggtgctgcgtgagttcgtgctgctccttcgagatggttagttgtgctgcattttctttccactccaatactccatgctagtgcctatcgtttgttctggtattttatctaggttacaaccaactttagtcatcatttctagaatgcgttgagcggaaacaaatggcgggcagcagctaaatcctaaatactctctccgtttcaaattacttgccgttctaggtttgtactaagtcaaacattttaatctttgaccatcagtttctatatattatatttttagattcatcataagacatactttcaaagatagatgtatttgacttaggaaaaaacatagagtgacaaataatttgaaacagatggagtatcttggtatcttcacttgaatggaaacaatttcgactctctcagtaaaaaactcaaggatcataaccatgttctcacttgtttgtactttttgtcatgcctgtacaacttgggtgtggatagtgtttcaagaaacagggaaaggaagagaatcacttaaaacactttttgatggaattaaacattcactaagcaaaaacaagtaacatcaatttgctgaaatgatattagtctgtcccaagctgtacataacaaactataagacaagtcagaagtactacttatagggaactacaaaattatctatcatgttttaaaaattttatatctttatttcagtgcctatactgtccagacaagtgacaacttccatgatagttggcctcttcaaaggattacagtcaacacacttgcaagcagtttcgagcacctttagcatttgcttttcgcaccctgtgcctcgaagtgttggatccaacacctcaatctgctttccctctgatctcatcttatgtacccatgggacaagttcctctgatgtagacaagattggaacagggcgcctccccgtgagaagctctagcaggaccactccgaaactatacatatcacctctcaatgtagcaacccatgattgcccatattcagggggaatgtaacccagagtgccaactagttcagttgtgacatgggttatgttgggaaggaccaaccttgacagcccaaaatctgcaatatacgatttgaattctttgtcaagtaatatattgctggacttgatatcacggtggacgatatgaggcttgcagacatcatggatgtaatgaaggccctgacttgctccctgtgcaatcttcagcctggttggccagtcgagaaatgagctggcatcatcatcccaattgtgaagccaatcgtctaaactaccattctccattaaggagtatatgaggagcctcagattgccctggatgcagtaaccccagaagggcacgagattggcatgctgtgccatggatagtgcatcaacctctgcactgaattccctttctgttagacacatttcactattgagcttcttgatagcgatcttggaaccatctggtaactcagctttgtagactagcccatagcctccacacccaatgatatgcgccttgtcgaagttatttgtagctttcacaatgtcagcaaatgtgaggttgatttcttctccctttcctcgtgtaatcattatcaatgaatgctctgaatcagagttgaatgaagctgcttctaaatcaccatcgttgtcactactatttttggttatgaagcgtttgctcctttctgagacaaagaaacaccctagcaacaaaagaatgcaaatccctccaaagaagacaccaaatgatattgcgagaacgatttttttattctgttcttttctggacactgaacttgcttctgctgaactgcagtggtgattgaacctagagtcacaaagctttgggtttccttcgaagcttgagtttgagaatgtatcaaattggcctccagttggaataggcccctctaggtcattgttggaaatattgaatgctgagaggaagttcagattgcttagtccaggagggatttcacctgtgagatggttattggacaaatgtagaacctggaggcttgtgaggttgcaaattgattgtgggatctgcccagataagttgttgaagctgaaatcaagcacaacaagcacttccaactgaccaatcattggggaaatcacacctatgaagttgttatggctcagattcaacaacgtagggaagccagtaagcgtgcggtattgaaatgatggcccgttataaacaggaagctcaaaagcccctgggtccaaatgggctatgtctgatgttgatcttagcattggcaaattcatcaaggtgatcggaatttcttctgtaagtctgttgtctgatacatctatatagaacaggtggtttaaggaatcaatccatcttggtattggtcctgtgagttgattgccatttaaaagtagcatctccagattcgtgagcctggataaccatagaggtattttcccagacaacaagcaactgtttatgtcaagaacttgaagattcccaaaaccatcaatactttcgtcctgtggcatgacctctcctctaaagttgtgcccaataagcagggtggtaatggtgctgcaacttttaaggatctgaagtgcttttgtgatgttagtaagcttgttgtcatcaagtgagaagaaggaaagatacttcagattgattattcccggtgacaactctccatggaaatggttgcctgataaccgtagggctgtcaaattgctgcatgaatagatgctttctggaattgtgccggtgaagttgttgaagtaaagatctaaagtttttagattgtgtagagcggagaaattgactttgccaagatctccactgaagttattgtgcttgagatcaatgattgagagatttgtgcagctgcccagagttccgggcaactcgccagacatcatgttgctgtccaaatgtaactcctccaatctcttcagttggctgatagaatctggaatcttgccaatgaactgattccctcccagatcaagagttactagatttctcagttttgctatctgtgtaccatcaatttccccatgcaaattattgttaggaaaagataggtactccaatgagacatcattgaagagttcacctgggagtgtcccactgagcttgttgtgaccagccttcagaactttgagcatggagcaattaccaagtcctgaggggatgctgccactgaattgattgtaacatagttcaagcacagataaatttgatgagctgtcacaaaaacgagtcggtatcttcccagtaaacttattactgctgacattgagggcgaccagatttttcatcacatcccatatgaagatggaaactgccctgtaaataaattacttgagatgttgagtacctgcagtggcctgataggggttgaagatggcaactcgttgagacctccattcagcctgttaaagctgacgtcaacgatgatgatagtgctggaagacaccaattcttgtggtaaggcaccagatagcatgttgtgggagagattgagacgcagcaatccagtgaggttgccaagagacggtgagatgttcccctgaaggttcctagaagccagagaaacatcagttaccgtcccatcttggctgcaggcgatcccgtcccatttgcagcaatctgtgccgtcctgccatgatgcagagaggcctccatcctgagagagctccctgatgaacttgaggagggagctcctgtcctgctctgtacatgaactggtgagagaggcgaggttgatgagcagcaccagcgcaagggcaagaacaggtatgggaaatttgttgctgtgtttcttgtaatgaagtagctgcatggttttctggtgaaactaacatgaaaaacctgatgctgagctttgttcctgactggataggactaatcaatgaagagcatcaggaggaagagagaagctgcccttgcttccattttattctggtatactagtcgtaatcataaaaaagaaatacatgtcaaagattaggtgatatagcctatggatattcattaggacttttacagatactgccacaatatcttcttggcaaaatatggttatatagcatccagtttcgcctgtcttcttcggtatgacgtctcactagcgagtactattgaaacatcaagtggccgacctccctgatcgtgcaagttatttccttttgtttggaccattttttattttaatcgttgtcacattgacattgttacaacatggattaattgactccatctgacatcacttctcttaccagctgcacccctgaagccatgaaagacctgttagcttgccagttgccactgatgcgtacaaatttgttcatccttgagaagatcaaggagaaacgcccagggatcttccgactagttccacaaggtggtgggctagccggcgttggttcgaaatctcaccccttctatttatttgatattaggttcttccctaatattcacgtttttcttctgtgagaagatcaagaaacacagctggtgaagatttgtaagatcagctttgcaggtggtacatgggaagcatcattcggagagttgcatataatctagagcaatcatcggcgtcgcggtcgtggtgcggcacatgctctggacaccaacaaacacagctgattggttggtaatctggtgactatctcgtctctattattattgttgttgttgttgttgagacgatcacgcaagggccaaggcgtttactttctgctgtcaagcgtgcgcgttggttggcttatttgctccacacgttcagctgttatccatccttcaggcttcgccgttgtatgactgttgacccatggaggcatggactattatgacgctttgtggttgtggatgccatctgaattttggaagcatatcccctgtggatgccatctggctgatcacttgcatagttgcatcgggatttaggacaccacaggggatactggttgatcacacataatcatcttatgtattcttccgttctaaaataacttaaccgataatagaatatgacataacttagtacaataaatctataaacggattacgcaccaacaggctaacccttatgggcctacacgtcagaggtaagtagaagagcctcatcggtgtagacatggttgaatgtagagtactcttgaatgtacttcctggacctggagctacacaagccttagtttaattgaaccgttgtgtaaaaattgtattttttttaagtcatggtcatatatttctttttctgtttctaattccagtttgcgtacgaggtatttgcaaatttactcatttatggtgtatatatgaagtgtaattccaatcgttctatgcgcaaaggttatactatactatcccttaccatctctgtttatatgatcataattcaatttctgctgttctctaacaaacgacggcatgtagggaaaaaaaaacaattctaattggttagacttcggctgaaatccgtagaaaaatgaacgaggtattacaattttttttttgtggtttaaaagccaagaccgaaaagaatagactaccatataaaaaccctaaaatcaactaaccataccaaatatagtttagggtattgtgaacttttttttttttagaattgtattgttaacttcttttttttttgacacggataactttagtttccattaaccagcagcctcggacaaatcgccggagaggcggagaccaaactagttacaaactccggggcttggctccagtaacaagttgagccaggggccacggtaacagctccataggaggccattcgatcggccaccttgttacagattctagggcaaacagatatcaaaagaagtgattaacagggccctaatgattttgaacaaagctccatctgcactccgatccatctcctgggaagaaattgtattgtgaacttagagtaagtttaatagtatagccaactactagctccaattcatctataaccaatctaatagctcattcatacaatagttacatactacactattaatatctagtctcacctatcatacacacactgcgtcttggagtccgtgctataaatctgtagcccgctgcgcttctctctccttatttatctgcttaaaatatgtttgtagctggcttatagcctgctattgtaactgctcttattcctaaattttaactacgactgataagccaacgatgaaattaagttgggctggaatacatgggcctcgtgtggtcgtttctctccgggcccaacacgagcccgaaagcttcgatacttctcccagactagcggcggggaggcgaccggcggcgacaggtggccggctgcccgcggcgccgcggatttgccgtttgctcctcctccgggaccgtgtcaccgggcagcatgacgccgcgcgacggcgacgcggcgacgcccttcgactgttcgacgcaatgccagggggaggggttggggttggtctggtggaagtggaacggagccgctttgctgtgaggcgccttgctcagggtgttcggcgaaatgcccgagaggctgtccagttccggtcgggcgccgactgcggccgtcgaagatctcgtggaggtgggctcgtcgaccaggcgactgaggggccatgcttcgtgagtgcgtgccgacaatgccgcgctctcttcacgcgcgccagtgcgcctccttcgacatggtcagttgtgctgccttctctttcagctccatgctagtccctagcatttgtgctggtattttatcaacgcatttcacaaccaacttagcaaaatatcttggttagcagaatttcacaaccaacatggttagtagtgctgacctagttaattttttcaataacacattgatgatcggaaacaaactgcttatagcagaatatcttggtatctttctaacctttttgacgttgtttctacctttttgtcatgcctgtacaacttgagcataaatagtgtttcaacaaacaagtgaaggatcaaagcaagacgaattctttcagcactcaatgccctgaaatgatagtagtctgtcacaagccgcggagaacgaactataagacaagtcagtcagaagtactaattctagtgaaattacataaactcctgttgggtgaaagtacaaaattatctatcattgatgttatgtgtttcggtcagcgtctatactgtccagactagcaactacttccatgatagttggcctcatcaaaggattatagttgacacacttgcaggcagtttcaagcacctttagcatttgctcatcataccccatgcctcgaactgttggatccaggacctcgatctgttttcccactgatctcatctcctgtacccacgggacaagttcctttgatgtagacagtaaaggaacaggccgtcttcccgtgagaagctcaagcaggaccactccgaaactgtatatgtcgcctctcaatgtagcaatccatgattgcccatactcaggggggatgtaacccagggtgccaactagctcagttgtgacatgagttttgctaggaaggatcaaccttgatagtccaaaatctgcaatataagctttgaattctttgtcgagcaggatgttgctggatttgatgtcacgatggacaatatgaggcttgcatacatcatggatgtaagaaatacctaggcttgctccttgagcaatcttgagcctggttggccaatcaagaaatgagctagcatcatcatccctgttgtgaagccaatcgtctaagctgccattctccatgtaagaatatataagcagcctcgagtttccatgtatacagtaaccccagagtggcacaagattgtcatgctgcgccatggtgagtgcttcaatctctgcagtgaattccctttccatcaggcacatttcactattgagcttcttgatagctaacttggagccatcaggtagctcagccttgtagactaatccataacctccacaacctatgatgttctccttatcgaagttatttgtagtcttcatgatgtctgcaaacgtaagcttgttattgtctcccttgccttgtggcatcaccatcaatgaatggtctgaatttggattgaatgaggctgtttcttcatttctgttgttagctaattccccttttctcatcaactttgtagccctgagtgacacgaggagactactcagggataaaagaatgataatgcctccaacagacacgctgagtgtgattgctaaaataactttctttttgtgttgttttctggacactgaaggtgctcttgatgaatcacagctgcggaagatatttgagccacacagctttgagtttccaacaaagctagaattttgaaatgtactaaactgacctccagttggaatagacccttccagatcattgttagaaacattgagcttagaaaggaaatgcagattgttcagtgcagatgggattgtacctatgagatggttattggataagtcgagcacctgcagatccgtaaggttgcaaagcggttgtgggatctctcctgaaatactattgaagctgatattgagtgtccggagcatttttagttggccaatctcttgtgggattgcacccatgagatggttcctggctagatttaatgttgctgggaaagcacgaaatccacggtattcaagtgatggtcctgtataaataggaagctgcaggatccctgggtcaaaatatggtgtagaatttgctgatatgagccttggtatctccatcaaagctgttgggatcccccctgtcaagctattgtttgatatatcaagatagaagaggaagtttagtctgttaatccaggcaggtatttgtccagtgagttgattgttagataaatctaacatctgcaaattagtgagttttgataaccaaaatggtatgttcccaatcaatgaacagtcatcaattgatacaaattgcagattctcaaagccatcaattgtttcatcctctggcataagctcaccattgaagttcactcccataagcaaagtgctgaggctcctggagttcttgagtatctgaagtgtatcagtgatattcgtaagagaattgttggaaattgaaaggaaggagagggacttcagattgcctattccctttggcagctggccatggaatttattggaagacatccgcaatgcaattagattgctgcatgaatagatgttttgcggaattgttccattgaagttgttaagcagaagatctaaagtttgtaaattgggtagggtggagaaattgatcttggagagctctccactgaagctgttgctcttgatatctatggttttgagatttgtgcagttgctcagagtcgatggcacctctccatacatgttgttgtggcccaaaaggagttcctctaatttcttgagttcacctatagattctggaatcctgccattgaaattgttccctccaagatcaagtgtaaccagattacttagtttcatgatatgcgcactatcgagtgttccatttaaaccattgttgggaacagacaggtgctccaaggaggtggcattgaagagttcatcagggagagtcccactgagattgttttgaccaaccttgagcacatttagcctggaacaagctccaatccccgggggtatgcctccactgaacaggttgtaacaaaggtcaagcaccattaaggatggcgagctcgagcagaaatgatccgatatctgcccagtaaatctgttgttgctggcattcagtgcaaccaggttcttcatggccttccatgtggtggatggaaactgtcctgtaaacgagttgctcgagatgttcagtacctgcagaggccgaacagcggtcatcggagatagcgggtcttgcagctcccctctgagtcggttaaaactgacgtcgaggacactgatactgctggaagaaaccaattcccatggtaggtaaccggacagcgagttgtgcgataggttgaggcgtagcaggctagtaaggtttccaagagatggtgagatgtgcccttcaaggccctttgattgcaaggagatatcagtgacc

SEQ ID NO: 2511 - DNA, 8286 bp, Oryza sativa
  unsure (1)..(8286): unsure at all n locations
atgtgaggaacgccaaatatcatgacactgtgaatggcctcatgccctcatagtatctctgggagtatctttggctcactggacgatgggcccaggactggttatctgcttcgatgctcacccgtgcagaattgcacacgtgttgctcccaaaaattggagtcatctccctcagctccggagacggcgaccggcgagcggcggcggcgtcatggtccctcttccgagcagcagtacggacatcgccggacaaccgagggtaaggtcagtttactcactctccgcgcgttcgcctctctgttcgttcgtcatgtgaggatttcgcttgctttaatgcgctgcgggtgtgggggtctagggtgtttctttagggttcgtggtgggtggggggcgatgcttgttgcaaacatgctcctccgattgatattcgtcgcaaaacgttgaacgattagactattagaggttgtcgttgcaaacgggagtgggtgaaatggttcctgccctaacattatgccctaaaaagtgatgatgaattttggtgtctcgattcatacccctgttagcctttgtttatgcgcattcttgtttcggtatttataccctggcattctggtgaaaattgtgatgcatccttctaatcctctattgccacagtttcctttttttttttctttgcacccaatcaaggaagaagcgtctactttttacaccgtcaaattgccgagtttgcgtggtacctttgggagagggcatttgtgcccctggcccgtgcaatttacgaacatgttattctgcaatttgattcatatttgaggagttattttttgaataataaatgggatcctgaaaactaacccacctcgaattcaaatttattcgagatacgcaaagaacattctgaggatggatgatgtgtgttcataacctcttaggactttttttttcatcatggtatacattttaccctgataaagggagaaatgaatctgtcaaaaagctgtacaaaggattagactggagtagtcattcttgcaaattacatgtactatgtgcactggtatacaagataatcctgtataactgcatcctatcttaagttttgactgaattttgcatctgcagtttggcgtctatactgtccaagcaggagactacttcctttatagtcggcctcatgcagggattacagttgacacacttgcaagcagtttctagcaccttcagcatttgctcgtcatatcctgtccctcgcagtattggatccaggacctcaatctgattcccttctgatttcatctcctgtacccacttgacaagttctttggatgaagacaagatatggacaggtcgtcttcctgtgagcagctcaagcaggacaactccaaagctgtaaatatcgcctttcaaagtagcaacccatccttgtccatattcaggtgggatgtagcccagagtaccaactagctccgtagtgacatgtgttttgttggcaaggattaatcttgctagcccgaaatcagcaacataagctttaaattctttgtcaagtaggatattgctggacttgatatcacggtggatgatatgtggcttgcaggcatcatggatataagaaagtccccggcctgctccttgggcaatttgagccgcttcggccagtcaagaaatgtactcgcatcatcgtccctgttgtgaagccagtcgtctaggctcccattctccatataagaatatataaggagccttgaatttccctgtatgcagtaaccccacagtggtacaagattgtcatgctgtgccatagaaagtgcttcaacctctgcagtgaattctctttccatcaggcacatctcaccaaaaagcttcttgatggccagcttggtgccatcaggtaaatcggccttgtatactagcccgtagcctccacacccaatgatattctccttgtcgaagttatttgtagccttcacaatgtcagcaaaggtgagcttgtttttacctcccttgttttgtgatactataactaatgattgctctgaatcagacttgtgcgaagttgcgtctacatctgcattctcgctactcctgttgttggttatacaatctgtaccctttacagtggcaagaagatatgccagaaatagaagaacagcaattcctccaaagaagacaccgaatgcagttgcaaaaatggctttcttgttgtgactttttgtggaaatggatgctgcttgttctgaacgacaactgcgatgaagaatatggccacataactttgggttcttgtaaaagctagaatttgtgaatgtactaaactgggctccatttggaataggcccttcaagatcattacaagaaacattaaatgtagaaaggaagtgcaggttgttcaatgctgatgggattgcacctgtgagatggttgctagacaagtctagcacctgcaaatttgtcaggttgccgagctgctgtggaatttctcctgataaatcttcgaacttaaactgagatgtcgagtgatttcaactgaccgatgtcttgagggatcacaccactgaagttattattgcttagattcagcacttttgggaaagcactggttatccggtattgaaagcccgctgcagatctatatataggtagctcaaatacccttggatccaaacgggtggtattcttctttgttattagcattggcatctccattaaagaagctggaatcccccctataaggctgttatttgataggtctagatggaacagtgactctagtcttttgatccaaggaggtatagatccactgagtcgattatctagcaaaaataacatctccaacttttctagcttcgacagccataaaggtatatttccagacaatgagcaattagctatggaaagaaccttaaggttctgaaaaccatcaattgagttatcttctggcatggcttcgccatagaagttggtcccgataagaagggtggtgaggttcctagaatccttgaggatccatagcatgtttgtgatatttgtcaagttgttgcaaccaaccgataagaaagtaagggacttcaaattacttatttttggcgaaagctgaccttgtaaattgttactagataaccgaagtgcgaccagattggtgcaagagtaaatgctttctggaactgtaccttcaaatttgttgcccatgagatctaaagtttttagattggacaggttggagaagttcacattgctaagattgccgctgaagttgtttctcttgaggttaatcgttatgagatgtgtgcagttgctcagggctgatggaagctccccagatatgttattatcacccaaatggagatcttgcagccttttgagctggcctatagagtctggaatccatccggtaatgttattcccctcaagatcaagagttgacagatttctgaggttcactatgagtgtaccattaattactccattcaactcattatttgggaaagagaggtactccaatgaggtagcgttgaagagatcacccgggagattcccgctgaggttattgtgaccaactttgagcactctgagcttcaagcagttaccaaaaccaggggggatgctgccactaagatgattataacagagtgcaagcgctgtaagggatgctgagctgctgcagaaattactcggtatgtgtcccgtgaagctgttgttgctggcattcagcataaccagattcttcatcatctcccatgtggcagatggaaactgtcctgtaaacgagttgctcgagatgttcagtacctggagaggccggaccggggtggaagacggcagctcatgtatctctcccttgaggtggttgaagctgatgtcaaggacggtgatgctgctggacgccatcaactccagcggcaagccaccggacagcgagttgtgggacaggttgaggcgcagcaggccggtgaggttgccaagggacggcgagatacgcccctcaaggcccttggaagccagcgagacatcggtgaccgtcccatctgcactgcaggtgaccccttcccatttgcagcagtctgcggcattccgccatgacaccgcgagaccgccatcgttggagaggccagagaggaactggaggagggagctcctctcctgctctgtgcatgagctggtgggagagccagagagagcaatagcagcagcgcaaaggcaagattgaacctaaggaaatctatgaaacatctattgctgcacttcttgcatgaggaatggagttgctgctgcttctgcatggcctccaagcaaatggtgcctacgcctgattctgattggatgtgcaaatgaaatggacctgatgatgctttgaggaagaggaggaagaagaaaacaaagcaagctgcttatgttgcagtcgtattcacaatatagaaaggaggattgggtcaagaataaggtgtagtggccacacatccacactgttgatgatgtgcacaattgccagtaagccactgcaggtgcagcttcctggttcacaccatataccagcacgtttcagttggagctgcctgccacaaaattttattaaaaatgtccaagtgcccaacctttttgtacaaaaaattgttgtctgcttttgcaatttgcatcctccctcgattatgtgattgttcaattggtattaaacaattgttttggtttacatgatgatatgagatgatattatatagtatgacatgtgttctgttcaccaactttacaatgacatcttttcagatactgcagtatgaagtggtaattgtttgtgctactgttgtcagtgttggtcattcccactcccactcacttggttctctgtggcctctgctccacttataaattattagcattggctaattgattcgctgtctctgtctgttctttttttatcccagaacaaatcggccgttgctaaaatttaaatattagataaatcttaggctatttttaatgtagttttttttttcaacattaacttttaagtcagtaaggatacatatataaaatgttttattcacattacttgttagtcgctaataaatcgtttggtatttaggtagttcttggtcaaccgatggggcattatggattgtgtaagttgattataatcgtgtcatttagagacgccaaagctatagctagtcttttttccacgcaagaaagggggtacagctagtttttgaccaatcatttattaacgattccatcctgcgtctggagagctcttgtcctatatgtacatgaattgtttgttggtcagagagataactctagaagttcagattgctgcgtttcaacaaaaatgttcagaatttcaggttgccaagtcatgataacatgtggccacggaaatggttggacaaattgctgcagtagagtcaaattgctgtacatgagttctttttaacgaaaattgctatacatgagtagatatgcattatgggactatgccactgaaagtctgaaatagttcatgtaaacatccaaaatttttagattgggcaatttgaagaagctggccttgcctcatctccgctgaaatgacaaacaccacagttaaatttatgcaatggatgggttaattgactcaacggttactcccacagtttcagtaagaacgtaggatgttttgattttgttttaaattaaacttatttaaatttaactcagtttataaaagaataaagccaaacaattactacctccatttcatattataagtcgttgtgaccatttccttgtcaaagtttgaccaatattataaaaaaatattgcagcatttccaatacaaaattaatctattatcaaaatatatccaatgttatatttaatgaaactattttaacattatagatgttgttatatttttctataaatttgatgaaacataaaaaaatttgacttagaaaaaagtaaaacaatttacaatatgaaacaaaagggtatatcataaaaatgtattcaaggttaataaaattaatttggcattctagatattactatatttttttcataaacttaattaaatttaatttttttccaggtgtcgaggatcgtctcgtttggcgttggacatctaaccagcgctactcagcgcatttggcataccaggctttcttccatggccaacattcctttgcctgtggtgatcttctctagcacgcaaagggttgctaaatgcaggttcttcttttggtttgctttccagcagcgctgctggacggctgatctcctccagaagtgtggcattgatagtcactcagcctgccctttttgcgctcaggatcttgagacggcgaaccacatcctcctcgactgtgtgtttgctcggcaggtctggctccatgtgctgtcgcctcctggctgggctgccctctctccccccctgtggcagctggttccaggactggtggtcgtcctccagggcctgcttacctgagcatctccggcgctgcttcgactccctggtgctcctggtctcttggcagctatggaaggaacgaaactctagggttttcaactctgcgctctcttcggtctcagtggttctggagtccatccacccagagggctatctgtggtctttagctagcgttgccgcttttggggacttgttgggagtgtagagtggctcgaccccttcctgctgcttggagtttgtatttagccgccgtagttttaagctccaacttcttttttgcttttttccccttccctctacataagccggtctggctgattgcgtcgtgtaactataactcttttcttctaatatattgacgtgcagtctttttgcgcgttcgcaaaaaatttaaaattttttacttgggacaaaacccaaaatagaggaagtagattaatacagagcaatcaattgtcacgcacgacgcaccctaagccccactattttaaccgtccgatcgtccgtgtacggtttggatcaaacggtcgcgggagattcatgggaaaatttacgtggaagccctcgaagttctctccattactacttctgtccctttttatgcccttactgagttgggccggaatacatgggcctcctccagtagtcgaggtggtcgtttccatttgggcccaacacgagacaatcttttcgttcttctcacagactagcggcggccggcgggggaggtcaccgcggccgccgccggcgacggcggcggctgcgggattgctcctcccggaccgctgccgcgcgcccgcgatgcccttgaactgttctacgacaatgccagggctggcctggtcagagtggaggcgcttcccttccctgtgaggtggcgcactcagggtgttcggcgaaatgctcgagtaacttgtaccgggcggcagcgagcgtggccataggcgccggaggatgacgccgcgtgtgtgcgttccgcaatgccacgctctcttcacgcgcgcgagtcaacctccttcgagatggttagtcgttctgcattctcttcccactccatactagtgcctagcatttgtgctggtcttttatccacgcatttcacagcactgcnnaaatctgtaatcgtatctatacgtctgacaatacctagtatcttcacttgaatgggaaccattttgatttttgcattgaaaaactcaaggaacataacaatttcctcacttgtttcgaccttttttcatgcctgtgcaacctgagaatgaacaatgtttaataaacagggaaaggaagacgcattacatacccactttctaatgtaaaaacaagtacagtaaaaaagggaaatgcctcaaaatcacactagcctgtcacacgctgtacagaacgaactataagatcaatcaaattctagttctagtgaaaccagatcaactctgttcacttaaagtacaagattatctatcatattattgcatctttaggtcagggtctatactgtccagactggctactacttccatcatagttggcctcatcaaaggattaccatcaacgcacttgcaagcagtttcaaggacctttagcatttgctcttcacaccctgtgccttgaagtgttgaatccagcacctcaatctgctttccctctgatatcatctcctgtacccatgggacaagttcctttgaagtagatagtattggaactggcctcctcccagtgagaagctcaagcaggaccactccgaaactgtacacgtcacctttcaatgtagcaacccatgcttgcccatactcaggggggatgtaaccgagagtgccgactagctcggttgtgacatgagtt

SEQ ID NO: 2512 - DNA, 2666 bp, Oryza sativa
ttcctgcagcccacatgacaaacaacatcattcagaaaaagaaaaggagcacatgttttgaagcagtcatcgatgtcaagatccacatgtgtacgggcatggaaagaacggattaatggaggaaatatttcccagggctctctcgttgaccctgaggcgtttacttttcttgccgttgtcagcatcaaagctttggttttggttaacatctaagttgcaaatggcaattggtttacgatggttttggcctttggactgcgactcttgaagtctagattagcagcaatgctggaccagactgcagcatcattagaggggctgagaatcgattagtcaggttaatggcagtgttcatgtgatcattagctggtatttcagtaaccagcaaaaagattgcttgcatttgtcttttcctttggcagataaggagtacttctgatgttgatagaatatgctgtttctatggctatgataatgtctgtcaaatacaaatgcagaagggcacaagtggctatcattaaaaatcaaagttacaaggagttaaaaataagtttcaggaaaatgaaggcggcagcaagaattgaccgtactcttttcatttttatctagtacttcctccgttttataatgtaagggtttctaacattaaccacattcgtatagatgttaatgaatctaaacacatatatttatatgaatgtgggtaatactagaaagtattacattatgaaacggagggagtgtaaattttgtctgtaactatcagtatgttcttttgccgggtcggccgaacgaggcagaccaaatttcattatggtaaaggagaatgtaaagaactataagcatattccagcatgtcaggtaatgaccaaacaagaaaatgcttgtatggaagatattatatcagcttttggtccgtcactttcacagatcggtttagatacacagtcccatcactatgtgttaagttctctcttttctctaagaaaatgtgccaatatggctgtgtgcatccgttttgaatgtagatccgagttttaattcattttttaaaaaaataaatgtctggacagcatgatagcaaaatcgaaaagaaaacgagacaataaaaattaaaggaaaaggctaatgggctcacaattcctggccaactttattgttacagttgattagtcgatcgtaaaatagaaaacataattagcatatagggcttagtgccataccaaaacattagtaatcaatactttgggctctgatagctgcagtcagcaaaccaagcctcctgttgcaactacagaaaattagcgcgcgttaggttggttggctgcagttgcactgctacagccaacaataccgatcaacctcttggtagggtaaaattcttagtaatgtgtttggattgataccaattaagagtcaaattttatgttatggtgaagaaagttttataactataccaaattaagcatgtgcattactatctattcggcttcaaaccaaaccatcatatttactattcaaactaacaaaatattggcatcgcacattttggcatcatccaaagtggcccataattagttgaatattaactgttaaaaaataaaaaaagttttatttaataatttaagtaaattatatatataaattttatttttaacaaaacatatcttttaacaatttttaaaaaaacttgctaatgcgttttagaagttagaacagaccctagtataatttttatccactcaagtcattcaaagtacggtgatatgagtgggacctactacaagtaacttgcactgtgaagcatgtagctcagtgtgtgtgtatatatatatatatgaaaatgattctatacacataggagtacgtacacctgctcccatctaccgtccatcgtagcaagccccgataaagcccggatgcaccgaacggatccgttttcatttttaacgagaaaaaaaatccgtaatctcaattaacccgtggtaatcggaaaaccggatcgataaataccagctcattgggtgatctcgataaatcagttatcagtggagagctcgatattcggaggggttggcagcgatgcgacgagggcaggatacatcgttgatttggtgtccacggcgagtcggaagcgacggcgtgatccagagtatcataatatatatatatagggaatctaaagcattaaatatttttccttataaaaggaatcataataaggacttgaaattggtggaaatgagcaagtagtactttcttcggattccgatccagagtatgttcccattcacttgttaagaaaatggctatcaagaacgaattaaccctttattccttttttctttttacatacccctcgggcaaagaagaataggacaaaaaaaatatggaatgcaataaaaaaaagatctttatttattctttccgtagtttatccatattcatacaaaattcttcatgaactaatacccaactcttttcgtttattaattgttataacgagtgttttattccaagattaagttattgctgaacaaagaaaaagtaccattatattataaaggatgagatgaattccgaagcgttttttatcattctagcagacagaattcctttggtctaatttaggacgttatatatatatatatatatatatatatata

SEQ ID NO: 2513 - DNA, 5099 bp, Oryza sativa
gctctctagaacatcaaggtttccaagacccttaactgctgagagcgcaaacgcaaaattggactggttggtaccagtccttcacggtgcatcttacagaagatgtcccaacccttcctatggctctcgattcgaccgtacccagaaatcattactgtccacgaaaccaaattgcgctctggcattttctcaaacagattccttgcatccaccatctgtagactgtggcaatacccagtaagcatcgagttccatgatgagacatctctgctcggcattgcatcgaacagccttcgtgccatagtgatatccccgttctggacatagcagctgatcatggcgttccacgccacggtgttccgctcgagcattccatcgaacaccctgcgagcctcgagcacgcggccgaggcggccgtagcccgacaggaggatggcgcccgtgcgcatgttcccgccggagatggcgtcgtagaggtccctcgcggcgtcgggcatcccgttgtggcagtaggcagagatcatggagttccaggcgatgatgtcccggcgcggcatcgcgtcgaacacctccctggcctcccccacgcggccgaggcggccgagatcgcggatgcgggcgctgcatccgctcacttcaagctccccgtgggcgtgcctcacggcgaaccgcgccgccgccgacgaggcggccgcggctgagaggcagcggcggagaagcaggcggcaagccattcgcgcgccaccaactgtaggagagagagagagagagagagagagagagagagagtggtggagactgtctctgggggggcacccgcgcctccgagccggagaagccgctggagctcagccccgcgccgccatcgcccctgctccggatcgccggagatggtggtggtaaaagcgtgaattttcttttttttttcgttgctcgtcttggaaaaatcgtactgaggcctacttcgggccgggctgagatttcagcccatttatggatatgggccggataaatttcaggcccatttaagagaatgactatgacatgggctattgggctgggccgagatggaggcaccgacgtctcttggcagacgctgtaactaatgacctggtttggagttactgatgcaacaaggagaaatggaacagatctttcagaacgaagaaatgggtttctatgaaattcctgtaaaatattttaatttatattgctcccaccattctatattacaagatgctttaggtttgtcttaagttatttcattagtattgactaaatttatagaaacaacactaaattaattttattaaatcattagtgaatacatttttataatgtatttgttttgtattgagaatgatgctatttttttctacaatcttatcaaaagtttaacttaaaaaaacaactttgtgtaatataaaagagggagtacgaatcttaaggatttttagcaattacatagaaaacgttttataatttgtttttttaccggctagaggattttacgttccctcctccaaaaatatttttaaggtgcgaggagtagggacggataaaaaaaaaaccattatagggaatcatcttcttcttcctctcgagtcatttctcctcttcctctctttgtttttcgcctctcttcttttatcaatgtgatccagcagggtagcttccccattagcacccacgttaaaccaatcccaccggaggattttgttcgatattaaatatgagcctatgcaaagaaaaatccagagtatgtaagcagcacatttaagtaatatctttgttaaactatttctaaggttttgatcagatctgccacctcaattgataaatatcaatcagtaattgtgttctggattcgtatatatgttcctttttcttgctctgaaccgtctatttaatgattgtatggcattgtgcatgcagtactattaagcatacaaagaggattaattagaggtgtctcttctttatgatcttgctaatgacatactagtactccataatcaaattaacatcaaatcttggagtaatctcctttccaatccattccttgcacgcaacaggcaacattaaatttacaaacatgcaattaatcagttgcatgatactactagtgatgttaacaattatgtttcgcatttgccatctcctaatctgaatctaacaacatcctatatacttaaccagaaaaatccttcactttcctatatgaactgtcagaaagaaaatctttatctgcacacccaaaaaaaaaacaattttctaccgcatacaattaggcatgcttgacacgtgtgtgcacgcgtgcgtgttcgagaaacgtgtaagctcgatctctctgggttgggttgattgatcggtggacgtgtaccaaccttggcatggtctgaaattaaattagtaaatgattaattgatgaaatcagtttaaatctttaattatttgtgattcaagacaacacgtcggcacgtacactgccggtgccagccaaacgatgatggtgatctcctatctttatgaggtgtgcagtttttaaaacagaaccacacaaatataattgaatctggatgagaaaggctagtttaactaatcaattgataagccaaaataattaatatttttaatacattgggaatcataattaaaataatatgagaggaagcactgtgtgtacatattttattataattataattcatgaacaactgaaatggaaaatagaaacaagaaattagaactaaacaaggaaaaatcctttttgatttttgctctttccttccgttgattcctgagaaaattaaaaaaaatggttggaagagctaatcatgcactcgcaattaatggcgcaaggcttacatgcatgggtcaaaactcaaaacaccccggccccatgcgtgtgtcacgtgacaactatgaatgcacattttgtcaacttaaaaaacgtgcatttatacattttgttaattgctcacatgagtgcagtaaactaactgtaatttaaatttacttatgtaggaacacattttcttttcacaaaattactaaatgttgatttaagctgcatcaggttaattggatggacaccaaactgaatctaacccgaggaccatcctttccgtttagcttatcaaccgcagttaaaatttaaattttaaaacttaattttaattttgatttaaaggttttttttatctaagtttattttgtagcattggtttttaaatcactaatgattgctcataaattattttttaataagccaaaggattaaactgcacatgattttacttttttcaaaatgcagagaagcattagatagctactaaactagactgaaaaaaattcaccacttgtgaagatcatatcgcagtagatgcaataaacaacccgtctgttaagcttttgcttagccttgcaataatcaagccctctttatttacgtttaggcttattgatctagacttttaagttagcttattggcttatataatttataagccagtgaatttaatgttctaagtttagtggtggagtcatacatctatcttatacaagccaaaaaaaacttctccaacctaacttttggcttaatagtgttagagtggcttatggtttcaaaaaagccaaataaaaaagctgattgttttgttttggcttagactttttgacttataagttgcttataagcctaaacaaacagtgcctcaatctgctgtgctgacatattttttactctttccacacaagccaaccgtccttttttaattaactttccttttctttacctttttttattctttgtctttatggcacattacaatttaactgaaagaaaagaaaatgtggggctaatgacccaggttaccgaaagtgcatgtcgttgcatctactttctagaagggaaaaaaaaaagcatcacaacgcacacaataaatactacagtgcatttctggaaggaagttgggaattttacttaagtgactaattctttttttgacaaaaccgctcaagtggctctaatattgatatatttgtaccaatttcgtgctcaaactataagaaattccattgaaagatcaggtagccagatgcatattctttctggtcacaaatactagttgctttatgcatacttcctatcataactttggcataaacattttttttgaaattatttagattgcatccacaaaaaaatatatgaggacttatccagaaaagtatatacacgatatgatattttaatggttctttcaaaaaaaaaacaatcgagactagtgaaatgtcactcagaagtctatgtcgttattaatacgacaagtatatatttgtggattgaatagtattttgtgttaattaattaatgtaaatgcccatccaatgggagacaatcatcttgacctccgcatttaaacaaatctgagtggaagccacgagacgaattaaatagtgccattttggtttagttaagtagcagaaactaatcatttgcacaactcttaagtgatagtacttgtgttttttttcttctttccttgttttgttgatctgaaacctgatgtgttcatctgccgaattatatatatatatatatgtaaattctgacgtagtactgcagcgaataccatctaacacatgcataatcaatactactactatactttttactactgcgtaatcgtacactgtgttatgataaatgaatgttttgtctccggtagttgaaatgttatcaacaatttaaagggacgttgaatcaccaacctcaccagccatgaaaccagggaatcctccataattccattccaattcaaacccctattttctactttatctttccctaaatatattcatattttagattgtttcctaaggactaaggttggatcaaaagattattttaaacctttcaattatcaatttttaatttttaaattgcttagattatttttcctattggctatgggactattgaaataatgaaattcacaagaatcaatgctaaaatgcttatattatggtatacaaattaaattctaaaaatccttacattctaaaacgaagataacagtttgtaaacttcatat

SEQ ID NO: 2514 - DNA, 1593 bp, Oryza sativa
ggctagatctctttctcatctgtggccaaaaacattcaagatgaaacctccagaaggacaagatattggactgtgcttcattagttctcttcaaaggtatgacccttcaaatcgatgcttctactgactttccttttgttcctctcacttgtctcaatggcatgtggacctactggtgtggacccatctcattatttataaaataaggacgttttcagatgtttaattggtggcatgatagaaattaatcctcagaagtatcaccaatgattttagtgggttcagtcatatcatttgtcatatactaacaagtcctacctccgtcccagaatataagaagttttggggttaaacacgagtattaaggaagtaggtggaattaaatgggtcaatgttatgatttgttgagaaaaggaggtagggggagaaattaaacagagaaggttttgattggttgagagaatgtaggtggtaaatttgctatattttgggatggattacgaatgctagaaattactatattttgggacggggggagtattcatttcagttaccggcaattgaaaaccaattcaacaatttatcctgaaaaaatgaatgcgagttcttttggagtttaaactctttttatcaactacaggatgcagctgtgtgcatgaagcttatctgcatttgtgtgttttctctctttttctttgcagaccaaacgggagttctgaccatctcctgaaaaatatttctttgcatattgggttacgaaccaaggctggtgctactaggtgctgatattttcatccaaattgcttacccaagaataccaaaatatgttccatgatcctttttatgtcccatttccaaaccatgtcatgtatccccccataactgacaatgcttggacttggtatgcttaaacaaactgatactgtgatgcatccatttctcaaagttgctatttggtaatcttatttgtatgaatattttttaaattcaattttttttgtaatacctgtttttgatttgtcgcaatagtttctcttacaaccagatgaaatcacatggagtttgcatgtgcatagctatacagtccctgttaaatattttaaaaagtagtatgcatgtacaaatttatcatctaaccttttttgtataattaccaatttaacaggaaaatgtaataagttttacttttggggtgttttcggagagctgcacagatactataatcaaacaggtaatgttaagattggcaataccgactcgtgagacaaatttgaagatattggcatgaacttggacttgacaaatggcaaagagttaaagagaggcaaatgtgggagttaaaagagaggcaaatgtggggttgaggtgtcatttgagaggcacaaatgtaaggaaactggcaagattttggagacacaagacaaagaaacatagaagggaaaatgtggggagattagtaataaattggatgtggcagttagcaggtaaagagataggatcaacaaatgtatgaaaatgctgaagactcctgatccaaatgctgcggcaagctctttaggtacaagtgcttttttctttgagccggcacatctt

SEQ ID NO: 2515 - DNA, 1597 bp, Oryza sativa
cagagctcatctttttcagataatatcttaggatgatcctgcattttgcatggacagaagtctaacaacagtggtaatcaattcgtacatagcatcattatgtcttatcgatcatggactttttgattatatatatgtgaaggaatcttatcctttggactgctaaaatattatgtccaaatatttggtgtcttggctgtatgcatctcaattatgcagaggtcagaattgttcttaggacagttgtatcatctcgatgtaatttaatgatcagttcaatgaagcttccattatctaaaaaatatacttggtgtctaaattctgaaagtttcggagatgaatatttttatcatagctctgatgcctaatctttggtatctgggactggtcaacgccatccaatattcaggtctgctgggacaagaaaccttcgccggtggaggatagcttatgtacaaaaagcacagctgttactgaatgaagctgcttcttggtcacatctttggtacctctatgtgaaaggtagtagtttcagatccacttaaatatattgttctatacaccccccttttccccttcatcagtaatgaaaattgtagatcaatattcttttaaatactgctaatgtgttaagttcatttatctgcacattttgcccttggcagtcagatctgtaaattcacctaatgcctgcattatctttgttgataggcactgactacttccaatcaagtgggtgtccatttagttgcaacaagcggcgttacggcacaattatatctgcagattgtactttagcttgagggtctgtacacaactcaaaaatatctattttgggagctctacatgaggaatatgatcagtaaaacattcgtgccattatcctatgttatgttactaagcaatgatcagatatttgacaaaaaattaagcagtgatatattaaatattcttaacaccttttgattttttttttgggtggcgatcaggtcactgcaaacaagcgcatacttaataaaatgacatcactagcttacctgtattatgcaagatcatcggtgcatgtactgccacaacatactaaattatcctctgggaattctttagttaatcttggtctccccatcagctctgataagattttgcttatttattttaattaactattaaattattataaaataattatgtaagtgtgaaaattttttttgtgttgctgatttgttttgattaaatatcttgtcctccattccttcttttactttaggggatgcacttgttatctgaatgtattcaccagaaaattgatttattagaggtagcattgactactatgaaaggcagtatatatgctttactattgttgtgagtgttcccccttctaccattgcagtaggatggtaaatgcaagaagccaaagcggaagtataaggctgtactattgggcttttcacagatcaagaggtgagtattcctggtcattaggtcactgaactacagatttgttaattttacgctcccattgtttcaagttgagtttatttattatggcccttattccggttaaatgcgagtttatataaatgcatctgtctaa

SEQ ID NO: 2516 - DNA, 719 bp, Oryza sativa
tcctgcaccccctgcatatttttcaacaaaaaaaaggagagaattgcttgtttgtccatgtagtcgggaaatgatacttcaatagtgctcttgtttggcgatatatattgacagagttaacctggtgaaatagagaagttttattgtttacacgcaatgaatagttgcatatttttctgtatcctgtcatgatgaagtctgataaatagcatttctgaaacattgaatttctttattcctttctagatataatacacaagtattgttacttattccagggatttgtcacacaacaacttgtctggaccaattccaaattttctagggcagcttccgttactaatgtttctgtaagttttattgttttgattttggaattctgacataatagtctttcttttttggtatatcatgagatatttttcctttgtagggacctgtccagcaatgatctcagtggaccaattccttacaatcttcttcaaaaatcacaaaatggttctttgtcactaaggtatgttctatgttacaaaaatatagaatgcacggataactgaacttaaattatgctttgaagaaaatattccataataactttattacttaaactttcaacgtgattgaaggatgcagttaattacgaaagtacttaacaattaaaatcatatattattttttcaatttattctataaatttattcttttttggctgtgtgcat

SEQ ID NO: 2517 - DNA, 2240 bp, Oryza sativa
atgatgagtatatctcatacaaggtgagctattagctggctgttcttctgagccacctgtaagaggtagcagagatagctgctagtacattaactgttgactaaaacatcacagtgccaacataaattaacatttcattggaccttgatttaaaagttgtctgttcaagagagattcactacctgaaaagcaaactagatagccaaatatgttaggcactcaccaggtgtcgattcatgttgtgacgtggagaatggcaatggcaggaataccagggctcatggcgaactgttcaccatttgaacattgcacccaaaatgcaatctgctctgtattctacaactcaataaaaacatctgaagtggcaatatgccaatatcacatctgaagtcaaaatatatcaccaaaaatcttcacaggagcagctaccgttcctaaaatgatggaaccgatttccatccctaatgtcaatttgtctcttggtgacatgagatacaaacttgataaaagtatgacagtcaccacatattctaaggttcttcagtatctgtataggcatgcccttaggtgtagcaagaaggcaataagcaacagcaagcttctcactgtggtacaaaagggagctctccttctgctcttcatcaatgtcatggagaacaaattctgtgtcaggcacatagcctgtagcctttaacaaagtgtacagttcttcgagggtagcaactatctcttcaatctgctcatgctgcttatcgccagtgacaaaggagtgcattttgtcttttatctgtgtccagctgcaaccaggctcttttatcacaccttgttgcttcataatttttcgtacctctgcaacttcaccccacatccctagggaagaatatatatttgacaacataacatagttgccagcattcgatggctcaattctgaagagtttctcagcagctcttttaccaatttctgcattcttgtgaatcttgcatgccccaagaagagcactccaaatcactgtatctggctcaatgggcatatcataaataaattgttccgctccttgcacatcacctgttcgcccaagcaggtcaaccatgcaagcatagtgttccggcagaggagttagtccataatcttggctcattgacttgaaaaacttccatccttcatctaccaaaccagcgtggctgcatgcatttaaaagccccacaaaggtaacctcattcggtaacaccccagcagattccatatgttgatacatcttgatggcttctcttccaagcccatgttgtgcataacccgtaatgatggtattccatgtaaaaatatctcgctcctccattagatcaaaaatcctacgagaatctgcacagccacacttgaaatacattgatatgagagcattggctactataagttctgaatccattccaagtttaatagctacagtgtggatttgctgcccaatcttagaagcacctagactcccacatacaccaagaagtatagttaaaattggtgagttgggtaactcatgttcacaaaacattgttttgaaagcccccatggcctcattggattgctcagcatgtgcatacgcagatattatggtagtccaagaaacatcgtcccgactgagcatattgtcaaatgtgtttctggcctcatccaacagatcattctgcacaagtgcagcaaggaaagagttccatgacacaatatccttagttaccattcggctgaatacttgtcttgcgtactccatgtttctgcacttgccatacatagtaatgagtgcattacatgcaaagctattgaactggcaaccaacctttactgcaagggaatgcacttgtgttcctgtctcaagtgccacaatatttgaacaagcaaagaagatactagtcaaactagataggctaggcaacatcccactcctatggagctcttgaagtaaacccagagcttcttcacttctcccattttgtgcataccccgcaatcatcccagcccaagatattgtgttccgaaaaggcatcttatcaaacaactcctttgcctcattaaccattccattctgcatgtacccagtaatcagggcgttccaggacacaacaataggttctggaatctgttcaaataaaatccgtgcatcatcaatcctaccacattgagcaaggcctgtgataagtgcagtccgacaagcaattgattttacaaggtctctttcatagacagcaata

SEQ ID NO: 2518 - DNA, 3250 bp, Oryza sativa
ttagatctgatttacgtatatagagaaaaagttttcttctatagccttttcaattgagcatactctcttcattttgaataccatggaagcatattcctaatgacaatcactgctttcttttgatactgtcagggttggttataatgcaaaactatgtggcaacgatactgaatgcggatcaggtcaaaagaaaattaaagggtcacttctttctgcaataattattacaatagttgccactgttgcactaattgttgtcttatttcttcttctgcgccgaatgctcaaggcaaaaggtaataaagtcaggaggacagtaggagatatctgcttagtgcattacagattgtttgctgtttttcttgccttgttctaacaatagcatttcttgcatttaactatgttcctgatatttgctaaaatgtgttactgacatgtcagacaagagaagagctgctggtcctacatatgaatcagcattacttgagaacagagaattctcttacagagaactgaagcatattacgaataactttagccagcaggttggtaagggtgggtttggagctgtgttccttggttacttggaaaatggtaacccagttgctgtgaaagtgcgatccgagtcatcttcacaggggggtaaagagtttctagctgaggtattagtaatttttaatttggagaagttgtatgtatcacagctctttcataactcgtaccattttgtctacaatatactgtcaaaaatgcagtttgttttccttacacatgttttttctgtgtaaccatctgtttctgaattctgatgaacgaacaatttcaatatttggtggttttgtagataaattatgctacttactaatcactctcatatctgctatgcttgaattttctgaattttatatttcaggcccaacatttgacaaggattcatcacaagaatttggtttccttgattggttattgcaaggacaaaaatcatttggcccttgtgtatgagtacatgccggaagggaaccttcaggatcatctgagaggttatccatcttattatccaaatatagatgcttatgtagagctttgaccctttgtttgtgtcatgctagtaaaagataaagttggtttatcatgaaaatactgttaatggctaatataaatacaattatacgaacataagttgttctgaggcctgaatggagggagattagctgtctgttatatctttagaatcagattatagagtaatcctacatttttctcaaaggagaattgcaaagacacaagaacagccacggttgctaaatgaaaaccacatagatatattagaaagtatcatttccatggatttctccaaaatctgcaataaactgattatgttcattttctgttgatatgtgaagctactactaataagccactcacttgggagcagcgtcttcacatcgcccttgatgctgcacaaggttaaaacttaactagctactactattaattttcacccggcaaaatactactattagttttctgatatttcattcatacccgcgcattattagtttattacctaataaaagtttaatatctgtgtatctcaggattggagtatctgcatgtcgcgtgtaagccagcactgattcacagggacgtgaagagtaggaacatcctcttgaccacaaatcttggagctaagatcgctgattttggactgaccaaggtattcagtgaatcgagaacacatatgaccactgaaccagctggtacattcggctacttggatcctgagtaactcctctaactctcgtatactgaactttccttttcaatattgcgcgtgaacaatcgcattgtttttctttcaaaatgaaatatcttcagttctaccaagtaactgaacttccatgtcatattctgcccatcttgttcaggtactaccgcaattatcatatcagcgagaagagcgacgtgtacagcttcggtgtcgtcctcctggagctgatcacaggccgccctcccgtcatccccatcgacgagagcgtgagcatccacattggtgagtttgtgcatcagagcctcgaccacggcagcatcgagagcattgtggatgcaaggatgggaggagggggaggctacgacatcaactcggtctggaaagtcgctgacttggcgctgcattgcaagcgagaggtctccagggagcggcctacgatgacagaggtggtggcacagcttaaggagagcttggagctcgagagccatggcgataggaagcacttggtgactggtgatgatgacgtgagcgtgagcaatcttggagaggagactgcacttgaggtagaagagcaatctggggagatatcaagagtttctcctgggcctgcagtaagatgacagcttccatcttacatgcgaaatggaggttcgatcttacatatataaattttctactgtttatcttcaaaaaaaacttaggtttgtgtcgatttcgtagttgtagttgtgaaacttgaaatgaaactttcatttgctccagttcattttctttttcttttctttgtttctactttctatgaccatccatttcgcttgatgtggtgatggtgtccggattttgaagtttttggtgtaagatatattaattagaggctgtccttgtgtaaattgcttgatgcagtacgcaatccaattaaacatcaaacctttgagtaagcttctaattcattcatcccgtgcacgcaactgtcaacaacatttaaacaaacgcaggactgatgcatctgcttaaaattgtcaactcagcaattttatcctatatataacaactcacctatcaactaattctaagcatgcaaacttgtctataatacctggatgtaccaacacacgcagtcaacacccttccatcgcttcctctctctctctgtttttttttaataaaagtcatgctcttgcttaactggaagcaaaatataggttttgtgatcttacaaaaccaaaaagaaaatgctgggtataccagctcacaaattacaacactatcacaaaccaactcccctgtgaggctgtgacaacctacatcaactcagtatcttcaatgacaaaggaaattctgaaacatacttatcatttgtcggggtcttcatccactcattggcctgcaccatatgactctgcaatctcgtgttcaaatctcctacagctctgatctgacatggtgtacaactgtacaagcatacaagtccatgcgcaa

SEQ ID NO: 2519 - DNA, 2321 bp, Oryza sativa
gccaattctaataataaccgtgccaggtgggccaggtccattccattgtgttaataacgatcatgagagttgaaacccagtgaacagataatgagacagccttcaaataatgtaaacaagacattcacataattacaaaggtttcaagaaaattgtcatatctgcatcctttctatcagcgtggcataattaagtagcatgtcaagtaatttgtttattgtatcgtagttgacctagtggtttcttgtaccttgactacctataaaaatagcagagtaggacacctgagtataatatgaatgcatcagttagtcccatggatatatatgcatagtctctgtccttctgttagcttcagtgctctggttatgcagttatgttcacaagagtgagcaggaaggatgaacatatgtgcggcaattctcctgttctacatcttgcaatttgtccatggccagcctgatagtcaaggtgtgctgctcctaatttgttcaactctttatgttcaggcagtacacaatggaaagcaactgcggactcacaatgttcacatgtatcattcagaggtatgtttcttgatcatggtggatttactgagaattttggattggtgttttctatccaggtttcataagcatcgattgcggcattccagagaaatcgtcctatcaagatcccacatcaagtataatatatgtttcggactatggtttcatcagcacaggagcaaaccataacatctcctcagcatacattaaaccatcactggcacagcgcaattacaatgtccgattctttccagatggcacacggaactgctacaccctgaggtccttgcaggagggaaacaagtactttgttcgagctgtcttctactatgcaaattacgatagcctgaacaagcttcctgtctttgatctgtacctgggggcaaactactggcatgaggttaagtttagtaatgccgatgcagttaattggatggacatcatagttgtggctcctgctgattacctgcaagtctgtttggtgaacaaagggacgggaactccgtttatatctgggcttgatttgaggccactgaagagtactctttacccagaggcaaatacaactcaatctttggtgctgatcaattccaatcggttcaacatgggacccacagacaattcaataaccaggttagttttagattttgttctgtctgaactctgatttgaatttaactaaccaagttggttctcttaccatcttggttaaaaactgaaatattgccaacatttgggagtacctatgatggctgggtatcttgcggacttgttgaaatatctctatgaactaatgcagatgtatcagttttagtcacaccttgcatgaattgtgtttctttaagctttacttttcaacgatagtatggtcgttttgactaaattcagtgaactagtatactagatcacacaaataatttttcttttgtccaaacagatacccacttgatccccacgaccggctttggtcaacatatgatacgatcccagactggactgagatatctgcaacatcagtagttcagaattacctcactgatgtctatgatgtaccatcagctgtcatgcaaagtgcagcaacagttaatagctcgagaattaatttcacttgggatccatctgacccatcggtgaacatcagctccaaatacttctttgtgctctacttctccgagttacagtctgtaccgagcaatgggctgagacagtttgatattattgtcaataacaatacatggaacacacaaccttatactccaccattcctatttgccgattccttgtctggcaccgtacaggggctggcaagttatagtgtctcacttgttgctacgaaaaatgcaactcttccacctatcctcaatgccatggagatgtacttggtgaaaccgctaactgagtttgcaactgatcctagagacggtatgaatttactggcgcaattttatgttcattatcatcaaattctattatattttaacttcacatgcaatttgcaccataagaggtagtacactgacaatgctacagcttttgtttatcacatttgacatgcaatagtatctcaaaagttttctttgctgattgttcatttcgtatgagcttgatcatttccttgttcttgcaaaccagctagagccatgatggaagtccaacaaaattatgatgtgaagaaaaactggatgggcgatccatgtgctccaaaagcttttgcatgggaaggattaaactgttcctatcctccagctgattcctctaaaataacatcactgt

SEQ ID NO: 2520 - DNA, 22635 bp, Oryza sativa
aaattaacaatatcacttattaggagtaataatatatgaaataatttaccagcatattatctaatatctcacttattaggaaataattattatttcaaatctcacttattttaacaatgattgttacttcttaagccacaaaatctatgcgaaatcaggtaacctttccgagatccatgacaagattaacaaaaaaaagtagcaggtacagtacagtcacaaagaggcaccaacagcaaagcaaatcgagcaagagaagagaaacagacgaagaggatagaattcaaaatttatactcacccaagcaaagatccttgtgaactcaatagatcgacagggcaaccaataacagaacttaaaaaaaaattcatcatgtgtatttatgaaataaatgaatttctcaagtgattcctactacagtgcattttgttttcaagattaaattagccaaaactaaattaaactaagacatgtgacattgttgaagtacagaacaaaaagcaaatttcactttggttgggagctaactacatgaacatcctgaaaattcacatcctggaaattcagttactgcaggaacaaaaaccaaggttactgcaggaaaaaaattcacattgttgaagtacacgaacaaaaaccaaattccactttggttgggagctaactacacgaacatcctagaaatttacattaggcaattcagttcctgtaggagtaaggatgttgattctctaaataatctaaatgatcaagcttactcacatccagtacttggcactcagcacctaagtcctctaaatgtaaaagagctccagatagtactgtgatacaatccttttaagtctgtattttagggaaaaaaacatttgtttgggacagggcagtcatgattgtttaatctatttttcagtatagttttataggaacgggagggtagttgactaatccatccatttcaataagtgcaccttcacattcagaaattacatgggtttgagaaagttctaaaaatgtggctttgataaattcagagatataaaaaacatcttatacagaactgtaaaaaataatttcatcatgtgtacttatgaaataatgaatttctcaagtgattcctactacagtgcattttgttgtcaagattaaattagccaaaaccaaattaaactaagacatgtcacattgtcacgtacagaacaaatttcactttggttggaagctaactacacgaacaatcagtacatagaaagcttgcccaaaattgaagactgatcagtggaagtaatagatgaagaagtcctcactaaacacaggatgacaggaatgtgtgaattttcttaccagcactgacaagcatgaatcacacctctagtgatcaacccctgcaagccatggagcagaactgaaactactcttccttaaggcaaaactacaaacacctgcagtgcagcgcgagagaactatccctgcaacacaagcactgtaaaggatgcattgacctaccagttcttttccagtagatgcccaatcgcaatgcagatgcattgcagcgccacaaaaatgttggtcgtgatgattgagtcatggtccagacaaccgcccatcatatttgagaacatggacatcccgatctatctctgcacaattgaatgagaaattcagctagctggctacatttggatgataaaatttcctggtggacacattgcttgatgtcctcaaaacaccagcagcagtttgtgttagccaaacctactcccaaactgaacaaaaccatgcacgacaacattactccaaaacggctaagctaattaccaaactgaagctgagatatcatgaattcatcaccctttaaactaatttcggcacaatgtaactacacaaaccaaacggcacaaattagaagctacatgtaccagtctgcctttgctgaaggtgaaatctccaactcagtgacccataaagaaattctccacctcctgcagcaccggcggcttgtccagatccacctcatgcgtgcaacccgaacacctgcagagattgcgcagcagaagaaattaaaaaaaaattacttcactgtatcacacacacgcattcgatgagagagccatacaagttgaagtggacgcacttgaggcacgtcatatatgcttctgttctttactatataaaactgagcttaattaagttgaagtgtgttgttaagctcagttgttatagcatatttatttcatcatgtgtactaccgagttaaagacgcacccgaagtgtgttattgctaatatggagatgagagtagcatgctgcaactcaggccatattgcctataaactgatattatataggaaaggctcgagttataactgagttataacgcactcgacagacaaaaatcagttaaactaatgggatatagtaaaaataatcagttgttctactgagttaagacgcactcggggcgaagtctttgctgctaaactggcgttaaagaatgtactcttcgtgacagtagatataatggtataattatatgataatttttgttccatattagcaaataatcatttaacagttcctgagcatcgttgttttacatgctttctgttctttgacatttttatatttctgaagaagaaagtgctttctgttctttgacatttttatatttctgaagaagaaagtgactggagagttgaatggtaaagctaaaatgttggatgaggaactgaagatacaccagttagcagaaactcctctagggaagcaaattatgtgcatatttcacacaggatcatttgcacaaggcccagcttgcgaagccaataatctaatgcggtacccaataataaattcgaggtttagagagcatagacactccaattcgatgtaatcgaagcaaccaaatcaccaaatgccctcatgaaagcaagaacagcggcactgatttcagtattttacccccaaaatcataacacgaatccatgagcacacagtaatccagacccccaaatgcatgaggcccgtcaaatgccacagatcttgagctagccgcagcacaaatcaaccagcacacctccaaagctgagctccaagcctcgagttggagaaagcaagaactgaagagcaggagattgattggttacctgtcggtgaagagcaagccgaggcagaagctcccgctcccgaggcagagcagcacggcccatctcctcgacacccctccatctcctcctcctccttttctccagcttatcaccgccgccgctatgagtaaaacttgttcgtcctcctccgtcttagaatctcacgagcttcacaggagagcaacccatggagaacggatcacgggtcgttcttgagtcttgacttgtattctccaccgtcgacggcccacaccatctccatctgcgccccttaattttccccgatacgaaagccacataaaagatctaagcaatgaccctcttcatgtgcatgacaatgtgaccatgttttccaaatagtaatatccataacaatatgagaaaataattaatacaaaattattgccagcaagagacctaacaagagataagagtaactaagaccctatttagatgggactaaaacttttaagtccttatcacatcggatgtttggatattaattacaaatattaaacgtagactattaatataacacatccataatcttggactaattcacaagacgaatctattaagcctaattaatccagacgaatctattgagcctaattaatccatgattagcctatgtgatgctacagtaaacattctctaaatatagattaattaggcttaaaaaatttatctcgcaaattagctttcatttatgtaattagttttgtaagtagtctatatttaatagactaaattagtgtctaaatacagagactaaagttaagtccctggatccaaacaccacctaaagccctaacaagagatccatgatctcagattaaacgtcatacagacaattcacccatattacaatgcattgccatatctcaaagccactaaaacttatcctcgaatcctagcccatcgatctcattcgctttccatagcaggatctcaatctccaacagaagctctggaaactcaccatataagcattcctctacctccaattgactataagcaaagatccacagatgtacgtaaaaatgagagcggacattccagttaaagctcatgtcatcatccccggtactcacgtattccctatggctattcaaccatcttctgagaaagcggttggaaataactatgcctagccaaatcccatcatacggcaacttgctaataatctgattcttcagtcttggttgctcctgggcgagcttacccatgatgtgattgtaaaataatagaaataccgccgtcctatattaaacattataccaaccacatcagtaataaaaaaaaacaattaaatcacacaaaataaatacaaattatgcagtagaatacctgttagcatcaggtataagcgaagcgtggttgctgatgatgtactcctgacaaaccgatgtcatgctctccatctggcggagtagacggcgaaaatcggcaatacaatccacaccaatagcttcagaccccacagactctgtaatcagctctttcagaatggaagcagtttcattgtatcgacaacaagcttcttcctcactgtaaggaatctctataacaccctgaattactgcacttccatcctcacccactaagacatttgaagaagttaatgaggacagacacttcttctttgcatgaagtaaggcataggtcttgtttaatgatctcacgagtctcctgagattgtcatttggaatccatatgattttatcttctctacccatgatcttaacctttctcataagagggttggctcttgcataggtaagggcatcaatcaactctcccgcactagtaaaacatggaccaaacctataagaaaaccacaatatgaaacaaagattaaaaaaatactaaatattattgtaaaacagtagtcttggcaaagcacatctcaacaaaatctatgatgagttcagggctaggagttcagttacaacaagatcctcaatgatctgaaaaaggaattctgctgcaatggtactgtactccaagatccagagcttggccaggtatgatgcacttggcaatgcttatctagttctcaatttctgcttcacggatatgttgataacataattaaatggttgtaggtcattcagcttcatggtgatcagtgtaagaatgctgacatccagccgtgtggcatccggtttgctagcggccagaaactgaattagggtttaatttctcttttttcctctcttcgagtgtaaaattttgcgtccaactatcaagcttgttcttttcggtcataaccataaatatattcaccttcttagagttcatctatagactgtatagtgaatctaggtgacactattgcatttccatttacaggcccggctctggggcagggcaaagagggtgacggcctagggcccgtccccatgcttaaaattgtatgagtactgtatgagccaaagtagtactttaagattagtgaataattacatactatctaccactcctggttatctactagtatctacataatactgattagtgaattacttcctccgtttcacaatgtaagtcattctagcattacccacattcatatagatgttaatgaatctaggcacacatatatgtctagattcattaacatcaatatgaatgtggaaaatgctagaatgacttatattgtgaaacggagggagtaataaagattctagattcaacaatcaaaattgtatgtaaagatagattcttgttggtaatatatatttcctttataattttaggtgctgataagttgtaattttactcaagaagcatttttatggtgctaagtaaatgggaaaaataaacaagatcagtttaagtgttgatatttttctatttctaaaaaaacatatatatgaaatgttatcaatgttcatttctctctatgattagatttgaaaacacactttgaaaatgaaggggctgttcatattgtagccaaaataaatcttaccaaattttggcaataccaaaatctttacaatttagtaatattgtctagttttagcaggatttcttatgtatttactaaagtttggtaaaaaaactaaatggatacacatctttaacaactttatcaaaaattgatatggtttaaaatggcattaatctgaacaaccaaaaaatatgaatatacatataacacgtcactctataggagagagagcgttaagggtcatgttgtcaagtttgccctagggccctcaaaattgtagagccggccctgtccatttatcagggatatagctctttatattcatcatagttttaacagggaagattctttgcatcagcattagcgttgtagtgatttcaacatccgggttcttccatgtggaagctggcaacttgtaattgacacctcagtctttcagtttctacattttgtattgagcacagctataatttaattcatttcaaaatgtgtttttacatgttttctatctaatctcctgctgctaactggcaattctacatgttaggtgcattgctaatcttgttgtttaagcgatcttttagtttgagttatagtaagtcgtgtgcatgtgtgtgagggagcaaatcagcgagaacatgtgcgagttagtgtgatcggtgaaagccatgagttgtatgtaagtgactacatgcagcagcgggtgagtatttgcttggaggagcggccaagtcaagtgaagtgagtcgtgacatgaagagtggatcaactagcttgcacatgtgttattcgagacttgcatgcagatatgtgctagtggccgtgagctttgcatgcaaggattagttgtttagcaagtgtggggaataaaaggtcccattagtgccggtgtgcagcgctgggggaaatttttgtgtttgtgtgcttctcatttgtgaattaaacaacgtgtcggtatgtcaattgtgcagagtgtgagctcaatgttacttacccagtagttgaggaggtatttgttgatgcccacctagtgccaaggagtttcggcagtgctactgcagatgtaagccgcgtccatggccacctgtagctaggtccgatggcgttgcggctaagtgactgatgatgggcctgcgacaaaaaacaaatagtacgttacaagtgcgatgttcatacgatatatcatgttgagagcgaagatcatgttgagtgaagaggagtgacccaccagcggcagtgactcccttatgacctgcaatgggtaactcttgaatggcgagaagatgccaatgaatggttgcttggtagcccgaggcagtggcagcggtgaggggctcctgacaccctccagcggtgacggtagcggaggctctgatgaggccgacaagatgccaattaatgcctgcagtggtggtagtggagaagcctcagatggggcggcaagatgagatacgataccggtgaagaggcggccgacggcatgcggcgaagcctccgacgacaggatgtcgccggcgaggaacctcctccccacccgtcgtaggagcgacatggttgctccccgttccccggccggcttgcttggttggtgatgggatggcggcgcagccccttgccacccaccaccccacccggagagagcggccgggcggcggggcggggggcgtaacccgcagcctacgactccgggagggactagtgcgtgggcgacgagcgcggcggccggcggcgcagtggctgcgggatcttggtacagcggcgggcggcgccgccgccgccggaggcggagacgcgtggtggcgagggtttccttcccttctctttttttttccccctcccttgttctgtttatttattgttgtttcgcggaaaataattaaagaaaaaagaagatcatggcccaaaacctagcccttatatggagatgggcctagcgcataggcgatttttagcctactaagaaaggtccatgcttgttgggccgacctttttatcctctgccaaaagaaaaaatgtaaagtaaatttgagtatcagaaatccctaatatagacatacttttttttttaaaaaaaaagaactactagcacaaaatacatgcgtgttgcaacgagtgaagataattttaactctacatatgtgaacactattaatataaactctgcccacttaaaagagaaaaaaccgaatgaggactgataaagttgttaagttgttttttgtgtggaactctgcttctgaggcctgataaagttgttaagttgtttctgccataattatagatcttttgtgtggactaataattgttaaagtgcgcagcccgggccatctaccgtgggccaccccaggtcacattgggcctgctccaccacaagcccaaccagagccacaattttagatcctgggcctacacaactcaaaagactagtatgatgggtgaggatcgcccccacctttttaagtcgtgctcccccatcatcaattactgatgtgggactaaacccaacaataatgatgaggcctatatgtatgtatgtgcagagaactccatccatgattaaaaaaatgcagatgaactaggaaattgccgcaccacatctttttgccgagtcggcaaaggggccgaccaaatttcattaagattgaaagggggaaagttacagatttttacacgacattaaactattgagccgggggccaacacccccggagagtagaaatcgggatggaagtaaaagagagagagagagatagagagaaaagaccgggattgctagggctactcatcacaacactgaaacgcaccccgcagctctccaaactgcaacttcctctttgatatctgccacaaggtgctcggccatcttgctcctttggtcaaaaactctggcattgcgttccatccaaattagccaactcaccaacataaataaggtgtcaaaagcactcatgtagcatgtctgaaaacagcgtctcgccagttgccaccactccggcggggaaggccttgtcgtcctttggggggggggagataaaattcacattgagccaatccctcagcaaggaccaaaccctattggtaaaagagcactttgggaagagatgatcacagtcttcttgctcatatgagcacagagggcaaccaaggtcatgcggccagccgcgcttagcaaggttgtcggccgtgaggcagcgacccttaaccatcaaactcattttttttagataatggaaatggattacatctccggcttctgtcataagacacacagcaataagtttaatagtaataaaaaggtaagataaaagtaaatcagaatgagaaataaggtgatgggacaaatccccaacccccctttattattgactagcgttaaaccacataaaatattttagctagcaattcttatggaactacgccacccatagtggaataagagacccttggctaccgattccaagagtgtagcaccattgcgcatagtatcatgctcctcctgtggtagcattgtagaccagaagtggagccagtaggaagacatgaagataacctgcatagggttagataattgtttaccattaaaaactttatcattgcgacaacgccaaattgaccaacatacagcgctagctccaattagaatcatcttcttaatggacctagatacccctctaagccaattaccgaaaatatttttggcgttacggggtggagaaaactcataaaccgaggctacagaaaactgtccattgcttgagaacttccaaaggatggagtcctccaaaccacacctgccaagacatacataatcagagatgtcaaaataccataagaatctctacatacatacatatctcagataccaaaacttcagacaagagttcccaacaatggcaatgcaatgaatgatactcgtgagtattcattatagtctagagaagggccaaatgaacaaaacgataatcacttcttttttgccaatgaactaaagagggagcatctatacatcttcccaagggaggtataggatccaatttcctgtttgaaaagacagagagtattccaaggaatagcacaatttcacttattaaatactccagataactcatcttcaccaacgaaataattgtttgttaattaattatctgcctcaacataggtaggtatctatggcagaggacgttgtgagcgatgctgtaacattccgacttgtgcttgatcatccggagtattaaagtaaatcaatatcacaaatctacaactgtagcaatttttttatcagatatttccttttagaaactttctaatatatacgttttctaaaaaaatccttctattgcattgtttatatcacttgttttaagtatttgttaagtctatctactatttagtttagagtaaatttcacaaaactatagatttaaggtgttatatcatataactatatattagttatatttaacgtgaaatttctcacaaaactacacacacacacacacacacacacacatatatatatatatatatatatatatatatatatatatatatatatatatatatatatatatatatatatatatatatatatatatatatatatatataaaagatggagtatcaaaaaaaaatatcagaaaactacaaatttagtgataatttaatcataaaactataacatttatagctccaacataacgtaatactagggatttaactatagaatttttagttttgtgatacttgaccttaaatttataggttcataataaattagtcactaagggtgtatttagttcacgctaaaattagaactttggttgaaattggaacgatgtgacggaaaagttggaagtttgtgtgtgtaggaaagttttgatgtgatgaaaaagttgaaagtttagagaaaaagtttggaactaaactcggccgaaatttaaattttatgatacaacgtcttaaatctatagttttacaataatttggtcaaattgtatgtagtttaatttatcttaggtagataatccacgaggatgattctctctcaataatccaaattaaatagggcctcagactaatcgagaatcatactagctaatccaaatcaagttttcaaaaaaaaaaaccctaatccaaaccaaaagagtagcatacaatctgccacagtgtgaaatcatagcagatcgcagtaacacatactgacatctgaccctcaaatcctggtgcttactcccttcgtccaaaaaaaaaataaactatggtttttcgtatccaacgtttaaccgtccgtcttatttaaaaattatgaaaaaaattaaaaagacaagtcacatataaagtattaatcatgttttattatctaacaacaataaaaatactaattataaaaaaaattatataagacggacagtcaaacgttatacacggaaacctagtgtttgttttttttttgggacggagggagtacctagctagtagcagtctccctccgtttcacaatgtatgactttctaacattatctatatacatatagatgttaatgaatctaaacacatatatatgtctagattcattagcatctaaataaatatggacaattgtagaaagtcctacactgtgaaacggaggaagtagcaactatagttgttacttgttaatacgttgctgacaacaagccggctctgttcgaaagagcaggttgggaacgtttggctctggcacgaaaaacggaacgatccattagcgcgtgattaattaagtattagctaatttttttttcaaaaatgaaacaatatgattttttaaacaactttcgtataaaaactttttacaaaaaacgcatcaaaatagtagtttgaaaaacgtgcgcgcggaaatcgagaaggagaggttgggaatcatcacaaacgaactgagcctcatattcatctggtgtcgaactgggttcagttggctgaagaaatcaatcaacgcaggaaacgaaaagcgtgaagccaaatgaagtcatttactacaagtaaatttgcagtggcattcgtgaaacagtctatctccatcatttcacctagaactgattataagcgtaactatataattggtggataaaactttaaatgttgaaaaattaactcaaaataattaaaagtatgtttagaattcaaattttcagaacgaatcatactctaattacttcacacgtctcacaacgaatgcatgcacgcttattacaggcttacagtgcattgttagttcttcggatggtgaccggtagtagttcagaaagagaaggggaggtaaaggttaggccttttcaggcagcaaagacgaccaacttcttttttttttctacctttctctcttcctcatcacaagcaaagtcaaactacgagtgcatgcagatatatacatgcaaataaactatttaacctgatgcagctactgccaatcttttactcatacttaattaaccaaattaacaattgtgaaaaaggtcatgaattgttcaacctaatttgtgttctcatctctatgcaacaacccaatcaagctcttgctttgaatatgaatgtatccactaatccacatgaaaaaagttaatgctttaattttcatgtagtagcacatcacctctcagtctcactacttgcattttaatttggccccatgtataaataactaaacatatgatgcatgtacctagatatatatccctatttttctaacaatctacttaccttcctatctagcttggaattcaatcaatcatttttgcttttagactgacaaaagggagaggaattgaagatgatatttgggaccttgacctggtagtgatgattctttgatccgttcacaggctcccatccgtcgtcaaggttcggcgttgaacttgtagtacattgcttcaactgattgtaatctagttaatgccgacaattgacacgttttcatgtaattactgatgtgtttagttgctacgtactgaatctttgtcattttcatatcatatttctcatgttattattttttaaaaaaaaatggatgaaaaatcctgcctctcatgttaattactaccggaattgaactgtttcctgcgaaatcaagtgaatctctgaatatagatggaattaactaagggttgctctgcctgtcatgacgaacaggtgacgcaatatatagctgggcaccgacagtttgtttgattatgtagacgtatgtctgatggaatcttggaatgttttaatctctccctaacggtaggctgtgttggtgaagctgtgtttgcttaggttttgatttgacacggcagcgatattaattcatatgttaaagtctgaaaatatgttcatgatatctacctgattaactaccagctagctggcttatttgtaatggaatatttctctagagtcttaatccgttgtagcgtaaggacatgaaacaactcttatcagacagtatttattcctactctctctgtgcttaaaacacagagaatttaatttctaagcattcaaaatttgtcaaaatattgatttgggattccttatctattttcgtctataaatcaaggtattattaaatgaatcttatcccttcaatatcactaacctaccctcctgataatagtacttttatatcaaccagtgacacagtggtccttttccctctgtactaatttgtcttggaattgctacaaatcaactattttaggagatacaactccgcccccaaaaaaaaaaattcctagctacgaatctgaacacatgtgtatctagattcgtaggtatgattgatttttttttttggacagaggggtaggtggtacagattaagtagtatctgggaattgggagaaatatgcttaaaattggagattggtatgtaatttttctccttctgcgtattaggcacaaatactaaacacattagcattttttttactcttatacatatgacaagatcattattaaataataacaattactacattcagaactaaactgcaaaaaaggaagcctttttcttaagcttaactagtatcttcagggtgctgctagctagctgctgacacaaacagtagcactaggattagtagtgggtctaatttaattactcagagcatccgcaatggtaaagtaaggtgctctctataaaacatgtacatctcaacaatagactagattaatagtaaaccacctcaatagtatgtctacatgggtatctatagctctctcatgtattgtctcgtttttctctatagattatctctaggttagtaaatagctttgctctctctctttatttaatctcttccaagtaggaaaatatgctgacatggatctcttataagagactatagataaccattgcgggtgccctcataaacagggcccaattttgaccaacagttagttacagtaattaatgaactaaattgagcttgttgtaaacgtggacctaatctttctgcaactccaagtccagagactgcctctttcctgcttcatctcctctagctaccaactcatgcgtcaaagcataattatgttaagaattcccattccttttggattccaaccgacgcatcctcctctcctgttcctctcctgctacactttggtcagtcagtcacagcacacacaaaaacaattgcaacttgtgtggtgtttacttgctaacacctcctgacagcaacatgccaacgaattgattgctcaacctggattaacagctagccacatatatatatgcaagtaaaaaaaattgtattttatataatgggcgaatcaaatttcaacctatcccttttcatggatttaattttctgtcccttggttaattttgtaggtggtgatattttctttgctagctaggtctcctttttttttgttcgcaattgggtctaggagagttttcacctagaaattcgttagctgaccttttccttgagagaactatattgccatgacatgcgctctaatagaaccctacttgcttccttgaagttccttccctgcaccttaattctcttctagagggaataacccaacagaaattatttctcacacaatcacaagtagggcttcaacattttggatttttcatgagacaaaaaaatgaaagaaaaaattaaagcataatttgaattgcaggggacaaatctgcaagaagttcctgccccaaaatccacacaattcatttctagattgaacatacatataaacccaatttcttctcttttaaagctccaccattgatcggcgatcggacgacgctccaagcccggggagtcccgtggaccagcagggctggacctaccaaaaaactgaccaccggagcaagctagctataggaagtgggggccagtccaaccagaacaaaactcagcttaggaaaggaacatgaggatagctttgttgcaacaccaccaaatcagccttgtggccttgttgcaaccaaactgcagagaatgcagaatgcaactccactgtggtgtgcctgtctttgtagtttgtaccatatgggagtaccaagcagacccagtagattcatgtccctgtcctcctcttctcaagacactgccatgccaagccaagccaaaccaaagcctaccttctcaacctcaccaactcaccttccctttccacacacatggatggcagtggcacccacaccttatattcctaccccattttgattgcttcctcccctcctctcttgatttgaagcccaattcttctccattaatctctcctccctctcacatatacccaaacacacatgcatatatatacatatatatacatgaatgcagctaactagcatatgtgtctgtgtgtgttcatcagtgatcagtagtgttcttgttcttgttcattggcagctggaggttcttgttcatttgccttagctggaagtgattaaatcagtagccattgttgtttagtggcgccattaatcttcagttatcagtttccattccgggagatcaggcggtggtcagctggcacctgcatgcatatgcaggctcattgattgattcgattttgggaagagagttattagtgatcgatcttggctggatcgattgagcttgatcatccggtggtgatatttctggattcttgtatatttgtgaggggtgtgagctgtttgatcgatgtgctgtggttgggcggcggcgtaggatgagcgacgtctccggccgcttcgtggtggccgcggccgtggtcgccgtgtcgctggccatggcggcggcggcggcggcgcacgactacggcgaggcgctgtcgaagagcctgctctacttcgaggcgcagcggtcgggccgcctgccgtacaaccagcgcgtgcggtggcgcggccactccggcctcaccgacggcctcgagcaaggggtacgtcttcgtctccgtcgccggcgaggcaaaggtgttcgtccggcgcgtcgtggctgaccgccgtgtgtggctgtgtgcgcatgcaggtggacctggtgggcgggtactacgacgccggcgaccacgtcaagttcgggctgcccatggcgttcaccgtcacgatgctgtcgtggagcgtgctggagtacggcgaggagatcgccgccgccggcgagctcggccacgccctccacgccatcaaatggggcaccgattacttcatcaaggcgcacacccaccccaacgtcctctggactcaggtacgtacgtacacgaatacgtatactgtacacatacgcgcacaatacaccgtatatatatcagtgttaaatctttcggtttagtcgatttgatcggacctcaccgaaatgccgaaatttccaaaattttaaacaaaatttagttgaatttaaacaaatattaccaaaattattgtatcagaggggtcggacgaaataagcgaaatttccgaaatcgttccagaatttcaaaccctgatatatatacgtgtatagatataataatggattaatggcaggtcggcgacggcgactcggaccactactgctggcagcggccggaggacatgacgacgtcgcggcacgcgtacaaggtggacgccgagaaccccgggtcggaggtcgccgcagagaccgccgccgccatggccgccgcatccatcgtcttccgccgcgccggcgacgcccactacgcccatctcctcctccaccacgctcagcaggcacgtcctccctctcactactcaccactcactactccaaaaaagaaaatcaaaaaattttaatttcgctttaagctaccttttcctttgcttaatcacctaattatttcgcatcaaaaaaatgtcatgacaacgatagagcaactgttttcctgactttctttttttaaaaaaaattaccacctcagtactaaactataaatatttctgcacgttttttaaaaggtatcattttgaggaacgcataaaagtacttgtatattttaagaatgtagggagtatttgaagagtatgtatatttgtaattatgcgtacaagtacaatttatatgtacatcaccctatccccaaatacttatattttgaactgtagaaagtatatattttgaagagcaggtacataattatacgtaaaagtataattgtatgtatttgtgggtgcagttgtttgagtttggggacaagtacagggggagatacgacgagagtgtggaggtggtaaagaactactacccatcatcaagtgggtacaaggatgagctgctgtgggcggcgctgtggctgcaccgtgccaccggccgccgcgaatacctcgactacgccgtcgacaacgccgacgacttcggcggcaccggctgggccgtctccgagttcagctgggacatcaagtacgccggactccaagtcctcgcttccaaggtacgtacataatacatgtatacttacatttatacatacataaatacgcggtggcggatcagaaccttggaacgaatttaactaaatttaatgcttaaaagaagttatattttaaatctctatattaatattgaaattctgttgcgtatgaaacccgggaatcctttagttttttttattgaaagaaaggttaggaatgttttaaattttaatttatgttgttgctcgctgaaaaattaataatagatatggctgacgcgcgcacgcatgagtgactgcatgcataatcaacctgcatgttttggtcagccatgcagtcagatacactgtagtatacactgtctacagtctactacagctcttctttatagttgatgactgcatctgattagcttaattaattccggcatctgtcagtgttaactgttaagcacaagaccaacggaagatcgaattttccaccggtgattgcgctagctgtaaattgttgacgtatacacatcgcgtgacagactgaattaattaaccaaattattcagaggcattagcatcagaattagcagtagtaattaggtgattgatcaggagatggctaaattgacaccctcttcttggctgacctactctgatgtggatggactgaaaaaaagattgtgtaactgcaagaagccctgcaaactagagccattggagttgcatgaggagcaaggctgtttggtgcaaaggcccttttgcttgttctggcttacaagcatactagctagagctaccatggctttgcttgtgttgggagttgatgcgtggatggatgcaccaccatgcaatgccttggccaccaacaaccccatcttgtagaggaataagcatagcttatagagtcttacaaaggctgagtttgtttgctgaaattttcgatgccaaaacaacgtaagccattagcacaatattaatcaaatattaattactacaaactttaaaaatgtttttttatttttaaagaaacatctatataattttttttcacaaaacatatcgcttagcaatttgggaagtgtgcttatgaataacatggaagtagttgtttcgcaaagctgtgtagaacgcaccgaaagcatatatgctgatttaatttggatttggggcatctgcatttaatttctttgccacacaaaccatgcaactatatacaatgtgtgaatgcatcaggattgatgattaagctgaggagatgattcttctcgcacaaaaggagggcacttaggaaaaagctagcatatgattctcaattcaccccaaggaaagatagtgagatgccttaggaatgatgatcaatttgtttaaataattaaggacctttcatgctgattgttttcctccaactgtgcctttgtcctatgctaaccatttcaaacgtttttccacatgtgttctaggtagaactattcttctggaaacagactgttttcctaaccttggaatagttttttttttctgaggtgtagactgatgacattattggtgtcttgtagaaatggactgccttcctaatgataactccattgaccatagtctttttttccccatgcttagaatacaaggcagctcttaccatgcccatatttcaatattcatccataagctgatcttcctgtcttaccttctctgccatgcttggaatgtgatctttgaagtaagaaaatcagttaattaatcttatatatcctattcctaggcttatagctgctagacattctgctactgtccaatagagttcatctgttattaatgaaaaagttgactggcattgatgtgcatatcttggacttctattgccattagtgaggagaggaaaatgtattttttgagagcttgagacaattctttctaatgtggacaacacaaagtgccatgcatatctgaggtaaacaatattatatcatggccatgcatgaggcattcaacatttcaacaaacagtagttacatgtctgacagcacaagaaaagttgtatatagtggttggatcacaaccagagtcctgacaacttaatcagtaaggatcatgtggcccagattataatagttattatgtagattaatctgccttaataatttaatcgtactgtgagcatctccagataattttgcatttgaatatataacactaaaattcagcctacatgagctgtattttggctaattggcattggctatcctgaaagtcagccatgcctaactgtagagatttggcagatagtttgactaacatgaaccgttaattaattaaaatacatttctctcgatgtctcactttctaattgataagtactcgtatggactcttgtagtacccattttcaacttaaaagtgagtgttgacattgaaataacgtagaaccttatgttttcacgcaattaaaaagtgaatgcatttgtccgatgcagaagaattctctacatctgtaatacattttcttcttcttaaaacaatcactatacctccgcgtttaaatatattacaatgccaattttattcggccaaaacttttttgaaactttgactattcatagttgtcaaaatatttagttttaacgtaaaaataatatgggtaaatttttctttgcaagtatttttataatattacaatattattagattttatcgttatattttgaatactaaaagaaatgatcaaagttgcatgtcaaaaccgaagaaagtgaaaagtactctaatgtatttaaatttggttgtggtattatttgagctctttctaataagtttttaatttgctcacgagaatttaatctatttcgcatatattgatcatatttaatcaggcagtaataattattaacaataattttgtgataatgcatggatggatattggagagcagctgctggtagaggagaagcatctgagctcgcagcagcgcgaggtgctggagaagtacaggtcaaaggcggagtactacgtgtgctcctgcatgggccgcaaccccggcggcgccgcccacaacgccggccgcactccggcgggcctcctcttcatccgcccgtggaacaacctccagtacgtctccaacgccgccttcctcctcaccgtctactccgacgtcctctcctacctctccctccccctcctctgcccggaccccgacgccgccgccgacgaggccgctcctgcggcggcggacgccggcgaggtgctggagttcgcgaggtcgcaggcggattacatactggggacgaacccgatggcgacgagctacctcgtcgggtacggcgaggcgtacccgcggcgggtgcaccaccgcgcggcgtcgagcgcgtcgtacgcgcgcgaccgcgacttcatcgggtgcctccaggggttcgactcgtggtacagcgcggcggcggagaacccgcacgacctcgtcggcgccgtcgtcggcgggcccaacggcaacgacgtgttcaccgaccacgcggcgcgtacatgcagacggaggcctgcacgtacaacacggcgcccatggtcggcgtcttctccaggctcatggagctcgagcggcggcggcgcggggaagacgcgccgccgtcgtcgacgtcgccggtggcggaggatgatctgtagtagatgttgtataagttaggagatgagagaatttatatgaccccctctgattggtgaatggtgataataataaaaaaaatgaaaaaagggaaattttatacattcgtttttgtttatatgattcgtagagggtttttttttcatgttttgaaatttgaacatagaagatgtagggattaaaggaatgaaaaaggaaaaaaagaacaaaaaaaaatcataccgatatatctactcccatcatctgcttgatcaattgctcaatttaatgttctgttgcatttcacttattgtctgtttttttttaaaaaaaatgttgggtttcacaagttttatgtttgaaatgggctgtacgatttgagatgatttgggctctgttctaccattatttcttgggcttgggcttgagcccaatcctggaaggcccaaattgctccccttcggtttctccatctcaatttcaacttctccactgatcacacagtccacccgcgccgtgttcggcgaaatgccggcgccagcgccgccctcctctgcccgctccggcgctcgccgccgtgcgcgtcgctcgagagagctcgacaccctcgtgtcggcgccggagacggcgcccgcgcaggagtctgcggccgagttcaaggagagtagagatttctggccactcctcgacgaattccgtcaactggatggtcattactggccgtctccggccagcggcctcatctgagcgccgacttcgatgcctcgacgtcgtcggaggtggaagggggacgcccccagccacgcgacgcgacgggcccctgagcggctgcgctgggtccccgaagtcgccgcgcgcgtcgtcgccttcgtcaggttcaggtacgcaatttccgcaccttgtggatcgatatcgcctgaacaatgttgctgggggaaggctccaactgcgcagctcacgtcgtttcctttggattcagaagttgtcgtggacatggatgttgtaaaggattatgaaatttttggtagaattgccagggttcatcgctcgttt

SEQ ID NO: 2521 - DNA, 5772 bp, Oryza sativa
tcttgatgttattaagtattcaactttctttccttttcaacagccttgttttgaaatgctgagggaatgttcagcaaatgctcatgacatataccattgttgtaggatggtaacagcaaagaagctgaagggcaaggatgaggctgtactgttgagctcttggcaactcaagtaaaaggtgagttatctatgttctggactatgcacttccgctgacttcaaaatgtataaaacctgctcgaatttggttggatcattgacctgttgttctccatgttatgcacctgtaaaattttctcttcctttcaagcttaacttaaaatggttctccttacattgaattaatcgatttaccacttgtgatttgtacgctgttagagacttagatcaacaaaagcagggctaaatgttatttgtccttatttgcaataactttgatattttggtttgggttaattgatgtcagaattagacagagtgatcaactaaaggcatttttcattcagcaatactcgaaatattaactgtcaacttcatgccaccaaataaattcagttcatttatccaaactatttgttgctgaacaggtctgtcatagcctcacacatatatggtttactttattccttgcagaaaaaggtgtttttttttattttacagagaacatccttcaagccttgaaattagttgttgttgtgctaatcttgaaatgtttagtatatttggtgaattatgatgctctattgctctgcaaaacatggtttctgaatgcactattttggttggacaggttaaatgtgttgtaggagtatttttgtttttactatttcgtgaaatcaaaatataaattgatcattccagtgaagcaccctattgtgctattctcaatcttagcttaatatattttccaagcaacaatgattgtaatgcaggctcaatatgttactctggtaaccggtattagctgaaccaaaagcatcaacgcagtttacgctaggattacaaagatttaagaggattattatagcctcatataataaagatatcccattagccttattaattgtgtaccaacatcaatttatgtttatcaattcctataatgtctcgctattatcctgaaattggtgtgctgtggtgtttaacataattctgcagttgacatagctctatccacctcattatagatgattgataaacatttttttctcaagaactttatagtaatatgacctaaataaggtaattctaacataatcctccctaatcctttgactccttgcccttgttgacctcaaatgttcatcttttatccctacttgttcatggatcacaattcaatccctctagagtcgtgtccaagctagctctacctgtgcattaggatttttacatgctcatgagtttcattctgctttcctggaaagaatgtagtttatgtgatcagccaggtgtgattttggatttcatttgcattatgtcgaaatcgccctgatgtgatgcatgaaaagtgtattgcgtactgtttgtcctcctctttatactgtgccgaaaaatcgcctgaaaaagtgctctattccgttatctgagtcttggttgatttcgcttgttggcatgtgcatttgatgatgtcagaggagatcaaatttgttgctgctataattttgtgattgctatgcatctcaaaattgattaacttggcctgcatttcgttgtcttcgtatcaggggtagaaggctcgggtgattcaggtgctgctgttcattgtcggaataaacactgtgccaactggtcttcgggccttgtcttctggctctgatgcaaggatcgtacgccgttgttacactgagagtttccattatactggctggccatccccgcaatgaagcatgtccttatgaggttgtgtgcagcctagatttacctgtgtattaagattgttgcatcctcatggcttcatgagtaactgtgcatcccattgctaaatcctgttgctagatggttgcatatttgattatatgtttttatatttattgatattctgatgtttaggaagttttttaccataggagtaggtttatgtattaaacagatgtgattttcgatttgatttgcatcacgagcaaaatggtcttgatgtgttgcattaaaaagtgtatttcctacatttttccctactctttatctgcactcggtgattactccccaaaaataacctgaaaagtactatttcgctatattagctttggttcattccgtttgttggcatgtacatttgaatatgtcaagaggacatttagtgtgttactactatcattttgtgatgcctttgcatgtcagaattgatgaacatggcttatattttgttgtcttgatatcagggggaaaagggtcgggtgatccaggcgctgttgctgctcttcattagcgggattaacacgctgtgccaattgttctttggatcttgtctcctggctctgatggaatggttgtaccctgttgtagatctgttattacaaataatctgggattcataaagttctttgttaggcaaggttgcatgcttggattggagtagttcctggagagttttggtgcctcgcctgaagtgtttcctgagatttgctttgcttggaaatgaatgtaatctttttttattggcggtttttgttggtttgtaacttactaaatacatgtattgctcatctggtaattcagactcaagtgagttaacctatgctgatgatgttatctgctgctatgtacgtatactactttctttgtggcatctacttatgaactcttcctaattacaatctgctatccaaaataacaataccgtattacaccacagctctcttcaggcggcgcgccagtggcgcgccccatcctctagttttaattaaccggcgcacctcttatggacggttgcccccgcgcgcgcaacgagtaggagaagttagcagccacgtgtaaaacaacgagatagcccaaaaataattaaaaaaatgagaaaaacgatggggttaggggagttattgattgatgatatattaaagcgggtcaatatgccacaaatttgctcatgttatcagcagatcaaacaaggaaaggcttaatgacatactagctgatggggttattgtttagtcgattcctattccgtgttgttgctagaagcttagaacgtaaataagaaaaaaaaattgtctgacataacgtagtggtagattttcggagtgctaaatagctggatcgctcaagcagtttttagataccatgtttacaacaaaatttggtggtagagtgctctgttaaaccgtacacggcaagtaacacaattctgatggatgaaagggataatagtaattgatggatattttacaaaatgtatatggccacttccaagaggtttttgcatactgaagtgttgctgttccagacgaacaaaggttcaagtcatggccattacttctcaagcaagggcctacacagtgcagtttcagctggtggtggtcatctcaccttcctgtagtgaaaaaactctctaaactggagcaattgatcatagacgttcctctctctctctctctctctctctctctctctctctctctctctctctttctctaaaattaattgatcaagattgcctgcaagataattgagtaaaggattagattaggcatcaagataaattattgaactcgttgcattaatcatacacgttttgagagattatttaattaggtgtataactgataaatcctaatcactccaaaaggtgcatcacatggactcagaagaattgcatctatttttagagagaatatagtgctcttaatctcaatatttcatttttatcatttgaattttgttcttgcaactggggtttggaggcagtagaatggtaaaaatgagaatgccatttaaacaaccataataaacagaaaaaaaaagtttcaatctagtttctatcctgcttattttccaattaaaattatgcttcattagaactcttcaaacaaaagccttgctaattctagcctaaacgcaaattagttttttttaaaaaaaaacttgaccacagtaacaccttaaagaataatacatgaatgaattacaacagttagggaagtttgagttatcatccatacacaaaacctaggtgaaatttctagtaccattgaaactaaccgcccattataatttgttctcaaaatcttcagcctaacagatcaaacctagggttgataaaaaaaagccagattgaatctaatcaggtcaaacgccactaatatcatataaatccttcacacggtactttcctagtcgaatcccctcattcaaatcatcacatacatagagatcaaatcccaagcccagaagagtgtggacagggatcaatgatcgaaagcaaaagatattagggcaagcagtaggaacttacctggggttttacagcaacgttattgggcgaagaccggcttatggcgatcttggtggaaatcacatgatggcgacttcggtggtcaacacgttcgcccgttggtttcactgcagtggctggttcatgtatggaggagaggaggagaagagataaggttagtgagaaagaaggaaaagatacatgataatttcaaacagccacaaagatgtttacaacaataagccattctcctccattatctatgacaacagctccaggttactaattaataatataagaaatattatggatcagcctagtctttcaagttaacaatagatagaaatgtatgtgtttatgtggcatctaaattgtcagcggtgaaaagtaaacagttacaggataaggtaaagatgattgcctctcttagaactgggaataggaagttcctactgagtttaaaactgatagattgtagaaatcagataagccttttgtcttatgttctagagatcatttagttctccagttctcccaatgccttcgttcagaaggaaaaaaatgcatgtaactctaggtaataataaaaacaaaataaaggtacatgatgattatacataccagattccttgttcttctgtagatgtccagagctttgataaccacaagttttttcatgtgaaagaactgcaacagttcaaaaatagaacttgattaggatcaaatccaatggatctatctacaattgaacagaagaagaaaccggtaaatgatagaattaccatttccacaagggaccggccactggcagcttcggcggcgggagtgtaggccgctgcttgatgagcgcaaaaacgatggagtcctcctggagcaaagcatcgcgctccaccgccaagctcagctcctgattcatcaccaactatctctctttgagtgtgggctttgctgcatctacaagggataaaaggagtgactgtgtgacggcagatggcatgtggcattggagattcaatttaataaacaagaccatgaaacaacagaaccatgaaattcagcacaattcaaacaagcattggtaaaggtaacaacatcaagtggcaactaaaatcatgcagctagagcctgaagttaacctatgcagcgtctgatatcaacagcaacacgaggtcactgccagaaacagtctcccaaatatctcccaaggttccactctcttcagaaaaaccagcagcacgtgcttcatcaaatgacttggagcctttccggagaccaatctgaaaggaaagggcataatagaatgctggactaacagaacaatgcaaaattgcataagtgaggag

SEQ ID NO: 2522 - DNA, 2669 bp, Oryza sativa
attcctgcagcccgatcgagtttctttcactcgccttcgcttgctgttgctacccacggctgcagagatcgacgctgtactactctgggggccaaggcgattgataggcaaaggcgcaaagcggtggaacacccaatggcggagtcgcggcggcggtggtggggtggattttatacggaggccacgcctccccctcctacgtgctctcgctgtcgacttcgacccgtccgtccccacgctggtgcgtgccaaagtcaacttggcgagcacttgggtttttcggctttaccgagggcgtcgtcgtcgtctcttcgtcctcgcagctccgcgacactgacctttggaggacgaggtgtcgtcgcgtgcctgcgtccgtccgtgcgatctgggtggtgtgggtgtgggtgggtgggtatcctgctgcgctgtgtggcagaggcgcgccgcgtgtgcgcgggcctcgcctgacatctgcgccgcttgattgggttcccggtcagcgccgcaacgatggatggatggctcgggtgcgcgcgtgctgggtcggattagatctggctggtgcttgtattgggacgctcgatcatccactgtgtagaaaaatcttaatcttagtctggtctattattaattttaaacacagacatagtacaacgaattagacacccataatacacgcacaccgtatttatataagcactttcgaaaaaccgagctggtatatcttgagattaacgaagtcaccataaactccccgctatcgacggatacgtcggatatatcgcctaacactgaaaaaataattaaccgtaaatatcatcagttgtttcaaatctataatttgaatgtctaatataaaaaaataattaaccgtaaatacaatcgtccgtgtcaaattaagctttgtagtttgcagtagctatttgagattttaaaaggggtttacgtactatataactggattttttttatgtgcgagccaatcgtgaagcaacaggtggatgagtatgtgacgtgcatggcatgacacttgaacacgcgcgaacgtgtccaagctgtcgtgcaccgttgaagttggatgagcaatgtgcggggcttcttccaaggtggatcgcagcgagaagttgggcgttgttcgttatccacagtggattttcttttttgccccagtgcatgtacctaaccgtactgtcgtccaacaccatcgtggagttgtggctggaaaggaatgaatgtactttccatcgccgagcagtcaacgagcaagttaaattcgcagcattgcgttctcacgtagtacggacggtggctaggagcgacgagtggccgacgcgccggcgccgcggaccgcacgttcgcttggccttcgtggacgctgtggtcacctgggaaaaaaaaggagagggaaaaatcgtcgcgagaacgtttctgcggcgaaagctatctgaaaacggaaggaaaagcgaccgcgatcgaggcgaggggacttccttttccgcggcacgattgctcggtgagcactgagcagtgacctcattcggagtcatttcgtcgccacaaaggggcgttggtcccttgcgtcgccgaaagatcccgtttgccaatccgcaaatgcacaactgagacatgcatggtccctaatacttacaaaaacgtacttacatgtatgcacatacacactgatgtataatttgtcctgcattttctgaagggattcgtggtgatgtttaactgacgaatggtttttgcttttctgagaggaaatgttcggtgcacaaattgcagcccatcacggctagagaaagaacccaataactctggcccatcaaattaacgccttcaaagttgggccgtccaacgaagaggtccgcgagaagaatctaagccgtccgatcacgctgagatatttcccctctcctacggcctccaccgtccgtttctccgtcccacggcccatcatcctccccaacgccggtggcgcaaagccgcaagcaaaacccttcccttcctcggagagaaggtatcggcggcgagattttcctccctctcgccgtcgccatgggcggcgcctccaagctgctctcctccctcctcctcacctcctcgccgctccgcctccgcccctccgccggcgccttcgcgctcttcctctccccgcccgcgtcccgccgccacctgctgctctcctccccggctcccctccgcaccctctccaccgcctccgcctccgccgccgccggcggagcctcttcggattcgtacagctcgggctcgtgccactctccttttcccgagtggtcacgcctggtcgaccgcctctcggcggcgggctacggcgcgcgcgcaccttcccccgccgatgagctcgacctcgaccccgaatgcggcctgtcgtccgacgctgaggccgcggtgtcctccttcctcgccttcgcacgcgaccggcctgacctcctcaggtctctgccgaggaaggacgtggaggtcttggtggccaacgcggcgccggctctgttcaaggacggggaggcatcagagctgcgtctgcggcaataccttgccggggaagggagcgatgtgagttctttccctgtttttttttttcaagttggctccttgcttaatgggttgttggtcttggttgcagtagattttacttacatgtggtc

SEQ ID NO: 2523 - DNA, 2502 bp, Oryza sativa
taaaatgctatcactgaagatctgaaaattttaccaggtgactcagtcagagagagcggaaaccatcgatattgttcggtacttattaagttacgcatacggttctccggtcagctatttgaaagataaggaactgactgattcagctgtgagaaatatcttggctgagtttgtaagttttagtggatttcctcaaacctccagttacgccgaatcaacagctaggcaaaatacattgggctctaggcctccaggacaaaatattgaaatgaagcgaggtgactggatctgtacaaggtatgctagttctctacttctgtctttttattttcttgtttgaacagttgcatggtattgatcaccttactttaaggagtcaacctactgaatgttgtcagttgtcacaaagtatattgtcttaacaatcacaaccaagcaggttttattttgcatcctaccaagctttgaacttttgataacttaatttatgttcaaccaaacatgaccaataattctcataatttagttcaaagagccaatcattccacaatgttgacttgtttgaatgcatttgaggatatttgcagtttttgattttttttattactaatgaattgtttgccccctcttcgtctttcataatattacattgaaaatgtgatttgcaaccttgtctttcatactattccattgaaaatgtgctttgcaacctgcagatgtagctttatgaatttcgctagaaatgcgagatgccttgagtgcaatgagcatcgaccaaagaagatgttgactggtggagagtgggaatgccctcagtaagagatctggcatgcttgttctaaacttatgtgatttgagattcatttttatttcaaattagcttacttaacttctttcctcttgccaaggtgtgtgtattataattatgggaggaacatgtcatgcttacgatgtagttgtaaaagaccaggaacaataccaccaaatcctgctggtgctggtttagatggagtggcacagtttcttaatacatccattgttggtaaatctgaaattgagagaaaactcgctgaaaatgaccagaaggcagaaaggtggttgaacaaagtatcccaacttgatgattctgctgatttaagtagtctagcagccgacgaggattttcctgagatcatgccgattaggaagggggtcaataaatttgtggttagcacacgcaagacaccattggagagaagactggcaaatgcacagtacagcagtaacaatagcccccaagatggatcatctgactccaagataagtaaaacattagacaggattcttgggcgttctacatctacttcggtgcagaacaatcaatctggtgatggagatgtaaatactagttcaaataaaacaacaagcaatcttggtggcattgatcctgttcctttcgtgccattatctgcagatcagtttgctaagccacaaaatagttttggtgatggacaatcagacacccaaataagtacagaggctgattccatggcaaaaagccaaatggattcaatggagaggagagatgacaagcgatcatttgataccactgagaatggtccaagaaagttgcagagctcagtaatgtaaaggactttccaagtgcaatttctgatcaagactttcctgagattatgccaatgaggaaaggtgagaatcggtttgttattagtaagaagaaagaccgctcactgacatcgccacagtacaaaaggcgcagtgtgctcgagcatgctgataattccaatttcatcccatttgtcccattccctcctgattactttgccaagaaaaataagcctgtggagaattcatcagatgcaggaatagtgccagaaggccctccatcagctgaaaaattaccagaaacaaaatattcatctggaaatctgggaaattttcagaacagctcacaggtgatgggcagtcaggcagcaaacaacatgaacaatgagaacaggaacggaaattatccacatcaaaacttgagtacaagtggttatgggtatggtgaaagcatcacttatcagcatcaaccacaatctcaagggatggtcggtcgttctggtggtgcttctgaaactggcactcggaatgcaaacaacaaccagggaagctttagcgaaagcagagatagatctacttacaacaggggaagccattccgcacagccaccttataagtcaggttatggtaacaataacaatgcttggagcagtaacaacaatggcagcaataatgcttggagcagcaccagagattatgacaatggtggtcggagcgacaacaatccctattacaacagcagtacttggagcagcaacagcacctatagcaacaacgctgcctggagcagcaatagcagctacaacagtaacagcgcatggagcagcaatagcagttacaacagtaacagcgcatggagcaacaatagcaacaacagttggagtggctcatactctg

SEQ ID NO: 2524 - DNA, 4405 bp, Oryza sativa
acttgtgaattataactgtagcaccccagtttcttggtttctatatgatctccattaattttttgtgcttatattgttgattatgcttccatgtttcattttatcgtgccccatattgtgccatgagttggtttctacatgttctccattaattttatgtgcttatattgttgattatgcttccatgtttcattttatcgtgctgcatgtgctaattccttcgtttttttgcttgtggaatccaggcaggacattgtgaaagtttcccaagtctgaaaagatggttctgaagtaagttcctgtacctaacgattttgttatgtttagttgatgccttttgatctttttcaaaataagatctcaccatgatggtctttaacgtgttgttttcttggttttacaggactgaactttgccgttttagtgggcagaagatatacccaggcaagggtatcaggttcattcgtgctgattcccaggtaaccctctttgtccattgaagtttgaaagtccaatctatgattaagttagggggtcttttgcatacaatttcaagtgttctcttctgcaggtttttctgtttgccaactcgaaatgcaagcgctacttccacaaccgcctgaagcctgccaagcttacctggacagctatgtacaggaagcagcacaagaaggtgcaacattttcatcagattcattcatatattggcattctctgcccatgcaatcaacaaattcccctatttctgtgcttacgtaatataaataacatgtttattttgatggtttgcatgaatttatttagtgtggcaagcacagtgtctagagttccataaacaacacgattgttccaagtggaaatgtgaagtttgattctgtatatcataatgtctttttgctggacacaatttcttgggtagcaagcctgtatattgcacgtcattgcaattgtgaatatcttatggatacatgcatatgttgtatccttgagccacatgatatgcagttatccaagtacatctatccaccctttgttcatgtgtatgctcatgtgcagttatccgagttttctgcagcaactggctggaattgctgccttatatcatgcccttgctgctatttttctgaatttcaacgttgcactgtaggacattcatgctgaagctgtcaagaagaggcgtcgcaccaccaagaagccatactcacggtcaattgttggtgctacactggaagttatccaaaagaagaggagtgagaaacctgaagtccgtgatgcagccagagaagcggctctccggtacattttccacctttctaggctattggtctgcatttacatatccatttaaattgttttttgaacttgaatattatttatgttggtaaagctgaaatggctgattttagctgctgcccacatttgttcattttcatgtaatagctgttgctccttcatttcagcagatttatttttcttaagaccactattgttgaatgattctgaacttaattgtgcattgtttagtgcatgcttgcatgctatagtttgatcaattagcttcgggtgcttccttttgccccctgaatattttgggccatgcaattttttgctctcagattcaaactaatgtgtgcttttgatatgtttataacagtgagatcaaggagcgcatcaagaaaaccaaggatgagaaaaaggcaaagaaggcagaggtggcaaaatctcagaagacacagtcgaagggtggtgctacccagaggggtgctaaaggtcctaagattggcggcggtggtgggaagcgctgaaagtctcttgcatcatagggagagttcttctggcttagccttctctccggccatatcgtagaaacagtaccttggtcaagttagcctgccgtcttgaattttcacctttttctgtgagatgacttgtcctgaatgcttcgggtattttgttagtcaatttacaattgcacttatgtttggctattataaaattatcaagttttctgcattgacaattgcgcagtgagtttgatggccttaatttatttgccatctgttttgatgtttcaatcagtcagtgtgttatcatgttcttacaccgtatggtggcaggtgccatcgctaaagacgtaactatcgataccctcctttttatttaatatacaggcatatgattattaagatgtttgaagcgaacaaacagcaggcatatgatttttttctcccgaataaaatgtgaagacggcaattatttttagtatttaacattgcagtaacctagtaataatctacgcccaagacatctttacttagatttttatctacacattaagacatctttgtatacttccatttttttctcccgaataaaatgtggtgaagacggcagttatttgtagtaggaaacattgcagtaacataataatctacgcccaagacatctttacttcgattttcatctacaccttaagacatctttctatacttcgatttaatcagtaataaaggctgaaatgacagaagtatgataaatttcctcagaaaagttgacaactaggcctgaacatctatattcacacagattgacagtatgatgcaatgtatgtctttgctagtcacgaacctacgtgttcgccggattaagccgcttcaacagcactgcatccaggagatttcctcacatcagtatcagccatacattgcctgacgttcatagcttcgctccatctatgagcactcgcatatgcattgcttaacagagtatagtttccgctgttgctgggctctaactcattgagcttcttggtgacgatctctgcaatggctacatcaccatgcgtattgcatgatcccagaagtatcctccaaacaacagggtcaggatctatgggcatctcagtgatgaatctcagtgccttctccaactgaccagcacggccgaggagatcaacaacacagccgtaatgcttcatctggggttctaagctgtaaagtcttttcatgctttcgaagtggtcaagcccttcctcaacaagcttagcgttcgcgcaagcgatcagtacaccaaggaaagtgactccatttggtctgaatccttcagtaagcatagcttgaaacaaattcagagattccttctcgaagccattgtttgctagcccaattatgattgagttccatgacaaggtgtccttctccttcatttctttgaacacttgcaatgcttccttggcacttccacatttcatatacatgtcaatcagagaattctccataatggtgtcagctttgatgttgtttctcctcacgtactcatgaacccacttaccaagatcaagtgcacccaaatgtgcgcaagaagacactacactggcaatcacaatggcatctggtttcaccttggctctctgcatttgcctgaagatctcaagagcatcagagaagtgattagcttgtgaatatccagatatcatagaactccatgaaatcaaatctttcttaggaatttgatcgaatattttccttgctgaaactatatcttgtccttttgcatatgcagcgatcattgcattcattgttacaatgttcctaaccttcatgttaaagaacaccttttcagctgattgtaactgtccacgtcttccaaagtaatctaccaatgtattgcccaagtaaacatccacctcaatgcaataatcctctatgtacctgaccatgtaatctgccatgctataatctcctaaacgagtacacgcagaaacaaccttgatcattgtaaccttatcagctttcactccttcattctgcattaacttgaacagtgccaaaatatctttaaatctattgcactggctatatccacagatcagcgaattccaggatacaacatccttaactaccatctcatcaaaaacagatcttgcataacaaagattaccacaggcagcatatagatgaatcaacgaattgctaacaaagatatctgaaagaagaccaagttttgttatatggttgtgcatctgttccccttcattgagagcattgattctagcacaggcctttagtatgaatggaaatgtcaggttgtctggcaccattcctcctccttgtgccttcttgtagaaagcaatggcatctgccggtgcatcactttgagcaagccctctaattaggatattccaaagaaaagtggttggtgcttcaatctgatcaaacactttatgagcaaaaaccaaatctggttggagaatggcataggatctgagaaccttagacattgcataatggcaattgtacagcccagaaacgatgtaataggcatgaagcctttttatggcttccatccttacaatgttgaaaaatgactgaattgttccataaacaatgagctagttaaggatgag

SEQ ID NO: 2525 - DNA, 11961 bp, Oryza sativa
  unsure (1)..(11961): unsure at all n locations
ttcatggaaaataaaaaggtcaaagaatgcaatgaacccaaccttaatatgaaagatctttaatcacagttggtataacatagggaggtaattctaagattgcaacggaaaactcccgactcaattgagagagtttctttccaatatttagtccttatcccaggaattctactgagtcccatcaaccaaagcaagcccaggaaccttaacagaattcctctgatcgactagttttcgtactatttcagcatcactaaacctacgaagctcagtaagcatattggatagaaccacaaaatcaccaccaaattctctttctaaggctaatatcttcttcattgtcctctctcccatctcaacttctccatacttactgcaacaacccaacagcgtcctccagacagttgcattgacttccacaggaaaatctcttattatctgctcagcttcacgcaaacgtccagccctacctagcatgtctatgatacacccaaaatgcttgacatctggatttatgttgtattcataaatcatgcttttgaaaaatgcaactccttgctctaccagccctccatggctacaagcatggaggacactcaagaaggttattctgttaggtctgattccagctcttctcatatcggcaaacagttcgactgccttaactgacaacccatgcattgcaaaacctgaaattattgatgtccatgacaccaagttccttctgtccagcatttcatcaaacacccttagcgaattctgaatagacccaatcttggcatacaagtctatgagtgaattgccaacccgaacatcccacacaagaccctccttctcacaatagccatgcaatgcttccccgataagaatctttccaacattagatagtgcaggaacaactgccaacacagttatctcgcttggactaatgccttctgccatcatgcggcggaaaagagcaactgcctcgacagggcgacaagcacgcgtatacccatctatcatcccgctccacgaaacaacattcctacaaggcatccgctcaaagagcagcctcgcatactcaacctcgccccatccagcaaagcctgttatcaccacattccaagaaaccgcgttcttcaccggcatttcctcgaacgccatccgtgaatccgccaggcacccgcacaagatatacacattgacaagggcagtatgcacgtaggtctggaactcgaaccccttccgtacgacaagcccatggagctgcatgcaacaccgcggccaccccaggccagcgcaggccttgagggcaaacgtgaaggcgtacgtgtcgtcggccgcgtgccaccgcgcgtgcctgaagagctgcagggcatcctgcgggtgagggccatgcgagtaggccttgaggagggcgtgccacggcgtgggacgccggtcgaacacctggtgggcaatgagctgggagtggatctgcaggagctggcgcctcctgtcctggtgctccaggaggagcgccactaggcggcgggcggcgatcgcatcgacgggtgggcttgtgcgccccaagaagcgaggtgacagcccagccatggacggctaggacgcgtggttacctactacctagtcttcctcccaaaccccaaaaccctagcacaatacccctcttatactctagtagttgtcacttgctagtgcaatcgatgtggaaggtgaagcaagcaacaatggagaattggagattggagaggaagtccatcgtttttgctcaccttgggttgcacttgcacttgcgctcggatcggcagcgtaaatgcgacggggaagacgaagcaaacgccaaggcgggaatgcagtttacgctttgcttacactcgtggcgtaacagccagacgtaaaaggcggaaacgcgtcgcgcacacacacgaatcgcgaagttcgcgacccgattcctctccgcccgccatgctgcggagtctcctcgcgagagcaatcccgcgatcctccgccgccgccgccaccacccgcggattcaccgatccgcggagctttcctctactctttcgcgaaggttcgcgtctctccacttcgcagggcggcatcggcaatggcggcggcggcggcggcggcggcaatggcggtgatggcgaggaggatgaccccttctcgttcgcggacctccagaagctgccgccggacgtcgcgcgtgacgtggaggccgtcgtcggcgcggccgaggggttccatgcggacgccgcgcgggccaggggcctcctggagcggtgcggcgccacggcgtccgagccggtcgtggtggccgtgctggaccgcctccgcaacagctgcgccgcggcgcacgccgcgttccggtgggcctcggcgcagccagggtacgcgccagggcggcacgcgtgccactccatgctcgccatcctcgcgaagcaccgccgcttcgacgacgcacgcgccctgctcgaccaaatgcgccgctcgtcgcttgcgtctccggccgcggtgatgcttctcatccggcgctactgcgctgcacgggacgtcgccggcgccgtcgcggcgttccgtgcgctcccgaaccttggtttccggcctggcgtcgcagagttccatggcctcctgaccgcgctttgccggtacaagaacgtccaggatgcggagcacctgcttctgtccagcgagaaggagttccctttcgagaccaagagttttaacgttgtgctcaatggctggtgcaacatggtccgcagtgtgcgggaggcgaagaggttttggaatgccatggaaattaagggtattaagagggacgtggtatcatatgggagtatgatttcgtgcttctcgaaagccggaagtttggacactgtcatgaagctctttaaccgcatgaaggaggctggtgttataccagacaggaaaatctacaatgcagttgtctacgctctcgccaagggacagtgtgtgaatgaggcaaaggctcttgtccggagcatggaggagaagggggttgccccagacacggccactttcaactccctcattagacctctttgcaaggctcgtcaggttcaggaggcaaggaaaatgcttgatgacatgttagggagagggctgtcaccttcagtgagaacatttcatgcgttactcgatgtggctagaagccccattgaggtgtttgatctgttggataagatgaaagaattgcagtgtgacccagagatggacactttcattatgttgatcaggaaattctgccggtggaggcaacatgacagtgtggagaagctctggagtgcaatgcctgcaaatgggctaagccctgataggagtgcgtatattgtattgatacacggtttattccttaatgggagactggaggagtcagcaaagtattacgaagagatgaaagccaagggatttccacctgagaagaagactgaagaaatgatacaggcttggctttcaggcagagagcttgccaaggcttcagcttcagtgggttcaaggggtggttctgtgtctctcagatcaaatcctcgaaagtgattggatgatgattgcccttaaaaagtgatttatgaaaagatatgaagtaggggaggaagattcgctttgttcttcatgaagaactgctagaaacattgaagaaatcatttctttcccaggctaaagagaacagaagagaagctgaatgccgtatgttttcctagtcattgtggtctctcttgatatggttgtaattactaaatgcatgatttgctgaaacacttcacaagtaagcatgtctggtttgctgtatccctttatttgtaccttctagcttgtcctgacttacatgccgaattgtcagtgcaaatagtagagcagtttccatcatattcatgatccaaatcgtttcatatggatcaatgttatttcatatggagtatttgttttcaatgttagcatgccagggtgaactggcatattctgaaacaaccatgtaatagtttttactgttctcaacattgtgtagaacctacaatgttcatttgtatgatatattttcttcttgatgatgcagctctaaatcgcaccttttctgatggtactattttagtgccgtgaatatgaagaatcttcctatgatagcacattggatttgaagctgggatggattaccactagcctggtactaatcattacattattaaatcattacaaggtgagagcatacctgaactccatattaatccaatctgtctactttgtggcctaaaataatgccaacttgtaagttgcttcaaccacactgatgataatatatggtattggtcaaacaccttatccttgtacacctgaagacctatgtatcacattctgtaggatatactcatgctgcctgcaagtggcttattctgccatatatatcttcccccaccctgagctctttgatatgctctctagatgacggcattatctctcaaccagatgcaagttgctttaaaattttactatctgtagagacgatgacatattaacagatacatttctggggaaaagagaagggctcactttctgtgtgcaactcgcagtcatggttgccgtgattctgttcagtgtctttttcatggtatctatctatagttgcaagctagtgtcgctaactcaaatgagtcatgatgcgactgacatagtgcatgcctacgtcttactttaatcaattgatgcatggtcgcattccgtttgcctatgcaatggatgttgccattccatcaatatctgaaacccctgtaccacaatttggataaagaaccaaaccttttgtttttttaaaaaaaaaaataagtgaaaagatgaaaatataaaatacttaggataaaacatttaaaaccatcaagcatatatttcagaattcagactaatgaaggataaaatcatatatgtttcgcttaggatatgagaacaaaaggagatgttttgcagattaccaaatgcatatactgaacaaatgaattacatactgcaagcatctaccaccacatttgcagaatcatgcttgccagatttctaatcattttcgttctagtaaatctaataattttctagccatcactcctatttccgccctttatctacagcaacctttttcttgctccatccatctcagaatggtggcaggattgtctgccacatcttcatctgcggcgagctgatggactgcaagtagccgccgtcgtgccctggcgccgccggattcaccatctgcatctgcatgtgctgcaggttcatcatgtacggcggctgcagctcgtcgaagttgaggccggtgaaccagtcgttgtcctccttcaccgtcacgaacccattcctcggcggcgccacgtcgccgaagccgccgccgccgcagccaccgtgccgcaggccggcggaggcgttgtcgatgtcggagtcgtgcgtctggaagctgtcggacatggtgtcagccgccgccgcgtccatgacctcgccgttctgatggtggtggttgcgcggcgccgccgccgccacggaggccacgtcctgctgctccagcttcaccttctcccagttgttcttcttgttgtacagccggcacagcacccactcgtccagctgcagaggaacaaaacacggcgagatcgacatcagcatcaatcagttcaacatcatcaccaatcgaatgcgtcggagtacgcgtcgtcacgacgcctaccttctgtgagcccttcttgccgcccggggcgcggtcggcgtcggcgaggcggtactcgtgcatgatccagtccgtcttgacccccctcggcgccttcccggagtagaacacgagcgccttcttgatccccaccgtcctcgcgctccccttgggcgccaccggcttgtcggctcccgtcgccttccagtaccctctccccgctgcgcggttcggcctcgacccgttcgggtacttccggtccctcggcgtgaagaagtaccactctttcctcccgaacaacgccttctctgcgcacacacaaaaccacacaaacatcagacacaaaaccaaaccaatggatgaacagatcgacggagagtaccaagaaaagaagaggcgtacgtaccagggagatcccaggggtcgagcttgtagaggtcgacctcggcgatgattgggacggggagcggctgccgggcaaccttgcggcagaggtagtgcaccacgagctcctcgtcggtcgggtggaaacggaagcccggcggcaggttcagctccgcctccgcgtccctcctcccgctgcccccaaccgccgccgccatttccatccttctcctctcgtgaaaatgttggtgatgacacaccaccaccaccaacgctgctgctgctgctgctgctgctgctgcctttgttgatgctgcgcttccgtggcgaccaagtcggttcgtggcctcggacacgaggtcgcggctatatatgggggtggctcctccggaacgtgggctgcaggtgggcccggccctgtcccctcctggacctcgccggatgaggatgtgcgctcgcggctactacgacgaaggttctcgcgcgtagaaaatagcttgacctctctcaaagggcgaaagcctcatggaaacagaagagtcaaaagacagacaagctagcgagcgagagatagatcttccgcgaagaaaaaatattgtaatctcgcgccggctcatggcttgtggatggctgtgcgtgcagtgcagcatcgccaagacaacaacaactcgatgtttttgactgtttttgcgcacacacacatatctgcccccgattgtttcgtggactccggcgtcgtaatcgcccggcgtgcgtgcttaagctttcacctgctgcaccacgtgcgaattttgctctgcttctttctctgcatcggttgcgccttgcatgcagtcagtcagtcaccagtcgttgtgtaggcaggcggtgcccaggaaattcctgcctgcgttgtcgacgcatatggaattcggtttttaggatgtggatttggtagtttctctagaactattcatttcatttgcctgtcaattggagtattggacggcgtcttggcttggatttttctttcacttgcaggggcctacgctaagaggaaaactcgcgcgcacgaaatgaaaggaaagcaattgagncggacacttgggggggncccggnatcacttcgatcggtctgtctctgaaacgatgcattcaaagttgccaattaccggatgctttcaatcccccggcgctgcctaacgtgatatccaagaatctgacagctttaacacaaggagcttaatgcaagccggccgcgtgttccctttactaatctccgtagcattcatggttctatgtgtccctgtcaggctgtcacatactagtagcatcactgatcgctctaactgattccacagggaggctgtactgcccaactgtagcttccatatcgatccatctaccgatcgacacacgaggatatgcttcgaatatcactcagcaaattcagaagggtatcgtttccattcgcctccaaactatggaccgttcatacttgcatggcaccaccacgatttctcactttttatcacagaatcacttcgcttcgcagccaacgagagagagtaggtgcatctcctctaaccctctcgccgtcagtaaaattaaaaaggaaaaaaatattttttatgctgccattctgcacgtggctggctggacatcgatgatgcctatccatccagatgcagtgaaccagccgctgcctgggtcgggtgtgggtgcgatgcgagccgcaacgtacggcgaaggtggcgaacaaatccacaggtggttggtacgccatagtgccatgttttcgtcctagaatacaagcgtttagagttttctacgggtgtaaagaaaaattaaattaaattacagataattaagataagtgacctgataaaaatttaaattagagatgattatagttggttaagttgagaacctgaggtagtagtgatagtaatggagaagttctacattatattaaattttaaacgcagaaaatactatcttttttaggccggaagaaatagcactatggacacaacgtaagatggctaagacctagtttagttccccaaactttttttttccaaaaacattatatcgaatctttgaaaatatgttagagggaaacgttgagaggaatcttttgagcctaactaatcccacttatggctaattatagattaattaggctcaaaagattcgtctcgcggtttccaggcgagttatgaaattagtttttttattcgtgtccggaaacctcctccgttatccggtcaaatatccgatgtgacacctacaaattttctttctatggctatgtttagttcctgaaattggagagaagtttggggaaagttgatagtttggaaaaaaaagttagaagtttatatgagtaggaaagttttggatgtgatgtgatatgatgtaaagttgagagtttgggggaagtttggtgtgaactaaacaggacctaaacaagccctaaatatgctgcgtcatgtcgacagccgatttatttttccattcctccggtggtagactatggtatatggtatgaaaaatcagcccaaaaagggacggacggcggctgcgatgagagcgatggccggcttgttttgtctgcttccctggggaaaaaattagcactactgcaggtctctggttggagctttaattgaaaagtttagttgtgttaccacacaactggaatgatcactggaaaactttattggcatgacacgacagtgtgtgaagaggctaatttacggttggtggcaagacgattagttgtcttctggttagctgaatttacagtgacagaatcatgcaaaagggatttacatcccaaacaagcgtgagccaaaagtagtaatattttagggtagctggcatcagttaaccctagtggtgcacaaggcagaaacttcttgatcaagtattgttttcttcaacatcaaaaggaattattgatttgttaatcgaggtggatgaaggcataaacccacatgcatgtctaccgcttgaccccgtacaagattttaatcctcccttttctagtcggccactaacgttggaatggagcttaatatacacaggctagctaggtgggccctgggcagtgcctccaactggcagttaattagcagcaacgttcatctttctagttaagatgcactattgaattcctcaggagagttaattcacacagaaaaaatatgaacattaataaaaaagaaacccactaaagaaaaaatataaattactcccttaaactatcaaggtcgatcaaattaccccctaaactcaaataccatatatttttaaccacgaacttctaaccggataaattatcccccctagaactgttttgggtggttttaaccaagagcttgcacacatggcgtcaacgtggcaatacagtcaacaaaaataataaagtcaattataggtcccatctgtcattttctttcttctctccctctctctccaatatcctctctttcctctctctccgctctctcctcaatgggaatggtggcgtcggccagcgaagaaggcagggctcagcatgagggaggcagccgaatgcgagggtgggatgtggacggcggccggacttgcttcgaggtggggaacttcagctagtggtagcggcggcagtctcgagcgtgagctcggtaaccatgccaacgccgtagccacgtcctttctccaccgccaccatcaatctctccgatgggagcaaggcgacgcaaagaggggcaacacctacgtcggcaatgccttctcgagcgaggtgggtggaggccagcggagctcgcccgggtggccggtgactgaagcggagctcacctaggctgccggtggtggaagcggagctcgccccgtcgccctcaaaggcgtcgatgtcgcccgaatatgcgccatcaccgtctattgcactgccctccgacccgccacctgccgcctcgcgcgtcgcctgccgcctctatcaccgctcgcaactatgcccacatgggctcgagcccttcctgctgcctcctgctagggggttatttgtttggtttgcataattagggggcaaagaatgtctggttttgtggtttaggggtgtaattcagtcgacagcaatagtccagggggtaattcgtactttttccttcgactattggttactactccctccgtcccccccaaaaaaaaaatcaaatactagagtttgaattttgtcccacaaaaaaccaacttctaccattctatacctacccttagcacgtaaaacaagaagttttaccccttcaataccctttacctactcatcactcttactttttttttcaatgattaagggcattttagtcattctccatctccaccaattccaccttgggatgctatgaatgtaatttttgtgggacggagggagtatgtgtaaaggccagggagctaatcaacatattaattacttcaagtaaatttcaatcaacctatgtttgatagttttttttaatacagggaacagggattatattacttaactaaagtatcgtcacaaacaagttgtgagataaacctatgttttgttgttaaagctgcataacatatactatgatatcctttcaaaaaaaaacatatactatgaccagtggtacgtaatcttagatataatggttcaaagtatcatataacattaggtatacatgttgagtatatttttacttaaacttttaaaatacaacatatatgatttttttttatttcttgactgaggctattggtttaactcttggctagttaaaaataataataattcagatatgataaatttaattttgatttaaataagggtggggttttatatatgaaacatttaatacatgtgattctctgtcattttaatcataaaatataaggtattactttatttttgaaatacctctcgatcgttgtactatctacaataagtgtacaataagtgatttctcaactttagagtttacatcaatttaagagcaattttacggtacttgagaaggtaccatgaggtgccactttttctattgtacatttggtacctagatactatgaggtactaaattttacactaaattttttgtacctcctcaataactataaaattactctcaatttaaagtttaatatcttcatagatgaagagactaatccaatcccattggttgagccacggcttataagtcgagaaaagcaaacgatgtaacaaaaaataataattttatggtaagaatgctctgatttttggcgatccaaaagccaaagctcaaaaaaagaaaaagaaaaacaatgggaaaaagcctaagatcaacagtataattagattgtgtacttgccattctagctttgttataagtcaaatatttatatctatgtctttgatcattaacttgttaaattcatgtagttcaataacatgaataacgtaaatcttatgatgttgaactatatgagttcttagaaattaataataaacatagaaaattaatttgactaataataaaattagaaagttaagtaatgtgaaagggcatgagtagaatttgattctcgatcaacaatttaaaagttctgacgagtaacatcactgtggtcaacgagatcggctaatgtggtcactgggtcagataggcatatccacggaagatatccatggtgctgtgtctaggccggaataatcgatcatgacgcaagagcggacgcaacgagcgacgtcgatcgatcgatatccgaggatttaactctcttaatcgcgaaggtgtcaccacagccatgcatgcacgcatgcattgaccggaccaaaccccggcccggccgtgacaggtccgacctaccggctggctggctacaaccgtccgtgcgattattgccgagtcatt

SEQ ID NO: 2526 - DNA, 2131 bp, Oryza sativa
ccccgaggggctcctctctcaaatccatcaaccatcacaatgagacaacgattaatcaatccatcactttcccatttgctgctctttggtcaccactattaatgtctttcagccttgccaacgacagtacgacacgagacatgttgatcgctagccatatctgacagtatatcaagctcgtgagtccacagttgaaaatgttactcagctttctgcccactgtcttgtctgcagaggcgacgtcgatcgtgtcgagagctgacgacgaaacgctctgagctgagatttctactgcacaacacccccggaccttaagcgattgcagtgcagtagttaactgttcaacgtcactctctcgctctgcgtcgtttacgccactcagaggagagcgcgatgtgtccggaaatgatcacaaccgaacaaaacattggacatcaagatcgtcagccacacatgcagtacgcaattatggtttatcaaatcggtagcaccactaatagtcaacgatcgatggagacaatgcgttgattgtactaattaatcaggcatgagatattgagctcgtggatctcgtagaaatatatttatctgctattgtcattgagtaagcagtacacaagatgtacaaaacgggcggatggggtggacatggacacatgtacgtgcagatacatatatcacaaggaacttgttgaaaagtttccttctcttttttaaactagagtggtagctagctaatcaacctcttcacccgatctgataataatcggtgaagacttaactaactaagcccctgtccaagcactgcatatatcacacatgcatgtcgatcactacgtacaaaagctaatactgaatattcctatatgtatcgatcaacaaggccctgcagatcagatcagatcagagatcgtttcatgctcttccagggctcttaggatcatggcggttgttggcgccggagccagggtagtcgttgacctcgatcaccatcctcgccgccacttcgtcgaggtctcgctcttcagccgccgccgccacaacctgtatcatcagccacaggattacaaattgttattaactacgtatagataaatatcgaagtaatactgtaataatataaaccaatttgcggtagtagttaaaacagtcgagaatgttcttgcacgaactgaggtgagacactactaaatttatctggaaaggcgtttgtcagtggggaaaacacgaactgtgtgcacaagtgggaagtgtggccatgcatgtgaactgcactatggccggcctagcaagcagctagctgtgcatgtgagtggagcgccccagcgacccaacagcagaaacagctgctgctgcatatcacatatgctctgatctgctctaaactcatgactcatgagagagctcagctcacatgcaagggaaaagccacgagctcgtcaacctgtagatagcttattcactgtgcgtttgcctactacttgcgttggccacctgtgcggccgcgagagacgctgtgcaatcggggtgatatggccatgcgacacgctgcactggccctgttggtgtggtgcgcatagttgaatagtttgtttgcatgtgagtgctttgccattcacgggagtgcatggcactatggcactatgcaaccttgtggagaagaaaaatactgtggcttttgctttaaactagagtctagaggcacagttaggccatatggtactgacagttcaataatcaccagcaaactaggtagagtaatttgacatatcagcctgtgtgagagaaacaaagaaagaaatacctgaacaggcgcctccagagcagagactgatgcttggtggttcctcaaggacacgcttcctacgcaaacaagatcagcaactaatcaaccacaagcacggatcatcgacatactgaattaaaacagagcaagaattaatgaaaatcagccggagacatcaatcacttactggacagaggcacagatgaaaccaggggaagaagaagaagaaggccacacaagattactagaaccaggagcggcgccttcctctgcgaaacctgctccatcttcatctctcctgtatcgttcgaacgtcctggtttgtttctttcaccgccactgggg

SEQ ID NO: 2527 - DNA, 2138 bp, Oryza sativa
taacctctcccccactctccctctcctcatttcttcttctcggcgaacggcggcgggacaacgacgaggagtggtagcaacagggctctcctttctccccaccctggcccctttggctccgggaactggcggaggcgacatctggcagcgagggcacagcggcgggggcgtcgcatggcagcggtgggagcggcgggtgaatggcagtcccggccccttccgccccggcgctagcgacggcggtgtccggcggcgagggcgcggcggcgagggcccgatggcgagggcgttggctcccaggcccaccttctccgtcgtcaacatctctgccccaccacgcgccttccgctcggccctgccgtgcgtcgtccgcatgcgtcggtgtcggacttttttcgcccatgccgcctccaggaggatggcccctcgccctctcaccggagaccgagggggacgacgtcgccaaccggggcctaccctccacctgcgcgccggtcatcccccacgagcccgcctcgacgaccaccccaccgtccgcctctccaccgccgccccgccccttcccggccgcggccacagagggccctatgccgatctggtgggccgctaccgcccaccacaccatcggaccccctcgcctcctccaccgccagggggacgggacccctcacttcttccacccaacgccctccgtcggcactgccgccgcctgggggatctgtttccgccgcccctagggggatgaccgcctcttcaccattgtcgacgatgctctggactccgccaccttccccggccaccgctaccacagtcgtattctgtgccatcgcctcctcttccgcgccggccacccacctgcccatgtcgccgccgctccagagtccaacccagttcctcacagacggcaacatggggaaagagagagggagataagggcgagaaagagggaattggaagaagggttggaaagaggatgacatgtgggcccaacatgtcagcgggtcctactatgttttcttgtgtgaatgacaaataggtcccacatgcttatatttaattctaagatcatataagcgccatgtcactgtcacatgggatgaagacaaagtcaacaccgccacatcagcgccatgtcagcaaaaccgctattgaaaaccactaaaggagtcaaattacaccagtttcaattatatggccaaaaggcccgaggcccgacggcctaagcacggcacggcccatcaagggtcgggcccgtgccggcccggcccgaccaccgggccgtgcctgggcctctccgccggcacgttgggccggcacggcacgatgggccgcatgccaggcccgacacataaacaatagggagtaaaaatagacatattatatgccacggtcgaaagaatagggacgtaaatagacttattttacctatatatatgtcagcccaaagaggagggacgaaaaatagacttttttcactatatatatgtcacagcccaaagaggagggacggaaaatagacttattttcgctacattatgtcacagccaaaagaggagggacgaaaactagacttatttaaaaaaggcacgatgggccacccgcgccttcgagccggcccggcacggcccgacagctggtgggccgtgcctgggtgggaggcgcagcccatgggctggcacggcccggcccgatggctggtgggccgtgcctggtccgggccgtgccgggcgggtcttttggccatctataatttcaatagttcggggagtcatcctatccggttttctggttaaggggtataaattagattcggtgtactttttaagggggtcaaagtggacttcttcccgacctaaaatgattgttggccctgctacccgagatggctggcccgtttgcttgtctgggctgaaaaggccccctttgctcaagtcccgatcgccatcagttgatgctgtaattgctttagtggtgtgattacatttgtcgacaaattttctcctaaaaatttgacagatgtaattatagtacaatcgtagtgtaattacactgtaacttatatgtaattacactgtaacttacatgtaactacagtgtaacttgtatataagtttcgtaacttgtatataagtttcacg

SEQ ID NO: 2528 - DNA, 2360 bp, Oryza sativa
tacagtgtattttcttgtaagttacagtgtaatttatgaaacttacactgtaacttttgtaagttacactataatttttgaatcttccatgtaaattttaaattttgtattggatttggtctttttcttgaggatatggtaatttattgtctattatggtgtttcttaattgctttttgccttttattatatatatcggattttaatctaaagattaaaaatctgtgtgatacgatcataaaaatctttcgaaagatgtgatgtataggtactcccaatgttaaactggggctcttcctgggccgaactatatggttctacaacagagatcagataaaatctctgagacctgtaacaaacaatccgtaagctttcaggagaacaaaaggatgtgcaacattggatagttgcacatgaaacaatcctaaaataattaacttgcacaaaaaacacacacacaataatttcgatacgaaaaggtagggagtacaacagaaaaccaaaagacttcaagcaattcaacttccgcaacagttacgattttttccccacgttttcctatgaacgcagatgttctaccagtgttcccacccctataatttcatatgctgggagtctggaaccccggatcacccctacccattgcgaagaacaaatgccagctgaagggtgctgagcaacaaacataaactcgcaaaattgtaatgtaaatcaaagatgtaagcatttcaacctcaaatgctttagctagagctgaaaataattcacttgcaccaaaaaaataatttcgacatgaaaaaggtaaggtgcacaacagaaaaccaagagacttcaagcaattcaacttccgcaataattaggaactttttttctactttttcctgtcaacacatatgccctatcacactgttcccttcacccccagaatttcatgtgccggaaccccggatcacccctagccactgtaaaaaaaacaaatgccagctgaagagcgctgagcatccaacataaactcacaaaactatagtgaaaatcaaagatgtaaacatttcaacctcagatgctttagctagagctgaaaatatacagaatgatcaatgatcatggtagaaaacatgaactcaaaatacatatacaagcacaggaattgttgtacacttggcagttgtttataaaaaagaaggtagtaatcaataagcattatatcatcgtacgggaatgaaagacaaataaaataaaaaaacaaacatggaataggtgaaacttccaaaaaggatgcacagtgtgacaatgacaggaaaaaacaagtgaaaagtactaatgatcgtaagttttcagtaattttctaaatccttagctctgtttataaaatcaagtaactgaatgtatctttgggttgaggcgtgagaacccacaatacaagcaacaaccctgaaatatgaaggaaaatatgacatagaagtagataaataagtaagatcctgaaatggtatttgacaccccaaaaggtaaggttctttcaccaaaagcacacagcaatatgataaaactataaagtatttgcatcaaaaaatgtggatcataaatataggtgatggacaagaaagcatatgaggtaatatacctcttaaaaagaacacaggccaataatggcatcgcaaaagaagtgcactatgatacagtgtcatttgccagataaagaaacaaagtaggagactgtagaaaattagtgagggcaatcacaaaagcgatgttttttcctttagggtgggatgagaaaatatgaaataaaactgatagacttagttatgaggattgtgctactaaagctgtatgctaggacacaaggttatcacaggggaaagaagcaaagatcattttgggacagatattccaaaagttgcttatcggttgataaataatatagtgaactggccagccataaattttgttaaaatgaagctgtgttatatgattacatttgaagctgtgactatttagtcatgactgcgtgaaacaactgcgcagctgaagccacttagaagctgcccctcgtataagttcaagcaattatcaaggcagccaaattaaggttaaacagactcagaatgggaaaaaaaacatgaacttgagaatgaacagagtactgtatgtctatattgtcatggtatgaaagccagtggataacagtaactagtcatatttcataccacgggccatgaaaaaaaatgtcctgagaaagcagaagctacaagaagtttgcaattaaaaataacaatacttgacctcaacgtgaatggaagagcagtttgtcatcctagtccatcaaggagcaaaatctatacccccaataccgcact

SEQ ID NO: 2529 - DNA, 5050 bp, Oryza sativa
ttcctgcagccctactcctactgggcacctcgcgccccgcctgcgcgtgcggctcggtagttttctgcccgcctcgcgtcgcgtcgcgttctcgcgtggcgtggtggcgtgacgcgctaggtgggcggggaaaagcgacgtcgaggctgtggagggaggcaaccagccgaaccgatcgagggacgagtggaggggagccgaacgagcgtgcgtgcgtgcggacaaaggccggcgctgaaacggagggcggtgacgcatccaacacggcgggcgcactgaagtaaacgcagtaaataaacggacacggaccaccaccaccaccacgtactcctgtactgcagctacagccgccaacgagatgagatgagcgcagcagccgctacagatgtcaacggtgcgcacgttacaggggggattggacgtgtcacgcccgcctccacctttgattgctcctgaatgttctgggtcaaaaatttccgtgcacatcgactgctgaaatcgttcgagcgcacgtctctgccaccaccaccacctgagtttcgtctactgctagtagtatatggttccttcacgtttcactgctttggagcttggagctgttcagattatcagatatggtttgctgaatttttcccttgtttctgtaaatcgttttcctgtcgctatggactcgaggaatcccttgtcagacaagcaaaacatacccgtcgagacagattgcgatgtgttgctaactggccgtaaacaatggcgttgtcttggtgacatccctcaaccatctggctccttgatcggacatgaggagatgaaagttaccaaacccgcggcattcggcctctgcttatgctatacggaaggtttctttagcatttttcgtaccgtttggtcagataataacgtcatggtgtcgtaggagaaaattactaatggcacttttgacgtgagatcaacggactaatgataatggcacatgtttgtcaatcccatgaccgcatttcgtccctaaccaggaggtgtttttttttcctcgacttcacatgggatggtggcgtctttgattcagtgatcaacgcgattaattagtgcctgctcatccttgaccgtgcttgtacgctaacgacaactccgttgctgaaatctggatcgctttgcacggtcgcttgggatgtgaacacatggatactccatacaaaaaaaagaacatctcaggctagtctgcatcggtcgagcacaaattcggataagtaggtacttagaatacgatcctttcgacttgcatgtggcaatgttgttctgttaatagtctgaactttgtcctctgcatccgtcgcacatgcatgtaaggttcctgacggaggtgaaaggcatggctaacttacagtttgttgggtattcttggtctggttctgtgttggatttcgtaaagaaacaggctcgaatggaatgagtcgtttcttgtgtgtttcgtcaggttatatgttggatttcactacgtgaaatcgactcgtatgtagaccgagtcagaaagggattactggccgtcaagagtgaagacgaggtatcctcgcaaaagttgcaaaaaaagttcctcgaaaaaaggataaattgataagaggtgattgaggttgacgaatcctgcacgggcaatcacctccctgaactaagggtctgtggggatcgaggagattgagaagatacgtaaaacgaggtgattcattagctcatgattaattaagtattaactattttaaattttaaaaatggattaatatgatttttttaaagcaacttttctatagaatttttttgcaaaaaacacatcgtttagtagtttgaaaagcgtgcgcgcggaaaacgatactcaatctcctctatcaccctggaacgaacagagcctaagggcacccacaatggttatctataggctctataaaagagatccatgtcaacatattttcctacttggaagatattaaatgaagatagagagcaaaggtatctactaacttagagatagtctatagagaaaaacgagacaatacatgagagagctatagatacacatgtagatatactattaaggtggtttactattaatctagtttattgctgagatgtatatgttttataaaaaacaccttactttactatagcgggtgctctaagaactgaagcttttcttacacaaaagtcaggcatggttgacacgttacagtgacacattaggcatgacagcttcacaatagacgctaaacacacaccgttgtgaagagaagagtctgaattataaagtagtacttgtactaccactgttaaaaaatatagctatttctatcataatactgtcttaaaatgaagctatgttttcacttatctcctcctctcaaccaatcacaactagtttctttcacttactttctcttctcaaccaattacctacggacacacattctctaattattttcacatactttcttaatatccgtactaacttaagaaatgcttacatttagtaaggagaaagtatagcccatctgttgtacaaaattggaagcaaaatcaactcactatatagagacaaacaacggtagttagctagcttatcaattaacactttattttaaagttggggttttcgtttcattatcttacaaaaacattatagtttatttttattggtttttaaatcactagaaacaaatacatgagagtcacgctcatttttttcttcatttttttttcatggattattagccatagagcaaatgatgagagacttcttatgatagagttaataaaatgcttggtacatcacaaacatctcatagttgaaaaataaatgtatcattgatatgtagttccagtccccacatgtaattctcacatatgtagcttgtgtatgtttagttgtttacaatagtgtttttttctaaaatttaactaagaatattgccctcttgttttgtcttaattaattggcaaaactccggcactgtactcacaaaaggctttaattttcaacaatcaggcatatgatacaactttttctcctgaaaaaatggatgtgtgccataaaaaaaatcggcatttgaatatgtctcgtccattgtcatgaaatcagaaaaaaaaaacggctatctaatttgttgttttttgaaagatgttttttttttcagttgccctatttacttattagacgtttgtcctcttgtccaatcactctaggggattagcattgagtcaagctatacttacttaaaaaaatacgatcataactctcaaccatttgatttgattaatcaggagttacagaaaattaagatttaatctagtatgacacatcaacgtatataagacatttttacgattttttcctctatatgtgtgaatttattttccctaataggatttacccttgccccatatgggccatggggtggattatgagtccctttaatttgtaacctcaactccacagaacaaggtcagtatggaaaaaaagagatattttagaaaaaaaaaaagagtagctaaagtaagggccctgggaattggaggattggcaaaggatttttggagaaatcaattttcataggaatcttttctatataggctcctttcgtccatgggaagaagatagggaattttttatataagattgtatctctatagttaattccataggaaaataagcaagagctcttggaaacctttttttttcaatcttcctatagtgtaatcaaatggtttcttctttcatttctttttatttcccatgtttttaaattttagggcttgtttggattataagataggaaaaacatagaaataggaaatgaatctaaatgtaaaacagagaaacgaaaaacaaaggaatacaaaagttgagagcattcggatcacaggaaattaattgcctaagatttgcatgcatgaagcaaaaaaaaaagagcttgaggtggatggttttttcatgtacttttcctatgaaattagcatcaaaggaaactctcctttagatttcttacaaccagttttcatgatctgaatgtcagaaaaggaagaaattgttatgcacagtattactccaaaaatcatgtgaagatcctctgatccgaataagcccttataggattgaaaaaacttttggttgatgtgttttccctattcgtatgttattttccatcacgcgttttaagaaccctttgaaacgcaggattaaaaaaacgcacagaaatataaaaaacgtaggaattgaagtgacatgttttactaatcctacatgaatgtaaaacgcaggaaatattaagagtggccctttgataggaccatatgaaacaaataaagcaaatgaaagtttccaagaggttagatctcttgctttttcctatgaaattgagctatatgaatgcagtcctatgaaatattttctatactttcctataaattaaagggtatcaaaaggcttcatagggaacatttcttaggaaattgaatcttccaattcaaaggggacatgtctaattattgaacgtgcggtattcacaactccgtgttttagagtgggggcatatctaattttgtcaacaaaaaaaaaatcccgtaggtgaacatcaaaagaagaggccctcaggcctcaactgctccgtgttactccagtctacagaccggagaaacacatcgtcgatcaggcaagcggcaagccacaactgctccgccgatctactcgctgccaacaacaaaacatgctcattagcagatggaacaaacagaagtggtgcaaactttgccatcagatattcactcacctctctccctagcatcttgattgctactacgacacgtcaaattatacggcgaaaacactgaaaaccatcctttttatctaccacgtctgacggtctgagcgaacagtactcgcatagcgtggacacatttttttccctctgattacgatcctatccacttatccaggggcatgtgagctcacatgggtggacaaaatggagccccaatctctcacaccgttacggacgacaagtacaacaat

SEQ ID NO: 2530 - DNA, 2738 bp, Oryza sativa
gcctgtggatatatgtatactaattagagtttaatgtgtatttttgttacgacttgtagaagtggaattggaatttgcatgtttgttaagtgatatattacatattaacctatcttgtaaaatttttttaaaatattttcataatcatttaggtggcatgtaagaaatgggtggacgtccactcgagagattagaacccatcctccatgtgcagaactgaaggagtagccagaaagaaacttgaaaagctgacagcgaagtacacggatccttttcgcatcggtgagcaaagccgggcccaaatagatgtcctaacaaggtcagtcttgttttatcatgggccagtgtacagtgggccgatatggacggaccgtttcgttgaaaaaggcttgggtttgaacttttaaaccagcaacgcgcgacccggaaagtagctctctcccctccacatgatattcagattattttcagtagctctctcgttgacatgatatccagattttctttttaccttgtaggaaaaggagcaataagattcaggtgtttcaaaaaaaatattttcaaaaaggtgtgttgacttgacctttctttcgttgatctcttgaaaagaacgatttttttttttggaaccaatcggcgcttagatgtgctcatttcattaaatatatagcatgataattttttttatagagctagagctttacatctgagcgaggaaaagaaaacgaaaaataaaaagaaagaaataaagcagctactgcccactggctaattgtttagtcaaggacggctagatacgattgagatgcaacaaaatcccaacacccaatcataacgatttaatcagatttatcattcgtattgttgttatgtttcctcgtgcgtacacccccttgatcataattagctcccgaccctgaatccttgacagcaccggagccccctgaatcgctcgcagaccgcggttttgcgtgctccccctgtgagcaaaagtgagctatacgacaggttgttcaatttgtcctgtcgaagaggcctttgtcttaaccccgtacacgatagttttgatggcaagatgtggagagctaactattctctgtgtgtgtctttgttcgccgtcgaatgtttcgctcgtcagccattggaaggcacgagattgcgcggttggtagcagctaacgacagccaaccgttgtcccgtgaatctttcatggactaaagttgattgagagttactctcttcgtcccataatataagggatcttgagtttttgcttacggtttgaccacttgtcttatttaaaaaaatttaaaattattatttattttttttgacttactttatgatcaaaagtaatttacgcataaattttcattttttatatttacataatttttttaataagacgagtggtcaaactctacaaacaaaaaataaaattcctttattttttaaaagggaggggagacactttatatgtgcctgcgtacaggagttgacatatagctttttgttctttaagtaccttctttgcggaatgttcaaaagggcccgtttttgtttattttgcaacaaaacagagacaatattcggacctaaaaggaagctggatttctcaggaagtcaagctgtcaaagaatgggaggaagacaacagaagatggaacaagatttaggaacagactggagctagaagtctactcttgtcatgtgatttctcctgcgacgtcaaaaacggggcgaatcttcatgacagatccgtcgaagtctgggagcagtgtctcgccgccctaagacagagccggttttgtatgcttcctctgtggtcggcagccactcgttgccttccatgacccgtgcacccattttataatctctgttaatgcgcgaattgtagaaagaaaatgattagacctgcagcgattcatccaattgacaagccaacactcccttgacaaaccatcagtaatcttaaaataagtttatctaatatagtatgcgatatattttagtactacgaatctagacatatgtatatctggatcataatattagaatatatcgcatctcgtattagattaactataggtgggaattttttttcccgagaacagatgaaggaaaacaagcattcatttgaagaagggtaattgaacttcggacatgtttagttcgtgaaaagaaaaatttatgggtgtcacatcggacgtttgaccggatatcggaaggggtttttggacacgaatgaaaaaactaatttcataactcgcctggaaaccacgagacgaattttttaagcctaattaatccgtcattagcaaatacgggttactacagcacttatggctaatcatggactaattaggatgtttctccttaactgtgtaattagttttttaatttatctatatttaatattctatgcatgtgtccaaagatttaatgtgatattttttgagaaaaggttttttagaactgaacagggccgtcattcatgctaagctatactagttgctagtaggaatttactagtctagctatgtttttcagcagggaagccaagtttgcagctgacaatgagtgcttttactcgattagcacgttgtgcaagtgcaaactgaagttagtaagctactgaatggtactactacagcacttgatacagagattcagatccgcttatctccgtcgaaaggaacgtatccggtactccataattagctaattactccgtttcat

SEQ ID NO: 2531 - DNA, 1721 bp, Oryza sativa
cacccccgcccccgctccctgcattcttccccgtcttcggtcccagtcagtaaatcgggtggacgggtgagcagagcccaacaccgttcggatggacagcaactgcgaagcgtcgattaggacagttgtaggcagcacaccgcgacaagaggacactggccaggtgcggtgtgccgtgagaaggtggcgaagaggcaataccagctagagacggtagcaaagagacggcgttgtctcgaggcggcatactgagaccgaagagggagatagacgtgagaagagatgtgagtggcggctgggcaaggatttgggaaaactagggttttgcttatatagtccttcattaaattggccagatgggtcttagaatatgctatatcttttgacatgtacttctttcgtttcaagttataagacgttttaactatggtcaaaatcaaattgtttcagttttgactaagtttatagataaatatagtaatatttataatactaaattagtttcatcaaatcaataattgaatatgtcgataatatgggcccgggggtatgcggagtacgggggagttaccttcccgtccagccacgtggccctacagcctggccctccccccacatctcggaatacgcagaagcagccagggagtctcggggtgccacgtcacacccctcgggccctcgcgctgcctcgccccgaggccctcgcccggctgccacgtggcgaggggagcgaacagggcggagactcaggctgaaccgccatcaatgcgtggggccccaaccgtctctcaccgatattaatgcggtaagggcggccgtgcggggctgcccaattaacccacgtcaatcgggcgtgaccagactgtgactggcctgtcaccggtcacatttgatcggacgggcggctgtgcccccatgttccatcctgtacccaacggagtgggggcgggtatgccctatcctatcgaagcgtcattcagagctccctccatgtgagaaggaccgccacaagtcttcgttcatttaagagggagtgacggggctgtcccccgtgtcaggcggcgggcggcgctggggtccactcgaggacggacgactgcttagcttccaggcgaaggcacagatcgtggtccggtctgagtagagtgggtccccctcccgtgaaagagtgggtagaggcggcgcatgtgggatccccttgaactataaaaggaggatcgagagtgctctccagggggattttgggtaacactcaatgataagttccacacacaggagtagggtattacgctccatagcggcccgaacctgtataatcttggcgcccgtgtgtgatctcgaaacactccaggcggatacacgatctcaacaagcgagcctttcccccggccgaactcacaaaagagggatctctcgatcacccgctagagaggatcactcctcgacagaatatattttcataataaatttgtcttgagttaaaaatgttactatttttctctacaaacttatttaaaattaaagcaatttgattttgatcaaagtcaaaatatcttgtaacctgaaacggagggagtaactcataactccagagcctcgtgggtcacctcaccagtaggtcaatttttatccccgctcgacaccgctcgcccgcgggtgagatcccccctcgcggcggcctcacagggtgggtccccggtcccaacaagaaaattgtcatt

SEQ ID NO: 2532 - DNA, 691 bp, Oryza sativa
cctctccctgtactgattaccaagacgcatcgcatcttatattttagctactgcttattagtaatttagcgctacgaaggaacagcaggtaaactagtaataaccatgtgatccttctcttatctatttcttgatccggcgcaccttcttggcgccccagacctccatgcgacccttggggcacccgcagggcgagcggaagatgagcacggtgcggccgttgggcggcgccatcttgcggagctcggcctcgagctcgcggtgcgcgtccccgagctccacggggtgcgcccccgcggccgcgagcagagccgatcgcgccgcgggagccgggtggccgcgcacgcactcctccgtctcgagctggatgtcgaactcgacggccttcttcaggcccctgcaccgcggcttgccgcacttgcgggcgtggtgccccaccagctcccacgcgagcaccgccgccgcgacggccaccgcggccccggcgaaggcggcggccgagaggcacgacgcggccgggtggagcagcgcgcccatctcgaggagcgccatcttcgcgtagggcaccacgaggaagcccagcgcggcgaccacggcgaggagcacgaccgcgtcgaccgcggccatcggcgagtggtcgcagagcgccgtgagcgacgacccgccccgcctggatcgggaggaggagggc

SEQ ID NO: 2533 - DNA, 540 bp, Oryza sativa
ctgcaaaacttgagtacatgggaccttgcaggagcgtcaaagacaggtatgttttgtcatttgtgtattcttttctgccagtgccacctctcattcatgtcttttcaggattggattaagcatgattaatgatgctgaagagaaaggattaatttttccaaacaaggttagattatcctgatagtatttgcaatactaccatcatgaagattctaacttgtgcatatacttctacctatgcagaccattttggttgaaccaactactggaaatactggtataggcctagcttctgtggctgctgctaggggatacaagctaatagcaactgtaccttcatcaatagatgttgagagatgtgttcttctacgtgcatttggagctgagattgtgttaactgatcctaacaagggactaaaaggagctcttgataaagcagaggaaattgtttcgaagacaccaaatgcatacatgtttcagcagtttaacaattccgctaatagtgaggttgaaacttaagacatatcatttgctcatttt

SEQ ID NO: 2534 - DNA, 1469 bp, Oryza sativa
aaggatcctgatccattggatatgtctgaggaagctaaggccgagagatggtttaggagggcagcacagataaaggacatctccgagctcgccaacatccctgacgaggacttcccggagataatgccgatgaggaagggcgtgaacaggttcgtcgtcagcaagaggaagacaccactggagaggagattaacatcacctcagtacagaagaaacctgcctatcgtaagttctgaaccgaacgaagacgctaactaaaaaaaaaaggtgtggttacgaaatttccagtgcaacagcgaggagttaaaacaccaagggcattctttacagcagttttgtgataataagccagcacaagacggttctctgtattgtaaaatttttgttctgaaccttccatttattttgtacttccagggaatccatgttgtatatgaaaccttcgatactgaaactctgcatgacactgttgaactattacttttctgcggcttcaaatgtccaatctttcaatgaaattgttctttgggctctaacgttgcatattcctgtggaagatgtttttttatttccgaaaattattcgccatttttttcagttttcttaatcacgtcatttattcaatttgacttagcccggcatcgatgaagtttgtcaaaagaaaaacgaaaggagaaaaaagaaaaaaactccagagccgacccagtaagccgtgggcctttgtatcgagagaagcagtactaggtttcctctggaacggcccattattccagaaggcccatctgcgaggtcatcaaaaccctacccgagcggccacacccatttccctactcccaccccccgccgccgccgccaccaccgcagctgcgccgcttcaaggtaaatctcccattcttctccccctcgctcgcccttcctctgcgtcctcgtagattcgtccgtgcggaagcagttcgtgcggtgattttgcctgttcttccgttggatttgcgagttctggttggtttctgatccaaggctaagcaaccagttctttagttttgccgttctatattgggatgtgttcgtccgtatcccgtgcttgagtagttagtacatgttttgttgttcctgtgatctgcatgtgtgtccatggttcaagcgctaggaattcttctccgaagcgtaaatgatttgcttgctgtacgcgatctctcttgcacaggcacttggtcaccatgctagctgaagtcgtgtggtggcctaatcttattgctgtgcaagatggacatgggtgcacagtttgcagcagtgacttctttgtgtctctgctgttagtagttacccaacaatcaatcagtctttggcttgaagggtaaatgcctgactggtgatctggttcatgctggacacagccttttcttgttgcttttatacttttagtgttaactgaatcagagcacaagtactgaggcacgggctgcaggaat

SEQ ID NO: 2535 - DNA, 1906 bp, Oryza sativa
  unsure (1)..(1906): unsure at all n locations
tctatcacatcattccaatttcaatcaaactttcaattttgatgtggaactaaacacacccttgtactaccaaattaatatattataggataaagaaagtagattattcggtgaccggtgaccagttagtaagggccattcttcgtagttagtaagggtcattcttctcaatgatttggaactcatctctcgcacacgtaaaacaaaatgactcattaatacatgattaattaatattaattattttttaaaaaaaataattaatattttttaaataatatttttatagaataattttataaaaaccacaccgtttaataggtataatatttttatagaataattttataaaaaccacaccgtttaatatgttaggaagggtgcacggaaaagaaaaaggagtggagtagagaatattaagtaaagaacacggcctcagccctgctcatgatttagaatgggtcgtcagcctttcgacacgtactatgtactaggtagggtgacaaatcaaaaggactatgttatcaagatatcatttgatcaggcgttagtcctatctttgctatttgtgtcctcgagtgtacgatgctgtggctcagttcaatgaactagccgcaacccaaatttgccattacttttcacgtgaaaatgcatgtctccaatagttgccgcgcagttaatgtgacttgtgtgcggtcactgtgtaaatcatagatctgtcagatcagaaaagagcttgtggtcacttcagtgattaattggagggcaaatgcgaacaatgcaacatccatgatgaaattaaacagccttatcttcttttataagataaaatttaaattttcaatcttaaattgatagttaattttaggttttatttttatcgtaatttatttttcagtttttattttagatcgctaagaaattttttagttacaaatatgttgtttaatttattccctaaataagctaaacgatgaacttaactaattagagtatctagagaaagctcagcaaaccacacaatcgtagtaatcatataacttcgacaaagaaaaacacaagagttcggttttcttatggtcgctggagactggtgaggtaggtgtacttgtgaaaaacggcgttccacaggaggtccattgagattggcgaatgatcagataacaacaccgggaattatagccacacagacacagcctcagtncgacaaatcagcagcaattcacatgcgccgtactgtactattgtccagccttggcccttggattcaccttcttgttttgcagcacgttgagctagcatggcatgaaaattttcaccgttggcaccgacgaaccgcggcggcaggcggcagccagccaagctatgtggtcgcagagtcgcagtgcggccggcccaacacagctgcgggcctgcacggccgcacaggtaaactcgcggtctgcgtgcgaacacgcgcgacgccgtgcataccgcgcatactaccgtcatgcgttttaaatgacatgtccacctatagcatgcgcgtggctcgccgtaatcgcagtactatccagtatttgcagcattggtacagcaaggttaataatacagtcgacctattagctataaacttatttctagctttctctcagcctaaccatataataaatagctctttacaattaatatagggcccacttatttctatcacagaattcttggttcttgtgtctaagccggctgtaagtttacaacccgcttcttctctctctcatctctttttcagtatttagccggcttgtagcctactattatacttgctctaactactgctacttgcgtcgctgttctctttatgtcgataaatgctcgaggtaagatgagtttttttaataatgaaagttttattcagacccaaaaaatt

SEQ ID NO: 2536 - DNA, 2004 bp, Oryza sativa
ctgcagcccttatcaaagttaggtaaggtagaattggtaaaacgcatttcaaataacaagggaatcgcaaggatacttgagcaagaccgagattatttcagggcatacacatcacacacctttggaaacatcagagagcacaaatggggccaccccagacccctcaatcgcatatagttataaatgatttaagattccacaggtgataatttcagttagtttaaaatccttctatggctgtacaatacaggaaaactcaacactcaacgaaaatgtgtcaaaacactaatctggcccttaagcggcaagctacaggcaaagcatctggctagcttatctaaaactgaaccgaaaaactctgcaagaatgggttgtcaaactgggctcacaaagtgtcagccctgcatcatgttgcacgtctgacatgcctatctacaaacagcatgactatgctgcaaatttacagtgaattacaattgattggtatatttcggagtacaattactgtatttaaagtggttccatagacccactctttagtctctccattcgtgcttgcaggccagataacgctctctcgtccatgggtggaataatattttgtgtttgtgggtcagcatccaatcgtgttcccccatggagtgtattaccattcatgctcggcaatggacgagcctgaactccatcaaaattggcaccaacagcagcagcttgaatgcttttcatccgttccctaagggcatccaacgtccctgctggcatagaaagaacaattcatacaatcagattataaagcttagaagtgcagcttaacagcaagtatgacagaaggcagacctgaagattggtatctgtcggtctgtaggttagtagtttgtaacctattatcaatctccccttgacctctgaaggggtgtgtgtcaccaccagcatcatcttcattacaatcagttttgttatttatcgattttgtgtgaaccggtgaaggtgcaaattttggagagggtataggtgcaattggcggaggtgtggataatggaaggctggagggagttcttccagcagcagcattcttctccacctgcatgagccaaaaacgataatagccaatcagttaaaaacaccaaaactagcttaaacacctccaggattgaaatagcaaacctgagctagcccatctctgatataggttctaaatgcttcacttgcattctgaagctgagcaaatatatcaacctgaaaatagttcttgtttcaggaattaaaatagaaaaggtagcttatgcgacatacattataataactggctgaaataaacaaactcataaccaataacaaacaaaaaaaaatcaaaactcttaacacaagaacacaaaaagaatcaacaactagggttcatagaacttttggattcacttgatccaccaggaccaggtgaaagatgaacaaattgtacaggacctggcaattactttatataacatcatgttgcactttcacgatgaataatataccttggggtacagttgggttatccggtagagttcataaagaccaattgtacatgtttgtttgtcaccaattttcttgaatacagcagcaagctcttgctacccataatcaaaagaaagacaaaatagaacatcaattgctgtacaaatttgcaagcagtaatttacaaatgttatgttagttaagaatcagtaatactaccttcaactgtgcgtcagttgaatgagttgatgggtttggattattggaccctgcatcaccccagtgagtttggcccatagttccagatggagtcagcattctagctgccgcaagggtctagaacacaatagtatcaattaaaaaaaggatgtccatgacagtttgttgtggaacaacaaaaggatgtattttttttacctgaagattaagatcaatgtatgccaaaatgattggctgaggttcagcatctataggaaccattgaaaggtgacctttgattgctgtaccacg

SEQ ID NO: 2537 - DNA, 2017 bp, Oryza sativa
gaatacagactataacaagattaacaagcaaaataactaaaaggcttacatgcaaaattacaagaccattctgtctgtgtgcattaataatctcagcaatccatacagataaaaaaaaatccagtctagcatcatctttctaacaggttccaaatttcataaattgtccattcagcaatgagccaacaatatcatggtaaactagataccaggaataaaaaggataaaactatctgtcataagttgggaagtaacagaaaaaatgtatatgcttgttctcaatcaaaatcaaactgttgtagaacaaatcaggaaagcttgcagagcaaagaaccttgaatcattgataaaacataccagttgctgttgaagtggtccacgaaatgatggcccagccatgtcaccaggagagacattgaaaccaggggttatatccccaggggttagtctttcaggttcactgctaggcaaatcctgtaaaatgattcaatatgacaaatctagcctttatataatctcagagttattaaatcaaacatgctcacctgtggacctctggcttcagcatgtggaacactaggcacattgaagtgattaggtgctacttgagagatagtgttaaatgtgaatgagtcgttgggtgtgttcccagtagatgcaccaaaggcattccaaggctggaaaatagtcaaggagaaatagtccatagtaaacatttgcaagcagagcaaatctctaacaggtcatattccaactggtgaaatacctgtgaggtttctttggagacaggggtcttcacctcttcagcatttaaactccactgatccatcataagcgggtaactttgtggaatcaaagcatttggtggcgaagttggcaacattgactgattagttcctttagcaagactctcacttggagggaatgcagctattgcggtggctacctgagcttgcacgtttgaaatggaagtcggagatacgtgttgaggtgtatcgaggaagaaagcccatccttcgtcagcaaccaatggggctgcctgttgactttgctgaacactagtcgtaggtggcagttgttggtcaaagccagcaaataaatctattgactgaggggtagaggaaattgatggttcggctggttgactttgctgaacactagttgtaggtggcagttgttggtcaaagccagcaaataaatctattgacggaggggtagaggaaattgaaggttcctgcaaaggcgacagactcaagagatcatgatggacaggatgagatgtagagggtgcttcggcttgaacaggtggtgaagatgccacggctttctgaaccacaacgtcatgcagagtttctttaggaacagaatggctgcctacatcaactgctctatggggaactgatggagcctgttggttaaagccagcaaaaagatctattggtgctgcagaattgaccggatgttgcattgactgatcaaagaagtcctgatttgtggaagtcgttggctgtgttgaaaccggcggctttgctacagagaccatgtgaacccttccatgttgcacagattccctggtgggagcagtttggctgactgaagagtttatattgctctgtgaggcatacaattgtgctgaatgagccatggggggcgcaacagactgacgatttacagcagaattcactggcttttctgtaggtgcatcaggtaaggcacctgaatcaactgacttattagatgctgagctaccatcaaatgatccaaaacttcctgaagaacctgttctctgcacatagaaagatggtatatttatttcaaaccactctacctcagaagttggttttaagtcaatgagcattagctggaaacatataacatgaatggggagaacattaacctgtgatcgtcggactccattaaaatcaatttgagaagttgcattcggatgccgatgggatggaggattttcagaagacacattccttgaatggtggatagaaggactgctgtaccctgt

SEQ ID NO: 2538 - DNA, 1109 bp, Oryza sativa
aaattaaaaaaggaaaatttactaatatataaatatacaaccaaatcataaactgaattacctctaattacagatgcagtgcatagagtttggtctgtatatatattagtgactttatgttatattatatgacaactatagtatgcagaattttacttattttttaattttgtttctttcatgccaattagtgttgcatcttacttttgtatcagaccagaatagtaacacatgttaattgtatcaagtcaactcctagacatacagttgaatgaattaattgaatagcacaatcaatacatttctgtattatagccttactataattgaaaaccaactaaaattggtgcataccatgctggtgttctcctctttttatttgatgttgcagtctcactagcataagcatctgagttataggagtatttgtatgttggagcaaaaaaaatcttcccctcattccaccccttaaatactctcccagcatcacgttcgattttgagctggagtgttatacaggacataagtgagggggaaaaaagtattttgcagaggaaaaatagctttcaataatataatggaagtatcaaaagatttgcatatttcagatttcacttgttttaaatttcaaaaccagtaagcacagaggagtaccataatggtgtctaaggaaaaaatgcttcctataatattgttttgaaatagtaattgtttctcaggtacatgatattgctattccagaaaaaatggatcattttcctgcaacaagaaatggaagttacctgatccctttcaaagagaacatcccaattattttccatcaaaaaatttttggtatctgcatagctcagtgcgatacgatagttcagatctccgaaccatatcaccttactgaaacaaacagcgtatagcttagaaatatacgcttgacaagatacatatatttactaattacaagcacactaaaagcacattcttactcatgctcaagaattttctctgggatttttcgcacacctctcctgcaaatccttgaaaacagtgtaagcctcagtatctcaagaacatcagagttcctccggaattcatcaccttctttctgacctgaa

SEQ ID NO: 2539 - DNA, 636 bp, Oryza sativa
cttggcagttttttatacagtccaggtcgtttgagagatcagatgcatgaagatcgatttgctaatgagagtactgggtcaaggttttctgatttttcggcctcaagcactggtgacattagaaatgatgtgctttctcctagctctcaggatacagggtacagcagtccttctatccaccattcaaggaatgtgtcttctgaaaatcctccatcccatcggcatccgaatgcaacttctcaaattgattttaatggagtccgacgatcacaggttaatgttctccccattcatgttatatgtttccagctaatgctcattgacttaaaaccaacttctgaggtagagtggtttgaaataaatataccatctttctatgtgcagagaacaggttcttcaggaagttttggatcatttgatggtagctcagcatctaataagtcagttgattcaggtgccttacctgatgcacctacagaaaagccagtgaattctgctgtaaatcgtcagtctgttgcgccccccatggctcattcagcacaattgtatgcctcacagagcaatataaactcttcagtcagccaaactgctcccaccagggaatgtgtgcaacatggaagggttcacatggtctct

SEQ ID NO: 2540 - DNA, 2343 bp, Oryza sativa
agagcttgaatagatgcaagactgcaactctgcttgctcagcacatatgttgaagcgactttgctgaattgcttgctggttgctgttgaagtgagttgaaataaggagtatcaaccaattgcattaggcaactaaatcggagccgtctaaatatttatggacaaaatttcttcaaaaaatttaacatatacaaatatagtataataatagtgtatttacattttcactcttaataaactttggccggcccggaaaaaaaagtgtacttacattataatttgaatataacaacaaaatatatgtaactttcaaaaatgccatggtatcacgcctattttcgtgaagtggacgtctccggacgaaatcctctcacaactacgcacaccgtgaatttttccttccccgtttacatgaatcttcaagcaaatttgacggttcaaactttccacgatgtagttacactgcaattatatcgtatttacatttataactgggccatggcctgcttgcagctccccaacgcgccacggcgatcaacgaaattggcccagcacacgccaagctcaagcaggccataaaagctggaaatattgtcattctcccagcccaccgcccgtaagtcgcgaatgagcccatgatgaggaggacgaccaacgatgccggcccaatttcgccctggatttatgcgaatcggcacctggttcagatggtagcgatcctgatttttcatgcggcagtgtttgttcattttatagccatttttaacctttttaaaatttaatattgctaaaattttagcaagttaacaatattattaaatttaggtaggataagcttgttgttgtcaaattctctagggatgaccaatactctatttgataacaaaatcatcatatatttgttaattttatcaaacaatgatatgctttaatctgaatagacctttaggaccctatttaggatcggtacctttcatgcccatatttccttaataagttaaaacatcttattaagaaatataaattaatttatagttaaaacttttatatgacttaaaaaccaatgtaaaaagatacactgaaaatatatcaaaatcaacttaaaagtttgaaaatttaaatttaggctttagtgtattagtgcaatcaataggctcttattcacttaagccccttagggatcctaatatatgcagttattatgaccattttttgactttatgcaatttagcccctaatctaggtcgaatttgtacaaatcaccacacaccgaagccgcaaaccccaccaatcccacaaaccactctccagccctctctgcctcctcgccgccgccgccgccaccgccgccgctcgccggcgcggcgccagccatgctccccttcgtccgctcactccgtaggctcggccctgccgcggccgatgggcgcctccttctccccctcgctccgctctcctcgaaggcggccgcgccgccgccggagtacgagatgccgtcggtgacgtggggcgtgatccaggggaggaaggagcggctcgtctcccgcgtgctcgcgctcgacttcctccgctccgccggcgtctccgaccccgccggcgagctcgaggccgtcgagctcccctcctccctcgaggtgctccaggagcggctcgacttcctcctccgcctcggcctctccaccgacgacctctccgcctacccgctcctcctcgcctgctccctccgcaagaacgccatccccgtcctctcctacctcgagaagctcggcgtcacgcgcgcgcgcctcgccgccttcgtccgcgcctacccggcctgcctccacgcctccgtcgccgtcgacctcacccccgtcgtcaagtccctccgcggcctcgacgtcgaccgccaggacctcccccgcgtcctcgagaggtaccctgacatcctcggcctcaagcccgatggcaccatcagcacctccgtcgcgtacctcgtcggcatcgtcggcgtggcgccgcgcgacatcggccccatggtgacgcacttccctttcttcctcggcatgcgcgtgggcaccaccatcaagcctctgtgcgagtacatcacttctctcgggctgccaatgcggatcctcgcgaggattctcgagaagcggccatacattcttggctatgatcttgaggagacggtcaagccaaatgtggaggcattgctcagctttggcattcgaaaggagatgttgccgctggtgattgcgcagtatccgcctattcttggattaccgctgaaaacgaagttagcagcccagcagtacttcttcaacttgaagctccaaattgaccctgatgcgtttgcctgtgctat

SEQ ID NO: 2541 - DNA, 1578 bp, Oryza sativa
ttagtggaatgaatgaataaaaaaaaaggacaattgaattgatttccttcgcattagcaaggagttatttagaaggctcctaccgaatattggtaggctggaagctttttaaaaatccagtcttattttttaaaaataaatcctattgtgaataattcagtcattcctattaaaaatattcatagatggatataataacaacttccacaaaactaattccagtgacacatacctgcttaaaaaatccatagaccaacgcaacggtccacaaagtacttccaagaaaattacgtatcccttgtgtgagaaattcattccacacaaaagttgactcatatatgttccagccttcctgtggatcactcaagttcttttgaaggcttctcatgatatggtatgagtaactgaaaaagaagtcctttctaagatcaagtgtattcagtatcttcttgtacctgcagcatttcataaacaatcagcttctaatttaagaaatgcaatagttaaccggaaatgaaaaactaggaacagttttcccataatatattatttggtccataaaaacaatatctaatatcataatcagagtgcttttcatggggttgggtgtcgaaccgaagaaattcccatcgaaatgtgaactttggaactagttgatgaaatggatcttcatgtactgattataaagttttttatgcataaggacagaaaagagaaaaaaactcaaggcttgcagctggaacaaacctgttctcatccttggaatttagaaatctggatcgcgtcttagaattcgctaactcgaccatcgaagtcttaatcacctggtatactggatgatcaaatatctccccaatttttcgctgctcggtaataattaacatgtaaaatggtccaacaaactttatgaaacctgcgaagatatttcatcatcaagtgcattgtaatacaattaaattttgctagggtataaacaaaggaggaggggttggactacttaccgattatgccataaaattttgtaacaaactttacaccaccagtcaacctgtggtcttcatcaagattttttaacagttcatgatattcactttgagtatacacagtacaacactcatgtaagtcaaggtccgatggctccgatctattaatcttcagtaatctccaatgtgttttgccagtgttagttccaaaaatataaaacctctgcaaagcaaaatacttggttaagaattgtgaccagaagcacaagttactgaacaaggaaattaatgaaatctctggatccaagaacgttgagcacctaagctgcaagcatactgaccaacagagtgattgtgtacacaggtgaaatacttaaaaagagatattgacaatattttcaccgaacacccagaacatatgaggccaagtctctacacaggaacgtgattgccaattgtgctaatacgttttgtcaccaatttcatatgccaacaatctaccatagcagagtttctagcgatcagatcatagcaaaattccaaacacaagaaaagcatgcagactgcagagacagtcagcccttctgagataaaa

SEQ ID NO: 2542 - DNA, 2678 bp, Oryza sativa
gcaggcggcctcctgctccaccgccaccgcagcagccatggacgggggtgatccgggcggatcacccgctcaaatcaaccgccccaatcccccccctccgccaccaccgcggagaccgtatcaccgcccctccgtcacagccgccgccgccgccgccggccggaaccctaaatcccgtgccggaagcttgaggtagagcattccccgccaatcaccgcagcatcagccgacgccggtggcggcggagaacggcacggggctcgaatcgcgagccgtggaagcttctaggaggagatccgcgggagaagcgtgggtgggaaggaggaggaggaggaggcggtggcgacgaggaggagaattcgcctcgcggaggaggaggagagaagaagaaatccgtgagttggcggaggaggagggcaacaagatacaggttgttacgggaaatattttgctctccgtttaaatttagctttttgagtccgtttccctgtggagacggtaaactggataagcacgcacagggctgatttgtctccgtatcatctccgtgttgtactgtcgtaccgtgcagagaactgatgcaaaatagtgaaatactcatccctccgtttcacaatataaatcattctaacatttcccatattcatattaatagtaataaatctagactgtctagatttattacattgtgaaacggagtgagtagtatgctattgcgagcaatttttttcttggccggagtagtttttatataaagcttgcgagtagtttctatacaaagtttgcgggatactagtagaaatgtatagaatgtaaataaaaaaaagatttggaatgctagacatccctctaaacatttttaataagaaagtgtgaaagtgtggagattgaacacgacatttccaaattgaaatcacacggccatcactgcactatcaaataacctaacattatttgtgcttctcatttattgccaattcaccgtgtgagatgagtagtccttctctaactattctcagtggtttgtttacataggcttggtcgcgaaaaaggagagagaggggttgggaaaaaaagtgtcgaacaaaggtgataagaaattttaaatgtatgaatatcactgccgtttcggacatatgaaaatcccgttttggacatatgtaaatcatactgatcccatgaaggaataaaatttatctgatcatacatggtaagtttaataatggatacagtctgtgattttttttactttttgaaatttttaattttaaaaataaacactttcaaaaattatttctaaaatctgaaagttttgaggcaaaataatgttaccacgccagtctattattacagcgttgtcttgttgtcacgccacctaggttagcgacgtagtcaaaagatttagattttgaaaacaagtgttggaaaggttcgtttctaaaattataaatggttaaaaaaatatttaaaatatgctgtttgtatacatgacaacactctaataacaatagattagattcaaaccgctcttccaactgtcaaggtataaaaacacaacaaactaagcacaccatcaagatcccagcgacgtcatccaagaacaaagaaaacgcacagcttattgcgatcgagacgctaacctacttccttccataggaaggagcatctggttcgcggaatcgaagctgtggtcgcaggttttgcagctggttcgcgcacgacgtcaacgcatacgcggggtggatttggcgcgagccaccagagaggagagagagaggccgggcgattgaccgggtggacgtggagggatccagttggacgagtgcctcgggctcggggtttgcgtgcgtggtgcgggcgcctcaatgattggaggcaggcgctacgttgcgttggtgcgatgcaccgaaaactttggagctttttttcttgggtccacatcctacacgagagccacacacggtgggcgccaattgtatttgtccctagatcaaagaatctatagctatatatgagtatattttttctaggactttatctgcatatatacagtgatgagtttataaagactcgtaccataatttggggtttaattatagcaaagggcttagggtgtgtctagttcacgctaaaattgaaagtttggttgaaattggaacgatgtgacagaaaagttagaagtttgtgtgtgtatgaaagttttgatgtgatggaaaagttggaagtttgaagaaaaaatttgaaactaaacaagggcttattccaaatgtaggataggaagacacaagaacattatatagttacatgagcaaaatataatagcgtccatcctatgccagccaacggggtcggagtagctgttttgagtcccgcgaaattcctattttcacataattgctacagtattccttcgaaattcctacactcgattcatgcgaaccaaaatacataaacagttaaaaaaacaaaggaattgccagctctacgaaaatcctatgaaccaaatgagttctaaatagaaagagcgattattatatgagctagttgttgcattggctatactccaatatatgacaaatttatagtaatagaatgtatcacatctaatactatatttgtttatttaaaaacagatggagtatatatgttaggtgacatatactgctatggggcgcagg

SEQ ID NO: 2543 - DNA, 2518 bp, Oryza sativa
catattaattgaccagaagaaaaggagctggggggaaatgttcatgaaactcgtattcaagattaggtgaactgaaacattcaaacatgcatgctaatgctagctccagaagttgtttgatgttttcctgaagaacaaaaagggactcgcggcacgatgtcttaagaagcaggcacaattacacgcgcgtcgttggatagagtcagtcgacgagatgactagaaaccgagtactccaatatgtaaacaaacgtgtcttaacttatagacttttgctgttgctgacttcaacgatcgatgtcactttgctggttggcctacttagtaaaataaaacgactgtcgttttgatggtcataactaattaggcgagatactaataccattcccaatccaaaacattaggtatagttttcataaactctacatcatcaagaaactagtactagacaccactcttccaatacaaacaccactattctatacttaaatttaatgctacttatctcacatgagttttggatgttgtgtagaaaccatgtctcatgcaagacatgatttccttctctttcctcatttattcacttgtcacgtcactttttattctatgtggcagcttatttaatactatagacatcatcatagtcattgggttgtgaatggcgtaaagaaccaaaaacaatgtaacaagtcgcagttctttttttttaaaattaacaagtcgcagttctagttacacttaacacagattatttaattaccccacttaattgttcagagaaaatcttggcaacaaagccttgtgcagaagccagagtaattatagcagaaccgatctttctgggagcaactgatactttccaggaaatcttttaaaagaagatagtactgctagtaggctgtgtttgcaaccccacattttcaatccctctctcttgttttctacgtacacgctttttaaactactaaacggtacattttttctaacaagtgtctatacgaaagttatttaaaaaattaaattaatctattttaaaaaaaatagctaatacttacttaatcacgcgctaataaatcgttccgttttccgtgcgaaagggttcggttccatccttatatccgaacacagccgaagataaaagtaagatagggtgattagcatcttccagggtcaccgttttgtctcctctcgttgaccagcaaccgagattagcacacgccactagctttgagcggcgttcggctgagttctaaagtgccactcgcaaagcctattttcttatttcttacaataaattactatacatacgactcaactattcaatacacacaacttaaatttaattaacaaatataaatagttgtaatgcatatgaacatatttttctttgattatttatgtttgcatgtctctgattgtatataagttgtaccactaaaaaaattatttcatgttaagttatattatataaattatttttaaaagatatcaaataaatctatttttaaatatctttgctcatatcgcgtttcgccgaaaatcaaggacgattgaggccctgtttagttctcacgaaaaacttttcgccttgtcaaatcgaatgtttggacacatgcataaattattaaatatagaaaaaaactcatatgtataacttaacatgatataaatcttttaagtctaattacgccatgatttgataatatggtgctacagtaaatattttctaatggattaattaggcttaataaattcatctcgtagtttacatgtgaaatctctaatttattttgttattagactatgtttaatatttcaaatgtgtatccgtatatccgatgtgactcgtcaaaatttttcacccatgaaactaaacagggcctaacttgtactccctccgtcccaaaataagtgcaattttagcaatattcatgtttaacatttgaccgttcgtcttatttaaaaaaagattatgattagtatttttattgttattagatgataaaacataaatagtactttatgtgtgactaatttttttaatattttttataaaattttcaaataagacggatggtcaaagtgctaaatatggatatctatggctacacttattttgggacggaggtagtatgttccaaactcgaaggctatcaagaggcgagaaagccaaggcggaaacatgtgggaaaacggctggagaaaaggcgactcggctgtgtgtttgcaatcccatgttcctaacccctttccctcattttccgcgcgcacgcttttcaaactactaaacggtgtattttttttgcaaaaagtttctatacgaaagttgcttaaaaatcatattgatccgtttttgaaaaaaaaaattagcaaatacttaattaatcatgcgctaatggaccgttacgtttttcgtgcggggagtttggttcccaacttcccatatccgaacattggtttattcaatggtggacaggtggagagagtataaagttagagcatgccctgcagatcatcta

SEQ ID NO: 2544 - DNA, 7307 bp, Oryza sativa
ggtggctaaatctaaagccgatgtattgcacgagcatttgaaaggagttgtcgagggtttgctgagctggcaaactgatacaaagaattccttcaaagcgaaggtactggctatttgcttttgatactataaagcaatggcatttctggtggtatttatataaacgctcacaaacaatgatatggttgtttttgtcctgtggaacttttactattctaataactagatatattcatatcaactcatatagacaatatatgacatgggagaaactaaaagagtgaaatatgcatgatatatcacattacatgtaaactgctgctgttttcttggagcttgctattcatctcttatcttattgccagataaagtcactgatggaaattctagtgaaaaaatgtggtttggatgctgtgaaggctgtgatgcctgaagaacatataaaattgctgaccaacattaggaaggtaacttacagtattttttctttgctcttctcttgaagaatagacagttaatgttgtatgattgtatctggtcaatatgctcaacaattccatgcaatgttaaacagattaatgagcgaaaaatgcggaaatctaaatcttctgaggatggggataacatgtcgatgacctcacgagctacaaggtattgtggtgcatttattgttttttttttgttctgagaatttgttgatagttctgatggcgtgaatgtcacatctatttatacaaatttaacttctgttcaactgtcctggtcatgctccctgcagacaaagtagatggaatcacacacagatgttttctgattttggaagtgatgaggatgactccaatggtcccttttctgcccaacatacagttgcttctcgtactggaacaaaagcttcaacacggtatgtgccacaatagggccacacttggtttgtgaggattttaagtgtttctcacaaactgttatttttccaggtcgaccaggaagcgccaagcagataagagcttgctagagaagttcattgatcagtcaactggcgagcccctagatttacttgaccagaaaacagtgcggttggctctcaaatcgacgaaaaagagggctatgcctgatgaagatgatgatgaggtggagatggaccctgaagggcgtatcattgtgcgggaagagcgggagaggcgcaaaaagaagcagcctatctcccgagacgacgaggccgacgacaggagcatggtccgaagccagtccgtcaagaggaggaagacgaccagctccggctgggcctacactggccatgactacaccagcaagaaggccagtggcgatctcaagaagaaagacaagatggatccgtatgcctactggccattagacaggaagcttctgaaccgcaggtcggaccgcaaagcggcggcacgcaagggcatgagcagtgtcatgaaggtgaccaagaagctcgaagggaagagcgccgccagcgcgctcgctgctaagagaacgcaaacaaaaaaccggaagcagaagaagagcaagtaaggagacgaagggacagagagagatagggcaaggaagctttgtatagctgaaccgatggcccttggcagttgggagggaaagttttggacgtgtacagtgcttggtgaggattcggccgtagtagttgtttttgctcgtttcatctcctatctgtcgaagagaaacactaggttccattcttgccaaaaagggagattttttgaggggaaaaagggggaaattttgacacccgtcggtatgacggtaccagattcagattagatttaattttcttgtaagtttttgattgatgactattgaatttgaaatttgttgcttcctgcccgctgacacttcgctgtaatggaagatgagctgtagcgaaatttccgaattccttattcgggcatacgcgctaaaacaatcgcgcgatcgtggagctgtacggggatgaaacgcaaggctacggcgtacttgattttttttcatagaaagtgattttttttcttagaaagtgattttaaaaaaaagacactgtcaattcaactttttttttttaacaagggcaaacttcaactgtaatatttaaaactttaaacttaaaaatggaaacaaaattaacttgaaaacttttaactcaaattttgaaactttcaactcaaattttaaaaactttcaattaaaattctgaaaacttttaactcagagtttaaaaattttcaactacaaattagaacttcaaactgtttttaactaaattatttgtgtttttttaataaaaagctaatgctaagcttcatcattagcactattagtgatgttttgcgcgagggactaggtagggtgcatgcggccacacactaatcatatggagcagtttgaaacaagggttaatttgatccgtgacattacaaatgtgcctattcagataattagtctatttatagccatgtcattcaaatttttacaaaattggaaccatgccattgttgtctcgttttctatcttccctatccgtgcgtagggcccgccccttagattcattttcttcctctttcctcctctcttctatttttttttctttttttcccatctctctccaacactttcccgcctcctccccaccaatccatcccgacccactcctcgccgcccgcagcaacaagccaccgacatcgtactcgaactccgcactgatcaagcgagagagaaggctgccaactttgtcagtggtggcgacaccagcatccaacaccaacattgtcgttagctctagcgcttggagtctgccaacgccactgcctccatgccgactatgtgcctctactggccccgccacgttggaccggccttcctagagctcgccggccagcctccgcatggtcagcggggagaaccagcatcaggaaggcaggaacgggcaaagcaccatggggaggggtagcggcgaaggctacttgttgcatcgttggctagaggacgacggctgagctagagcgctggttactcgagctccatcgcagctgcttgaatcaagtagttatttcacgagaagaaggctctagtggcaacaactcgggtttggggatgaccggtctcatcatggagccggcagcaacaagatccagctccggacggctgtaggcgacgacaatgtgtgaaggggtcgagatggattggtggggaggaggctgagaagtagtggagagagacgggaaaaaagaggaggggaggatggagggataagatgaatttgacgggtggggtccatgtgcatatggggaagaagatagaaaacgtaacggcgatgacgtggttctaattttgtaaaatttgagtagcatgattatgaatagacgaattgtaatgacatttatctgaatatgttaacagtgaaatttggtaagcccaaagttaccattggtttagagtcagtatcggcttcaaagttctagaatcagccgatgggagtcaagtcgccacgatgtcgtgttcttggtggagtcggatcaatcaaaggaagcttatctagaagagttcgagttcaagaaggatgcgacatgacagttatctattaattaggcatagtttgttagtttccttttatctttagaaaagtgtgtttagtgtccgataaggactttatcttttccttttatctttaggttagtttctttcttgtccgacaaggacttgtatcaacccatgggtataaatatgtgcacccggggtctatgtaatctatcttcacgatcaatacaattcggcgcatcgccaccttttaccttttctactttattttatcgcccagtgggacttggcacccgacgtgcggctgcatcgtcttcgatctccggcgaaggggtaagtccaatgttccgtcggcccaggcaattgtatcgtctacatcggcgtcgttcaaggctgcatcagtacattcgacctcttggattgctctggtttggatgatatatttgcctagctatttatcatatgtctctattaatctagtcttagcatatcaatttagctctatcggctgcttctcgctttagggtttctgccggtatcggctaaattgcgttgctagattagattggcctaggcatctaccaccctgaaaatcagtcaacggcttgattgtctagatattgtgtttcttttcatacttagtgctgcatcagttaagtttgatctactaaatcgtgcttagaactataatctctaacctgctttctgactgccaataagggtttcatcggggtttcagccggtgaattatctggacgttgcatcggctcataaggattgcatatacatataagttggatttcgccgatgacaacaaaggtttcactgtttaatctaatcttgtggatttcatgacatcggacctccagccgatttgttatattttattatcagtagccgattgcctttatatcattatatacattggacatatagccgattgcttaaaccctatcgctatcggctggtatcgacatcggctattatcgactatcggctggaactactacatcggcttgtcagccgatcggctgttttgatctactatttacatatcttgtcagttgcatgatcaaactgactggcacgcccgcatctcatcgtatttggacctgcactggagctaagcagatctcccaggccggtgtgttcgatttttttcgtcaacagaataggcatagttgcaatggtacagatcaaattaacccttgaaacaagggattgaagcctactaattcctttgaatcctatggaatgagtacctattggtctctcaacagacgatatgacctatcagtgtgttataaggaacaataccttaggactgattttttttttacaattttcgataaaaaatattgttacttatttaaaaattcacaaatctaggtgatatgtcacatttagaattttgagttttaatctttcttggtaagttccaagttggctagatgcaaaagtttatatatgaaagaacattgataatggtggggtggttttgaataggcatttttgaaaattactacttagcagcggtgtaaatctatccagaggatcatgccagaaacatcgaaacttccggttggtcttctcgatctggacaagagagctgaatggagtttccagtccttaggttcaaaactttcgatcccctagtttcttccaataaagagggtgatagggacaatcttcatggaacaagcaatccaaacacgtagagaatgcaagaacaacaagcaataacagtttggactccggaacttccggcctgaggaaaatcacaaacatagcaatagatgaataaggagacaccaatttttcaccaaatttggcattgcaaatatcctacatctatgttgagggactccaagtagccagttctcgattaatcttaagcctcaccaaatgaccacaaagatcgagcttggtatccactcaaaggtgttccttttccttgttgagatagagtaacgtgttcacaaacctcttgggttgtccacacaccctggatactcgtgggtgatgcctaactagctaggagaacttccaagagtaccaagcttgaagatgatggtcggatgtcaatcctaagtgctcaaactgaacccccaaagaatccactccaatctcactctaatcactcagatgcacttgatccaaggagagcttatgggaataggtctaaaagttctaacaacaacttgctcaaagcaggggtaggtggagttaaatattcacctacccgaagctaaccattactcacaattttgaacttcggaacatccggcttgagggctgagggttccggacaatacttcggttttggaagacatggaggaccgaaacttttcgactcaaactccggaacttctgattagccctctctgctagctagagaactgtggttggaacttccggaacttacgtctggaacttctggtctagcccttggccaaacagagagctctagttgaaggttccgaacccgaactttgaagctttcggcctggccaaacacaaagctcttttctcccaattgtgagtgacatgctttgtgtttctctctaataggttttcatctgagcacaaggacacaaaccccacttgaataggtggtttttcctatgactcaatttcaaaagaaaaacaatgaaatgccttaagccatcccattgttttagttttaatttgtgagggtcatccatttagagcatcatccttagggactaatcaataattgtgcttaacactcaagtagctcattagtcccctaattgtcttgcctttaatattcctagatgcaatttaaatgtaagaaaatctctaatatagatgtgactctcttaaagaaaaagtgactttagagaaagtcacgctttatttaccataatcaataaaacgtgactttctcttaaagaaaaacgtcgtgacatgaaaatgaagtgattattaaggtgaaaagcacgagtgtgacgatgactagctgaccacgcatattgcacaccgccatcttggcaatcttaagttcctagttggttagacgcaaaagcttacatgaaaaggatctctaatagagtagtgaccctcaaactgtaaaacaagtgaatccaacactcttcacttaggggaaaaatagtgtaaccaacactcttcatttgtaaaataagtgaatccaacactcttcacttaggggggaaaaagtgtaaccagcactcttcatttgcggtcggtaacgacgtatgcctgcagtagccactccgttagctgttactgccagcccaccacctcggtatcgtgtatacatgcaacaaacagctactccaaaaatacttatattttaggacggagggagtagctagttagctgtggccatcataagtacaaaccgacgacaagccaggaaagcactgaatactgcatacatggaaaaaaaagagaggaaatattgccactgacatttcaccacaccaaaatttgtgtactgaaacaatactatatatgaatctatatgaatctagatatacatttgttcaggtacataaccaagattgatttcttttggacggagaatcccaaaatgcaaggacttttccttacaaattatttcaaaatttgaaatcctgagataaaactttattcccaacctatcaattacttttaaccttgtttattctctccaccatccattttcttactagtttatttctccacctgccaacttttgtagtactttattgtttcaccttcacctatcacctttt

SEQ ID NO: 2545 - DNA, 2761 bp, Oryza sativa
aatcaatcaatcatgataagacacgcagccatgcactactaagtgtatcacacataaattgaaaaaagtgtatcacgcataaattgcaaaaagtgtaccacgcataaattgcagaaagtgtaccacgctaaattgcagaaagtaagtgtaccacgcataaattgcagaaagtgtgtcacgcataaattgaaaaaaaaaggaatttctcactaaatgaatcaatccaaacaaagtaggtgcgattatcagttactagcatttagcattagtttcttttaacagtcaaaacaagacataatgtaactggcataaatagcggacttctgcagaaaggcaccaacctcagagttaggtcatgacactgctcttagcgtaagcacaaatttcttcctccccttgagaaaaaaggataaaacttgagccaggaggtatctgaacaaaaaatgtgttgcacataataatataagataattgccttgtacacagacactagagagtaaatccgagcttctagaggtacttacaagaaatgtttcacctaacgttttgggatgaagggatagctggcttcttctctatttgatcataatggagaacaaagttgtcctgcagaaaaacatacacaattataattcacaaattttcacaaaagtattatgtgatacaactttacattgaccaaacatccaaaccttgcggattgtctcccagttgtttggatcaaagcaaccataagatcctcgttcataatgaggtgttttgaccagaggctcaacatttggaattctggtgagccacacacgcacttctttatggtagaaccatcctcgagtatacctgcggaaaagatggacatataccatggttcaattcaacagttaaaacaaaagtaaaaaaaaaaggtttaatctccatttggtatttggttgtgctgtgctgcacctcaaagtgggtaacacatatttgccgtatgtattaagatattaataaattctaaggaagtaaatgcatatccaatatcaagcctcatgaaacacaaggaaatataataatcaattacatgaataacatgaaagatagctaattgatagattgaaagattcaaagccttaaacatccagaataattcaggatcatggaacatgttctggtgttgtgcaactagtagtcacccatctggattacgaacaagtcctaagcgtaccctttcaaataaataaaatacacaatattacttgtaaaaaattgctgttgatcctaaaccaattggcagtccactagtcccatactaatccaagctggtctaaaccagcctactccatccggtttcaaatttcttgacgttttagatatgatctcacataccaaggagtgtttaattagggtgcctattccctgttatacccatattaaatactgccatatgcttgaattaatcaatatttggatgtatcctagtggttcgaaacaacaaccagatgcaaagcatgcaggttcgaatcctagcgtcgcttcgtttttctcctttttctttccacgcgtggattttctctacaattttgcacgtgcagcacacgctggctggtgtgtttttctcgcttgtgcgggggacacgggagactactcaactttaaatggaatgcatgcataagaggcaaacaattccaaaataacctaataaatcccaaacgtcaacaattaccatactttggatacaaggctagaacgtcaacatttttataccggagggagtatgtcctacacaagcccaacaaaatgcaaaacccacgaatacagatcaatttaagtccatggtctatccaagatgttatattagataatgttggtggacggagggcgaagatgtggccaatctagttgtcaccattaacttggtttgcacccatcattaacagaaggattaatgatgcgtaaccagtggaaactatgctacaaataaacatggataagcacgactatgcaaatcaaaaccaacccctagcaacaagatgtaaatgagaagaccggtgaaaccatgtactcacagctcactagcagcacatagctgagcttcatcccttggcatgctgcaaaccaaagaaaaatgataaatctttcataaaaaaacaaactatactcacattatttgttgcaacaaatggactagcctaatagaattgaagtgggacacacttaatggtagatgtacctatagaagatgtaaaacagtgttggcgtctggaatttctgaaaatgtataggctgcaagaggcagaacacaattacaaatatataagtcataacatgaagcaaatacattgagacaataaattctgcctatgtttaagaacaactagtttaggaaattatgatggtcaacatccaataaaagatggcaaatgcacagccagccattacatattaaaaaatagcacacagtgacaggcagcttacttgtagtggtggaggttgctcagcggagtagcaagctggagtatgaaactcaggttctccttttgctggctcgtttgaccatggagagccaaatgtcttgtacagattgtctggtgagttcaagtttaaacccaatgttgtcaaatctattcctaaagcaagagatgataagtcaacatcattcatcctgataactcctagcaatcccatcaagccatatggatcagatggtgtttggcccccctggatggactttagactctgatccctatatgactgggtagctgaagacacctgctgcaatctg

SEQ ID NO: 2546 - DNA, 861 bp, Oryza sativa
aaaattcagaaacagggatgcaccggatattgttgcgcttgcataacaggtacattatcatgaagttgttccttgtgatgcaactccatagcataatctgtagtgttgcctgataattcaaaaggttaatactttgcacaactcagcaaagggcaaagaaaggaatctgttatagtagcgaaatacgcaccaaaagagtaactaaaggaaaagaagtttaaaacatggtaaagaatatccaatgatcatggaataaacacaaggcaagtaacaggtttcgaccatccaaaacacgtgccaagtaataaattcgagacaggaaatagattatggccaaccaaaatacgagacaccgacaaaatataccaagaagccaaccaaacataaaagcggaaggttattttataagatgattcaccagctaagtttagaaacattttcagcacaccaacagacacaataaaacaaagctgtgatgttcagtgcatcacaaagccgaggaattaaaggtgcccatgtactgccaaatcgacagctatggcactaaactcttagcaccaaatatgcatcaagctttttaagtgactttatccgggaacatcccggaattaaatccatgatatccataaaccaaactcaagccacgtactgtaaatattgttatatttagctagcctaaactatctcaattgaccattgcaaatttccggcatgaggaaaatttgcaggtcctaatattctgccaaaaaaaatttaaaatattgttttcagcatcatgaaccttcccaaataagtttcatattttttggattgcctcaaggcttcaatcacagattcgcagctgcctcgggctgcaggaat

SEQ ID NO: 2547 - DNA, 624 bp, Oryza sativa
tactataaaagacactagtggtgccaccaccactacttttgtactttttgcaaactagtcccttatattttctaatattatataattgtctaatatttgtttcaatcaagtgaatatcatgtattcaaataagcaaacatctctatgacatattattatatattttcttttacccatagcaaagcatggatattttgctggtaatttagaagtgacaatacatcatctcttggctaggttcttgggattatatgaggagacacagattccagagaactgttcaagtgcatttgatgtgatttgccagcgaatggagcagagaatggcttatatccacaatgagcaggtgaggattgatcatatcagcagtcctccttcgatctcatgtattttatataacagtacagaaaatttcatgaaattatcaaagtatactcttttttccacaatacaaaagtgaacttgagagactgagagagctgattttttttttacattgaacgggcaaggtctcagaatatattcactcttttattgtggactttaactaaaagaaacttgaaagagagctgaactttacatacaagtgcatttgttcctttttttattgctcacatggagtat

SEQ ID NO: 2548 - DNA, 12516 bp, Oryza sativa
  unsure (1)..(12516): unsure at all n locations
cgttgcttaatgagctcgatcaataggccgtgatctctctttttgtgaccatgtgctacctacacggcatttgcttagcttaatgtgctcatcttcgactgcattaattaataattaagcaatcggttttgatggtgatctacctatagcgacaacgacgacaacagagagagttgacgacgacaaaagagcacccataatagttatctataggctatctataagagatccatatcagcatattatctaacttggaagagattaaatgaagagagaacaaagctatctactaacctagagatagtctatagagaaaaacgagacaatgaattagagagctataaatacacatgtagacacattattgaggtggtttactattaatctagtctattactgagatatacatattttatagagagcatcttactttaccattgtagatgctctctaagggaggttcactgtaatttgatcgagtctagcttgcacgagtacgcgaaaacaaagtgatttaatacaccactgatgattcacatgcgatataaaacacacgaacgaagaacaggtagacgacaaagacgatgtgcatgcagaaacgccgtacacgtacaacaacagtgccgatgatgtcgtacatatgtgatcgatgtgatgtgccatgtgtgtccagggcaatcgagagatattccacacaaatataattccattgtccagacggctcacctaattaattaagcacactattaagtacaggaaaaattacaaaaaccacctcataagtcgcttgaagtttaaaattccaccaataagttaattattttgttacaaatgtttatccatatatttagttttgttgcaaaaatcatcccaacatacacatgcttaaccgaatcaatatcttttaataaatgctccctccgtactcgtaaaggaagtcgttttggacagcgatacggtctccaaaacataattttgacttcttgtttctataaaaatatttattgaaaagtgatatatgtatacttttatgaaagtattttttaagagaaatctatttatataatttttacatttttcaaactcaacaacttgagaattatttatgatttatattcttaaggtttgacttaaatattgtcctaaacgacttcctttacgaatagggaggaagtacttccagagtcttgatactttttttttgagatttcacaaataaaattgctgacaataacttaaatgttttttttttgcaattttagggttgtttttgcaattctcaaacttcaagtgaattatagggttgtttttgcaattttcccttaagtataactacgtatgcatacagagtacagatacacaggctattattagcacgtgagagttgatgtccacgtcatggatgtcgtaaatcgatctgtttcgtcgtcacacaccttgcagtagaatcgatcgatgtcgacattatgatgtgatataattaatcgacacctgttcattttagtaaaatttgtttttattgcatgaatcccattcaaacgggaagggagctagctagctggcaatccaatatttgcatgcttccaaattcatatgtggaagtaaattttcatttcaatcaaacgtgaccgagagtataattaagtgtttctttgctgaactacgttggaacaagtccatagaaaaaaatgatatgatatgaaaaacatgcatataatcaatttttctcttctgttgtttattgttctggtaaattttgctctagatcatttgtggtttgttggttctaaactatcgagggaatatccattcgttgtttgcatgttatctaaatggttatgaaaaaaattcaacgagatcgattaatatgcgatattaaacatgtgtgagtgatgcacatttgaggctaacctcctccattgtaggtatcatgtatcacacaagttagttattcacattattgatatgacagcagataattgatttgcataagattcaattgcacaatgagtacatttaaatagtactatgggtttttctgttcttcaacatattgctatagatatgcattgacatcgagagcctatggaaaatatttctatagatattcatttgtactgctgactataacaggcagtactatttccatgtggatgtttcataaccacaaaattaaatatcatttcctgattgattcgtacaactgtgcattcaccgcgaatagtgcacacagcttatcgttctcatacgaaagactattcatatatataagaataaacaacaaaataattgaagaatgcttatatggttaacaatatgcaacggccggtttcacataaaaatatcgagagagagatcagagagctatcacatacatagacgttgtttgacatcctgatgcattttaaataattactccttctgtttttaatcaataactatcaattttaattaagtcattttttaaagtgcttgtcactacactttcattagtaagattctaactttgcctctaccgaacccccacatagttctattttggatcattccttttctcgagaccccctttaatttactagttttcttaattctatttcctaacaatttttagttaaattttaaataattagattggtcaaaaaattttaactaaaattttgccgtgttatacatgccaaatatttttaatagcgtgtttgttttgtgttacaaatgctattatatatgcacggtgtttgcacgctctagacgtgctgatccaaaatatcaacagaaaactagcgagctcttgtcaaatccatctttcctcattcgcaacgacaacacaaagcataatcgttaatctggtatatatacaggacatacgtgcagtggctatcacatgaattatattcgagatagagccatacacctgccgtctaaggctgtgtttagttgggaaaatattttagatttggttgtcacatcgaaggtttgaccggacgtcgggaggggtttttggacacgaataaaaaaactaattttatggcgagcatggaaaccgcgagacgaatctattaaacctaattaagtcgtcattagcacatgtgggttactgtagcacttatggctaatcatggactaattagactcaaaagattcgtctcgtgatttccatcctaactgtgcaattactttttattttaatcaatatttaatactccatgcatgtgttgaaatatttggtgtgatatttttgcgaaaaatttttgggaactaaacaaggcctaatttgcagggcgcatgacagcgaacaacagagataataaatgagaaaagggggggcgaattgaagagactcgatgcatggcttgtagagaaaccgctgtgagagggaagatatatgcttactctggctcccattggatggtctaatcagtcaaagaaaaagccaaattttaaattttcatgcttaattttgagatattttaaacgtaatttcttttttaacattgacttttaaatcaccaagaacacatttataaaagttttacctacaaatttatttttatttcctaatacggtttattaggaaatatgccaaacgatggggaccttgctctctgacatcttcgagagggagggtgcctacagcggaggcaaccaataatcaatcgatgcatgtttgtatcgccctcagacagtgaagattacgaccagattcaagctgagttgattactgttaattgattaccgtttatgcatgccattagcttcagccgtcgataggatgatcaatgatgataggataattaacatcaatagtgatatcaataatccacccagcaaaactaattaactggtcactgcatgtacgcataacctaatcgttggactggatcaaggtcggcgcaggggattaattggagaccatctcacttggaaatcagaataaaactgtttgaatcgccggagcttgtgtacctaataaataggtcgggctctcgtgtcatcgatcaaaagggaccacatcattgacgacggagaaaattgaagaatgtctagctttatagctaggagtattggtgttcagagcagattggatcgattaatctccattatggtaaaacagctgctttaattaatttgctaggctgatcatagcactccaaattaaatcaagcaagtacggtagtagtacagctcatgctcaaagctccaaagaacaacttttgcgaataagttagccgcgccttttcttatttttcttcgccctcgcccgcacgcagctcgccgcgtcgctgtcgtcgtcggcgctagctgggcttacctcgcccacgcgacccttcgcgcgagacctcatcgatcgccggtgggccggccggtcgcctgccgcggccggcatgcaacaggctcgtcactgacgctgacctcactgagtcactgacactctgatggcggccggctccggtcagtggtgtgatgcagtactgcgaacagatcagaaatcagctgtagctgctgtagcctgtagcaagcagcgtgcagtggcactgtggcagaagcgactgaccgatcgggcatgcgttcatttcgcagctgactcggccgtcccggattacactttttcctgtgtgggaaactaggagtgacgatttttatgacgaatccaacaggaaaagtatgttacaagtggagagactggcagagaaattcagagttcagatttagatcagctggccaagaaaattaacgctcttatcatctacttatcaactgcagccaaatttagaattatagttaaatttaatttttagagttcattttagtgtttcttatcttacgctagtttccaacgttatttttaaaaccacaatcgacatagattttctaaaagttatatttacaaattgtttcccttcattcatttttaagctgtagctcaaacgagagaaaatttcttctataatgattaaggccccgttattttccacccattagctaatatattacgaacatgttttccaagccactaaacaacatgattcttttagaagaactttccatgtaaaaattacttaaaaatttaaacaaatctatttttaaaatttatgatatcaatacttgattgattatgtgttaattgaatttcttctctggcaagtaggccaaacctttcaaacgaacagagctgcatgtttctctgcatctgcatgtcctgttttcctgattccagaccacacgggcttgctctgtgtttggtaggtcgttgggagctgagttttgctgacaaaatgctacttacatcgttctcatccgatcaagtgcgtgccttgcaagttgcaacaaagcttattactagatccaaccatttcgctgccagcacnnnnnnnnnnnnnnnnnnnnnnnnnnnnnnnngactcgccgacgtgacgcgtcccggagcggattccaaaggcttaattttttttgctaggcaaaaaggcagcagcgaaagcaacagacaaattcagctaagaaaggccagcgctagctgcttattcctagcatttcgcacattcatattaatgttaatggatctagatatatatatactatgtaagtcattttagcatatatatgtctagaatgacatcaatataaatatggaaaatgttagaataacttgtattgtgaaacggatgaagttattagcttcccctggacgagggctctttggcatgttacgattaagctgatcggcatcatcatcaagacggcgacgcccgtaaaccggggaattattggctccccaatggcgatgcctgggacgatgtgggccaagaaaacggccagtggcacggcgcgatttgcaagtaaagatcgatcgcgatggacgtcgttttgttaatttgttcccttctggcccagctgatcaatcgatcgatcgatcgattgcaggaagagtagtggcattcaagttttgatggtttttttctgcactgcatggagggtttgattggaagaggttagctactagtaggacggtagcgatgggtctattctgaatttttgattgatcgatcggcgtcgtcgctgttgggtagtcacggttcagaaactggtacagattcctatttcctggtcctgtgtatttaaagagtagacgcttcttgtctgcactcatatatgcagacatactcctacaccgcacaatgcatggattcatcgttcatctgccaagtaagggccccttagaatcgcatgaataaaaaaatggaggaatagaaaaaacacagaattctgacaaaaatgtaggtgtaaaacataggattggaaaatacaggaaaaacatatgaatgaccatttgattagaccacaggaaaaacgcaggaatcaggtgagatagatagactcaaaggaatttttccaagaggttagacctcttgctaactttcctctaaaatatctataggattacacatttccaaggtgggtgagagagcggaggagaagcgcgagaacgcacgttgaggccgatgcccttgatgtgggtctgggtcgcgatccactgcttcttcctcctcgatcctcatcgccgctgccgccgccgccgccgctgcgaggacgttcagcagctaggacggtcgtgcacgcggcggtgacatgaaaagtagagaaagtgatacaaagtagaacaatttacaattacaatagtatattttagaaggcgcgcggattaggtggtaaagatataaaggcatgtgtagtggagggtgacgctatcgaggcggttccgtgattgagtttccgaacccctcgaacacaatatttaccgttggatacacatacgacggcgcagatggggaagagcgaaagtagcaaattatgactgcgatcctagtgaacacaatcacgtaggatcatgttcggcgcagcgatcatgtcgtgttttatcgtactgtagcgctgcgactgcagcagctatttgaggattaataactgatggaatagacctgatggaattcacagatcacacaatgaagggcccgtttagttttgataccaacttattgccttattgtcttaccaatttttttaatagtagcaaatgcatgtttggttagtagtaaatacatgtttggtttgctacttttgtcacaataattcaaattcaatactacctaatttggtagtgctaaaactcgctaagattttaacacaaaaattggattcaaaccaacaagccggaaaattcatcaccttcgccgtcatctccgcctcccagtcgactgttgcgccctgttgaaaggacgactttggtttttgttctccccaaacagggagtcggacaataattcaccgaaccccacgaacgcaatgacttcccgcgagccctccttcccctctgggagcgcaccgagtcgtgcataatatcgtatgtacatgatccaccctttgcttgctttcgctcggcgcgttcaccggacaaccttttcatggcgccgccgccgagctccgttgatggtggccgccccacatactagtggagacgatgtggcaatgcagtactagcaggattgaggaaacgaagaattgtagctgtaggattcatataagacagagatcataacataatgcatcgatttggaatcgttcacgaacgagatttgacataatttgcttgatcctacacaaaagaacagctacttccgtagtcttcatcttcacggtcacaccagcgtttatacatagcagatcagcgacaacttgtactaccgaaacacgaacagagcacaaacacattctactgctccaaccattctcggcaaccatttccagcttctactaccgccacgctgccattacccgagcactacgctatgattcaggcgatggtgacctggacggacttggtcttcttctccggcggcggccgcttcttgacggtgaccgtgagcaccccgttctcgcatcgcgccgagatgccgccggtgtccgcgtcctccgggaggcggaacttgcgcgcgaacgccctcggcgacgcgcggcgctcgaggcggatgtacttgcactccccttcctcctcctcccgcttccgcttcccgttcccggcgccattgctgctcttcatcaccagcaccctgtcctcctccagcgtcacctgcgcagacaagaaagaatcgcgcccaaactaactcgctgattcgaacgcgaatcgaggaaattcagggctcggattttgtacgcacctggatgtcggacttggagaggccagggacgtcgagcacgaacgcgtactcgccgggggtctccatgatgtccactggcgcgccaccaccgattccactgatgcggtgctggccgtgtccatgcgcggcgtggtgcgcgtggtcgcccgccgagcggcggtccccggcggcggcgccgaggcggtcgagcacctccggcaggtggaggaggctggtcacggcggtgtcgaacagctccgtcatggctaccaacttgggctttgctctctcgctctccttcttgctactgcagcaatggcgagacggcggtggaggagaggaatgggtataaagcgagcggaagcgaaggttcgagatggcgcggagttcgctgcgctgtcgcgcgtcgagaaagatcaggagacacttggaagaacctcgtacccacttgtacattgggccgaacaaagcccaaatctcccatcacagcagctgttttggaccgcagtctaggccttggcctggttggagagttaatccgcagacaccgagcccatcaaatctgttgctgacactggtggcctcgtgcatggaatataaagtccacttatggcctctcaactttacttcaagtttaactaacatcccttattcccagtacaggaaacttagcccatcaactatacgaaaccgtacaatttgataactcgtggaggtggaggagttagttgcagggagagcgctacgcgtcggacgtacggcacgagacgaaaaatcggtgcattcatgagccgtccgatccacgcgcatgccatcagacatccaacatcacgaagcatgcatgcatgaaaaatattttaaactactttttctcttaaattatttatccaagtcatgatccgattacaccattaaattcgccattaaattcgttgcagttaaatttttaaaaaggaaccacacatggatatattccagtgaaaaaaagcttattattgaattatttttaaatgttgcacattgttccaccaagtatatcggaattgtttcactaggtagatcgaaaatgtttcaattgtttaaatcggacgttgtttcgccttatataaaaacaatgtttcagcaaatagcgaaagaatgtttcaagtcactgcaacatttgatcgatataaagtgaaaatttttttgtggaacaaaaaatgaaacgaattctcttaatagatgatttacataatatgtgggtgatttgttgcaaaagatttttttcaattcactgcaacattaaatctatacataaacattgtgagtacactaggcgaaacatttttagtggaacattgtgagtacactagtggatacttattgaaacactcgaccaacatatgtgcaacatttacaaataaaccagtgaaacacaataaactacttactgaaacatacaaatagcactatgagatacattaaagaaagatatatacatcgcgacaataaataaatatgtgcaacataatagaatttcaattgaaacatctaattttcatatgtgaaacattaattttaattggttgaaacatatgtgtttttttatttaatataatcatgtgagatcttgttataaagatttaattgtaacgaatacaatggtgtaatggttcgtagattggatgagtaatttagaagaaaaatcgttttcaagtttgctaaaagtgtgttatgtacatgcaagtaacctcgtgtcatctctctttcatgcatattaatacccaaaaaggaagcatatgtaacagagagagatgatctgacaaaggctgcatgcagtaaaatcacagtaagaggcgtccgatttctttgtcaagatcggacgaccggattgaagcattttcctagttgtagctgtcgtctgggaggcccagttccataatctctcagcggactacctccccacctccgccttcctcccccacagcgtgcacacttcgctcttcagctctcctggtattgagagtaagggatgttaatcaaactcgatgtaaagttgaggtagaaagtggacttatttccctcgtgcatcgccggcaacctaagggcctacttagatcgtttggcaaaatttttcagcatgtcacatcaaatgtttggacacatgcatgtagtattaaatataaacgaaaaaaataattacgtgtaaattgcgagatgaatcttttaagcctaattgctttatgatttgacaatataatgctacagtaaacatttgctaatgatatattaattagacttaataaatccgtatcgcattttacagcaggaatttataatttttttattactagtctatatttaataatttgaatgtgtgtctctaaatcctatgtgacccatggaaactttacatatgcatctacgcttcggcctcggcacacggcccacgtcgtgtcgtcaccatcgtcacttcgctttatcgggacaaagggagcggctgcccatggcccacggtgcacccgttccacgtgagcgcgcgcgcgtaccgaactttgtgggccaaacccgccgcacagccagaaagatgccgcagccgccgcatgccgtccacgcgcgccacgtttcgcggcgtccaccgtgagccaggttcaacgcaccagggcggaggagagtgacgtggcagtggtcgtaatttcacctgatcttcgtggcctatctctcgcaggaggtggcgcgtggttgacgcggtcagaaaagcgcgcgcggccgccctcgaggcgccagctgggcacccgcgcctgaaacttctggatggtcgcccccggaaatatctccgtcctcccaaccacatctcagccgtcaaccacccatcggacggatggtaaaaaaaaaagaaaaatgatccggttagatgtggggtggtgggccccacatgtcactggaaaggtcttgcactgttctagacacatcacacatctgcttcgaggcgaccgttgcgttttttttcctgatgctccagtggaaaaaagagcggccttgaagagcaagtttaacagcgtagccaactactggctctaatttatctatagctaatctaatagtttatttatacaatagttacatactacattattaatacatagttccatatattatacacacactgtgtcttggagtctgtgctacagttggctacaaatctgtagctcgctgcccttctctctctttatttatcttcttaaaatatgtttgcagctggcttatagcctgctattatgtgtcttcaggcgtgtaatcataaccaaactaattaaccgctagtgagcgtctaatggagtagcatcaccagctaaacgtatttcagaattgtggatcagatcaactttttgtctaagaatctttagttgctccggctttcgcaagtgtaaaaggcactcgcaattggtaacacacgccatagccacactgaaaaggacaagcatattagcagttgcccctacctttcaaacgattctttcgcctgattaacatctttttcgtccaggttgaaagttgataatcacaatcaattaggcccctttgcaatgcatggttgtctgaaaattcaaatacagtaaaagtgcaaaacagaagatgcagctagtaatttccccacatagcagaaaccacataaaaccgatcaattaggtatcaggtcacaattaaccatccggataagctcatcaggagtgcatctactaccatcttctcgaatgatgtgaaaaaaatggcaaattgtcaaggttaaccgtaaatctacagtgccaatttctgacggcacatcctacgagcctcatagattattcatattctctaataaacaaaaagatttgtgagagaataaaaataaatttatagataaaatgtttatatatttgttcgtagcgatttaaaagtcaatgttaaaaataaattacgttaaaaatatcttaaaattaactttaaaatttaaatttagattttaattttgatttattagccaaccgacgagactctacggctctgtgcgcaacagtagcagtgtctggaagcagggatagctagctgcagctgtagcaaaagcaacgatggccagccaaggctgggcgagacgtggaaataaagcgaggaaattcctaggcagaaatatttaaaaggcaagtgggcatcatggccttgtttctggaggcttcctggactgcgtggagacgagcgacctgagagagagagagagagaaggcaagggaaggaggagaagaagggggacgaagcggacgaagcgcgcgcgcgccatctttgctttgctttctctctcttccctctcctc

SEQ ID NO: 2549 - DNA, 13408 bp, Oryza sativa
gagaaagagaacgatcgaacgaacgagagcgagaacgagaacgatcgaacgaagacaagcgagaacgagggaacgaacgtgaatgagaacgagcgaacgaacgtgaacgagttagggaacgtgaaagagcaaacgaacgaggacgatcgttaacgtgaaatgcaatatatatatatatatatgtatatatataggacactcatatggggcaccatggtgcccgggcaccatggtatcaaatacacaatgtatatatatatatatatatatatatatatatatatatatatatatgtatatatatatatatatgtatatatatatatatatgttacttcgcatttatcctaatacatttttttgtatcttgcagaaaagacgtgttgtcggagtcatccgtcaagcctgagtggaagagctagccctagaaggaattggagcaggcaagtgacgtaataatataaatgattgttatatttgtaatgcaattaattaagattattagacctgtaattagacttatcatataagattgtgtagtgttctaatattatttgagttttaatataagattattttattgcaaattagacttagtatgacattattgactacggaattggtgcgactcctagcaattgactattgtagtcttaattagacttagcatatacgcacgaaacacttagcatacattactattttagtcttagcatgtaatattatttgagttttaatataatattactttatttgtaattagacttggtatgtaattattgactacggaattggtgcgacaagtagcaattgactattgtagtcttaattagacttagcatatacgcacgaaacacttagcatatacatgactattttagtcttagcatgtaatattatttgagttttaatataagattattttatttgtaattagacttagtatataattatttactagctagggttgtataatatacgtcacctagacttagcttatatcacgatttgtaattagacttagcacgtaaggttgtgtagggttctaatgtacgacatttacacttagcatacatgacttagattgttaaaacataaatgtctcgtgacttagcagatgtttcttgtatcaacagatggctgaccgcgatgaggaacagatattgtacgatacaatcgcggagggaagcagccagtactggaatgaagaagaggggaacgaggatccaaaccagtacttgaacgaggaagggaacgtggagagggatgcggaggggaaccagcaggggcacgtggaaagggatgtggaggggaaccaggaggaggaggctagtggtagtcaaccctccgttggacagaagagggcacgcgggcaatgaggtgcagcgaagaagcttgagggtcggcacatcataacggaagtggaagaagatggacgtcctagtgccccggccgaagccgccaagaactatgtacgtcacagcggttgggttgtgcgggataacgtgcctgtcagtacggtgtactggcgaagaacaagggcacgcggagatcatgagagctttgtcccagattcggagaaagagatgctgtggaccacaatgctcgagacattcacccttcctgcgggtacagaggacaaagtgaaaaggtggactctgaagaaaatggcagaacagtttcagagcttcaagtgagatctgtaccagaagtatatactgaaggggcagacaccgaacttcgacacattcccaaagctaagggatcactgggacgagttcgttgcatataagacaggtgaacaagggcaggcgatgatggaaagaaacaaagaaaatgccgccaagaagaagtaccatcaccacttggggtcaggaggctatagcgtcgcgatgccgaagtgggagcagatggaggctagcttgattgagaggggtatcgaaccggcaacagccaattggccggaacgatcgaagttctggtactatgctcacggtggaacgctcgacccagctgatggctcactggtcttcggctatcagatacaagaggctgcgcgacgactaacagatgcagtggaagcctcctctcagggcacgttccgaccagacagagatagggacgagctgacactcgccctgcagactccagagcatccaggacgaactcgagggaaaggggtgattccttggaagattggttttaaggaggacatccacacgtacaggagtcggatgaggagcaagagagataccgaggcgaagattgcagacctagagttccgggtatcgagctacgaactcaacatgcaagaggaggtggcaaggaaggttgatgaacgcatggccgcacatcggtcccatgatccccagccgaccattcctcctgcaatggtgagcccgtcaggaaaccgtagcagctgcgcctcaacggggcaggtaggatcacagagcatggacgccatgcaaacacaggacgaatcgacctgtcccgttgatgacatcactcagcggacaccatgtgagctgcatattcctttcaagaacttatcaataaaggtaagatttagccattccgctagttgctgcttatatatgttgattactaataaataatctctcacaacatgaaggtggcgtcgggcatagccatcccaacggaccctttaggtacttaccactgcaggccgattccagcaggatactccaaggtcgaagttgagttggtcgaaggcgcgtacgagtacctcgagctggattaccctacaggagacggtgagacgcatctacgagacacatgccatgccattattctatggcgcaggcggtacatcatcctccctgggcgacaagcggcgtctcgtgcaccatctcctccggctccgccatctcctcctcaggatcctgcaccgtctcctcctcatgctccgccagcaccgtctccaccgcaggctccagcatcgactcctcctcaggatcctgcaccgactcctcctcgtgctcctacacctactcccccgcaagctcctcttccggcaccttcaaagtcaagggcccccccagctccaccgcttgcccacacaagggcaacaaagaaggtgaaagttgacgccgccaagaacaaggacccggggtacgattgcacgcaagaggagcttgacgcttacgttgcatcagaagtcaagagacaattcaagcctcgaagtccagaaaagaagattcctatagaccccagtgtcaggaacttcttcaggggtatgtctgcatctgtcaaggaggccatcaagctatcggactatgagcgaacgctgaagaaagcatcttctggaaagtccaaaccagtccctcagcttggagagcaaccaaaccaggagatcgagccgttggtgaccggtaaagaaatgacgatagaacaatttattactgacaccggtctaactacggatcaattgctaggagtcgcaccaatcgaaaaggcggaagtgaaatacatgtacgaactcggtaaaccgcttgtcaagcctgagctgctgcagtccctacccacacaaatgtacaagttccatcagctgtacatggagatgagcgccaccggtagagagatgatcggagcgaggatcagggacacggacttcttgcaaggagatgacattctctggatcaatttcaggggaatctacgaactataccagctggacgccctcgacgtctctattatgagttgctggattttgtaagtatatcgttcagttagatttcttactatacgtctcctttaattaattaggtccttgtatataagtagaccatagaaaataatatactcccttttatcgttgtagaatggagattcaaagggcccgacggcggagggttttcgatactggattcatcgaccctcggaaagtaaacgtcgcaatgctcgaccaatatccacaagaaacagaggacaatctcgttcatctcctgaaggcgcagcattacaagacgttcatactgttgccatacaacacagagttagtttaattttactgtcttcctacataccaaatttcattcccgtacgaacttgctaagtgtttcatatgtaatgcatcccacgcacattgcagattccactgggtgcttttactcatcgacctggaggcctgcaccgtcaacgtatatgactcaatggataaaaaagagtctacgtttgacaaggttttcgaacttatagacaggtaccgtcataagttcctttgttaattaagaaagtcttgttatgttaattgctactacgaatcatagctttaaactccatgtagggcttggtatcggttccgtcatttggtccgcggcaaatggagagaaagacttaggcggaagtttaaatttcctgtgagtacacatgctctacatttatatttctccgattcaaatacatacaagtgtatattaattagatctctcgttgtttgtcatttatttgtagtgcgcaaagcaaaagcagggaactaacttgtgcggctattacgtgtgcgagtattgccactgccttgcagaccaaatcatcaccacaagagagctcgatgtacgtacaaataaattcaaaatttcattacgtagcgatttcttgtttaattactaatcaatttcatacattcatatagtttattctcatgagggataacctgaccacacacaaggaatttatcgcggcggttcaagaacaactcatgggattcatcaacgaagaaatccttgatcccaagggtgaattctactacgacggaaacacaattcaccggtccttagcttctgagctagcagcgagtactactacgtcgaaatcgtagctagctaggacatataatggattgtaattaatacatgactacatatgtttctatatgcatgtgtacacattttctataatgtaaatatattttgttcatatatatatctatatacatatgcatttgcataacatatatatgtataaatacatatatattatgcatgtatatacatataatataatataatatatatatatatatatacatatatatatgtatgcatatatatgtattgaaacatatatatgcatggtttatatatatatatatatatatatatatatatatatatatatatatatatatatatatatataaatataaaccatgcagcaacaggggcatgcaaaaaaaaaaaggtcagctcgatctttagtcccggttggtgttaccaaccgggactaaagatcgatctttactcccggttatttcacccgggactaaagatagcgatctttagtcccggattggtactcccggtttgaaaaccgggactaaaggggggttacgaaccgggactacaaagggtttctccaccagtgaaactagaaaaactaaaacataatcccaacctatatacgtggatggattgggattaggacctaaccagaggcacgatggaggtgtgagttcagtaaatgccaatgaaagcacattttttgctcagatatactctctccgttttataaagagtacttttatcctttttttattttaattactgccaggacttttgtcttgtagtgcaattttcattaaatggaaaaatataatcacagagagagcactgttagatttataaatagtactttaagatatccaaccattagtacttcattattcttcccgttttctctttgtattaatgaagggcatgttagtgccgattgctcgatctgctttaactttcaaaaacaacacttcttttatggagggagtaatcatctactcatgttgctgaaagctgaaagctgaaagtgtgagctcactaatcccattcctctaaaattttttaactatattggttggcctttctcagacaagagaattcttataattctctctatacagtacattgaacgtagtatatttttctgcattttgtttggacgcgactagcggttatacgtcttatcctagccaaaatgttaaatgccgggtacccctccgtcaaaaaaaaattccaatcctagtacgaacctggacatatgtgtgctcatgttcgtagctagggtttgtctctttttttttacggagtagtagtgctttattactcgtcaaaaaattatttttgatgtttttaaaaattttctcaactagatgtgacatttaagaagtaccaattataatattaaaagcaatattgccaatcgccttcaagacggtggaagacaccgtgcacataccttcaaggaggcattacatattactccctccatctacttttgattggcatatttccaaatataaaaaatttatttttgataggcatatttcaatccaacaacctatccttttaatgactttttcagatttaatgtgtgactctccattcattcacacataattggctacatgagcatcgagaaatgtaaatattaatgaatcgcttgtttacgagaaataactaatagcatgtttaaatggattataagtagaattaattatccttatcctcgttaggtataccaagatgaaatatcactatcaaaaatagatgaagagagtatgtgcaagtacagcatttgattaaaagagggtgaaacactcaaatacaaaaaggtgcaacaagataaagcataatacaatgttttgaaaaaaaaatacaagaagagcctatcgtccgggccgatggctgctcgtgtcgatgacctctggcctcgtggcctcagcctcttccattaagtggcatagttattactcacatttgggattaaaactatataaaaatcattgtgtataacttggtgtcaatcgtatcctacgttatcaaatattatagtcgggtataatccattaatatgtaattttttcaaagacgagtaatcatagttgaagtataaataatgtctagcgataagtatgtcgaaagagagggattataaaaaggagcatttacaaatttgtcactattttttaaaaattttacaaagatgccactcgaacgataattttattggcatttttgtaattttctagtagcagacttgtaataacgattcaaaatagtagtaaatttgcaattgcactttataaaaatacagtatatcttagagataatcttgttgggctttatctttagaaattaataaataactatatttaattggcagcagcaataaataacattcttccaaggaatcatacctgtcaaccatgaagcagccttcaaacactgcctacttaaggcagttttacatttacactgtacaccgttcagccatgagcctagctaagcatctcaccagctaattagccgttcttctcccctgattcgggtaattggcttgataatatgatggccatgaagaggctttctttctccttgttcctcctcccgttcttgctcctcgcgttcgtctactccctcttcttccccggctacttcagtatcctgccatctctcgccgccaggtgcagcaacagcgtggcggcgacgccggcgaacgcgacggggccggcggtggatctgcgcgtgctcctcggcgtggtcacccgggccgagatgtacgagcggcgcgcgctgctccgcctggcgtacgcgctccagccggcgcccgcgcgcgccgtcgtcgacgtccggttcttcgtgtgcagcctcgccagggaggaggacgccgtgctggtgtcgctcgagatcatcgcccacggcgacgtcgtggtgctcaactgcacggagaacatggacgacggcaagacgcactcctacttctcgtccctcccggcgctgttcgccgacgcgccgtacgactacgtcggcaagatcgacgacgactcgtactaccgcctggcgtcgctcgccgacacgctccgcgacaagccgcggcgcgacctgtaccacgggttcccggcgccgtgccacgccgacccgaggtcgcagttcatgtcgggcatggggtacatcgtgtcgtgggacgtggcggcgtgggtggcggcgacggaggcgctgcggggcgacgtgaaggggcccgaggacgaggtgttcggccggtggctgcgccgcggcggcaaggggagtaacaggtacggcgaggagacgcggatgtacgactacctcgacggcgggatgcgggagggggtgaactgcttccgccacgcgctcgtggcggacaccgtcgtcgtgcacaagctcaaggaccgcctcaagtgggcgcgcacgctcaaattcttcaacgccacacaggggcttaagccttccaagctgtaccatgtagacctgtgaaaattaaggggaaaaaaagggatcggattatttgtcagtattagctgttggcagtttcttcttcggtatgtgcatatcctctcttaaatgcacagtaagttataaagtgttcaaatttaaaacttgcatacataaatacataatcaacaaattacctgcatatatgcgctagtagaattgaagacacaatgactaatgaatgtgatcctagtatcctatcaggattgctattttagttccattttaggaggctaatatgacaaagtgtttagatgtctactactagtaaattaatttactcaatgattaaaaagaacagttggttgctatataggtagttttgccacacaaatggcgtgatttgatttgatacatggctaccactttatgttaaaagttgtttaaggctaagtctgcgcgtggtagacatcgagtcaagcttagtttctgttcaacagatccttatcaggatcttattgtcatcaagacatagatattggaaagagagtcaattaaaatataaagaccctttcctatatttttttataaacatttgtacaaacgcgacgcaatgctcacaacacgtacacactcaatcctatgaacacacatatgtacatcgtatccctatgagtatctccgaaaaactataccgacatatatcttaatattgacgaagtcactacggacgtctcgttattgacgggtacgtctcctatcaccaaaagaatagttatccgatttggcaaaaccattttattttgcattgtttagggcaaccataatatatgaaaaaaaatgatctatataattatttatgatctgctttacctatgtaagagtagttcatatatatagtagtccagatacccttatgcatatgaacatgtcataagtaataaaaaaatattaggggattctctttctcctgattcaggccactcatatgtcacgtgtctcattataaagtctacgcattatggaaccattttttagaccctgtctttaagcaataaaagggctgatttagcaatatacattgctcttaacctttaaggtgtataacatctgctttgttatgtttaaattaagtagactagcaatcatacttctattcttaggactaaacggtcatcttgttttttttttttgaaactttaacagtaggggaagcccctacggtatatattatgaaagagttgagagtacaaaaagactaaattacaaagaaattacaagggagacatccatgactgaataaaaagagtttggtcatctctaagtctaagtaaatgtagacttaggtcatctttaagagcagatttccagcttaaggtcgagggcatgatagaattgaagaccagattattcttgtgtttccaaatattccaagccgctaagaggaagatttccatgaaacacagagtcccaaaatttgctctctggtgaagaatcatatcatgaaaactgagattaaagttccaatggaaaccaatagaactccagcaacccgcactaaattgacaagagaagaacatatgttccatagtctctctttgattgctctgaaaagattgacaaatgatggaagcattgggaggcttgcagtgttttctatccaaaagatccattgtatttactctgtccatcagaaataaccaaccaaacaccttgattttcatcataactttgcttttccaaattaaaggtaaagttgctggggggagatgctccagaaaagcaatttgtagaacctgctggaagtatattgtgccgtgctccaaacataaaatccatacatcatggtttatcgaaaggtgaatggcagatagttcctgctcaaaaacctcatattcctggaaagcctgaactgagagagtaaggtgaaagttgtcatgcaggtctctagagaagtaggaaacaactgaatcaagtttattcttcgcaaaagagaacagtctaggatactgctgcgatctggtccttcctccccaattatcctcccaaaacaggactgaattgccattaccaccgatctggtcatcttgtttctccaccaccgatctaaacggtgctcttcttctctctatcttcaaatcatcccacaacctaataagagcaagtataataggatgttgtaagaatgctaaatactgaggtggatgagagaggagaggagagagaggagaagcgggtgtaagcttatagccggcttacgtacaggaaccaagaaaatatgtgagagagacaggtggaccatacatttatagttcatagctaaccacttatatgagttggctgagaggtagactataaagatttgtttgttgcatgatgagaggggagtaactatgaagaagatacagagatcccagaatcaagccagccatatgttagtaaagctcgtgttgatcatctctctgattcttgtagccaaatatctcacattctctgtaaggactctgttggttgagtaatatatctttgctcttcttcgtaaaaaaaattctatacagtaagcagctaattgtattattagtctttctctaaggtcatttctagtgcttcacatttgctagagtctatcacactatagcaggtcatgtaggataaaaggtaagatgatagtacaattaataaggagagagcagcaagacccgagtcttgtatgagatctagtttcaacacgaaatcctaccggaaagaatccacaaaaatagtattgaggcatactccctccattctaaaataaaccaacctcgtacatcgatgtgacatattctaatactacgaatctaaacatgaacacatacaaattcgtagtactacgatgttacatcaatatacgacggagggactaggatctgtttagtagagctccaactcctaaattgagttgggtctagagtggagttgtggaacagtctaaacccagctccacctctctagttcattctgtgagaacgctccacctagctttgctcccattttagatagagctgaaactgtttggctaagctcaaactccatttcttctaaaactggagctgtgccaaacagacccatacatattaaccgattgaaatgagggtttgatgccatggccctctggcctctctctcaagtgctccctttcccggcccatgggccatggtccatttcgctgtcttctcatcccacattgatttcttcctccccgtcgtgaaaaatcccgccgcccagcgttggtggcctgccgacggcaacaaggcaacaaaccatcacttctgttcgctgctgctcggcgtgctcacctgagccgacttgtactctcgtcggtgcctgcttggctgcttgcaccgtcatcttccccgtgtgcaacctcacccagtggaggatcggaggaggacgcggcaccggcggtgctcgagaacatcgcccacggcgtcgacggcgacatcgtcatcgcgctcaactgcacggggaacacatggacagcggcgagccggcgagacgcacgcacgcatgacgcacctgaaagatgcagagggacggagcagtctgagcaagtaggtgcaaactgatagatatatactgtagttcgctcctggcctcctgggtgctttatttcattcaagcaatcgaaattactactaactattatacaaaatcttctctagcctggttgacgttgcgttcgtgtaaatctatgtgcggcatgtgcattatacaaaattgattacaaatgcaatcatgttgtgctatgctagctgccgtcaagatttagcaaaggcactgattaagcttgttcaggttcaagatgccctgagtatcgcggcagtggtctctttgtcacgcaaggcgccattgagttgtcaaagtatcagtttggactttgaatcttgactcatatatacagccatctaactcctgcatatgccgcaagcaaattaaagaagcaaaaaaatgaaaaaaaatgtaccgatatagtgatatgccaatgtggatcataggtaaacgagcaacaaataattaaccctgtaaaatgccatcgctcacggtttactgaattcccaaatctcaaaattgaaatccaaaaacacacacctgatcagttaattagcctatacggtacctccaaacatttttcaacaaaaaatatatgagtatattagggattgaaaacgatacttgaggattgaacctcacactactttccactactctatcaagtgcatctccaaattaatccctcctgacgagttaataagctgtgtgatcctgtgaaacgccaactgcgtgaatccaaggacgaatccagtataggggcggtggggtctcgaacccccaccactggaacaagtactataggagcctccgtagctaaatcttttttgctacatgtagatatcaaggggctatatttttatctagtttattcatccgccgcagcgtgaatccatgcaatccgacgcgttcgttgtactgtaatctgtaggcgttgactacctcgcatgccacgcagtcccacgtacgcctctcgtgtccccaagatttacgcaaagggcgccattgccgtacaaaccaagctcccccgtcacgcacatggagctccatctcaaaccggccaaagcaccggcgatccgcctccgccttagcatcatatcactcgcgccacccaattgcacgcatttacaattcaattcacagcaatctctggatcacaaggagagcttcttgaatcgcagcagcaacgacgacgaagacgacgacgactgtgtcgagctcgagctcttgcctgccatgccgccggcgaagagctctaagcatggcttccccaagctgtcggcgtcaagcaaggcgctggtgctgctgccgctgctgctcctcgggttcatctacctcttcgtctaccccaaggagttcgagctgcaggcgctcatgatgagctcgtgcgggccgacgacggcggcgggggcgtacacggcggcgccgcgccgcctcgccggggagccaccggcgtcgcggaagcccgacttccgcctcctcatcggcgtgctcacccgcgccgacaactacgagcgccggcacctccttcgcatggtgtacggcctccagctcgccgcacggcgacctgaccgcgcacg

SEQ ID NO: 2550 - DNA, 4925 bp, Oryza sativa
  unsure (1)..(4925): unsure at all n locations
acggcggcaagacgtacgccttcttctccgcggcggcgcggctgtacgccgacgacccctacgactacgtgatgaaggccgacgacgacatcttcctccggctgccgcggctgctggcctccctgggcgcgatgccgcgggaggacgcgtactacggcgccaccatcccgtgcggcagcatggacccgttcagggagtacatgtccggcatggcgtacgcgctgtcgtgggacgtcgtcgagtgggtggcgacctccgacgtgccgcgcaaccgcaccgtggggccggaggacaggatgacggggcagtggctgcggctcggggggagagggaagaacaggttcaacgccaagccggccatgtacgactacccgctgccggcgccggtggacaagtgctcgcacgagtttatcccggacaccatcgccgtccaccgcctcaaggacaacccgcgctgggccgagacgctcaagtacttcaacttcaccaagggcctcgagccctcaaagttctacaagataaactagaaacagaggatccatcgattggaattggacatgcgttatacattgttggttaattttggggaatgaaatggtttctactatatatatttttttgggtattattcgacattttgcagaaattattttcctttttcctcctttaatccccatcagtttgtaatgaacacttgattcaaatacacagatgataactcaaaaggaaattgtagagtatgcaaatcatgaagttgagtagccatgataatgttgctgggacagttttggtttgatatgtcttaccaaattgttttgtgatcatctgatgttggtacggaaggacatttagatatgtttggattgccacgttgtcaaattttgataaggttgaaaattagtatagtaacaaactctgttttaaatgtttctaaatatacgaggcaactagcatggtggcccgcgcagattgcgtggctagtatcattatattttttttcatataatagcatacatgttttctcattatattattcaaatatattaaaatgacaacacaattttaaattttgcaataactttacaaaactactaatgtgtaatattcatattgtattttatatacatgttagttattaattatttttaatatcaaattttagttatttgtagattatatatattcctatatggactctagactcgtcttttaatatttcttttttttaattccgaattttctgtaaattgtatttctatatagactctaagctcttctttcaatattatttatttttatttctgaatttttattatttctaattgtgtttctatgtggactctaaactcatctttcaatattctttaatttttaatttcgaatttcatttacttctaaattgtattcctatattgactttaaactcttcttcccatgtttttcttaattttcaattttagttatttttaaattgtatttttatacggactctaaactctactttaaattttattatttttatttcaaattttagttagttttaaattttattatgtttattccaaattttagttagttttaaattcctatatgaactctatactctacttctaatatttcttattttttaattctgaatttctattttttttccttaattgtatttctatatgaactctatactctacttctaatattccttatttttaattccacatttctattgtttcctaattatatttctatatggactttatactctatttctaatattccttatttttaattccgaatttcagttatttcctaattgtatttctatatgaactctatactctacttataattttccttatttttaattccgaatttcagctatttgtaaattgtatttctatatggactctgctttttctttttgtcagattaatgtgagaatttctaggccatgagagcgaacgtggaggctcatttttctattcctttaataatataataatagattggtttttaaacatgagatcatttgttccattaaaaaaagatactatgcaagcattatttaattttctctaatatataatattttttaataaaacgagtagtcaaatgtcatatccaaaagttacaatagtaatgtgtttgcacaacattgagttaatatttttttaaactcgtgactatctttcaaaatacttactccatctgtttcaggttataaaatgttttaactttggttaaagtcaaactgtttcaagtttgaccaagtttatagaaaaaaataataatattttcgaccaagataaatttattattaaaatatatttaattattaattcaataaaactaatttgataatgtaaatattactatatttgtttataaatttagtcaaacttaaagcagtttgactttaactaacgtcaaaacatcttataacctcaaatggagggagcagctaaaaaggacacacaatgatatatatagatttatatatcttataaatactttcatggtctcataaaaccatcacattttttttccaaaatcgtataagatggtaaaatggcaaatataagttttgactggagggaatagtgcctttatacaaacaagtctactttttttttaaaaaaaaaactgaacaagactaaatttgatttacacggccgtgggaaaattgtaaaaagaattgttaattttcatttatttttccgttggttaactggataagagggcaggctggaagctgggcgcacagccagagtaccatcaccggagatcagagaaaggctcaaggcaaaaaatgagtcccgccaccgcagccacggccggatgccaccacctcctcctccccacggcgagccggccatgcggcgcgcctcctcgacggctagcacgaggcgccgcagcggcagcggcagcagccgggcacgtgtcggtggtgggtcggcggccgctggaggaggtatacaaggtgcgggtggagcgcggcgcggcggcgcgggagcgggcggaggcgctgcgggcgatggagacgtggtccacgtggcggacgggcgggcggtgccggatgccctgggactggcacgtggaccagctcgtctacatcgtctccggcgaggtccgcgtgctcccggccgaggccaccaccggcgaggagtacatgcacttcgtcgccggcgacctcgtccggtaccccaagtggttcgaggccgacctgtacttcgacgggccttacgaggagcgctaccgattcctcgcctatggggatgacaactgaatctaatcgcgttaatccatccatgattggaggggattggggattagtaccaagcttgctagtgtagtgtgttggtggcgcctagggatttatcttcttcgctttcatgttgagtaatttactgtattgtatttcagttaatcgattttgtccttgcaacacaattatgcatgtttgacactgcttgtgcttgtgcttgtgccgccttactttcagaacgttctattatgtacatttagacattctttaggattgctgaaaggatgaaaaatgagcatctgaaaaatacaccgaaatgatgctgatgatatattttaatttgttcaagtattattatttccttgttgcttcagatgctggtatcaaattgtgaatctacagaacaaaatgttgtaaaaggaaggctgcactccaatacctgttgcctatagctgataagtagattcatttccgtggcagtagttaatgctggtgtataacaaatcatcttacgctgaacttgttttttctgtataagctaacttgtttcaacaaatgaagtacctcaccaaagtactcctacaggcttgaaaaactattatctgctagcacaatttcacattttgtacctgtgggcttttgttttgtcacacccttgattcaagtggggtgcaatcatcagtcgagtcgattgaattgttggtggcatctttgtgtgtatgtaaacaattgggtacatttatctattcttattttccatcatagaagcaaatctcttttaagccagcaccatctcaaacctgcaaggtgaggtaagttactttagtcttatttacatgccatttatagtgctctaaatttgccattcatcattntctttccagttacatctgttacttagagttaccctattaaaattttaaatactccatccctattaaaattttacatacggtagaaaactctgaagtaccaaacttcatcactgaaagcttatgtctggatttttcattggccatgtgcattcatcttatgatgcagaggccgggcgctgcccattatctaaaaaatgtctggatttttctgtggcagtactgatattcgaatggcaattcaccctagagtttgggttttgagtttttgcctcaagactgtaaattaatgtcaaatctactgcaggatggttatcattgaacattacgtccagttgggcgttagatgggcttgatacaatccaatgtacttccaaggcattaataatgtccaatgagctcatgtgtttggaagaaatgttggttgtggtcactatgatgcaatggaaccagtcttgttttctagatttttagataatagtcttgttttcttgatgttaaaaagtttaaaagtactgaaaattttccctgagaattttggatatcttgcattatgtatgtggaaattatattttataatagttgcaggttaatttcttgattgtctttcttaccatattttctgtttaagcagaggcagttaggaagatttttgagaggctgagggagaccacatgaccatggaaatgcatatcaagcctatgcagaatgcctggagcagagaaaaactgcaaaactacagaaaggctttgaagagatggtggtctgtagggatgctcgtgctgttcact

SEQ ID NO: 2551 - DNA, 8351 bp, Oryza sativa
tcacacatggtcgcacacagctgcgtgaccgatgaggccgttccctcgaaaacccgtgcgttgcgctctttccaaatcaaccatgtaacgaggatgaccccggcgtcgaacgtcttgcgatcgatcttcgcaacagtttgccgggcagcgagccaccaaccggcaaagtctgaggacggcggcgagcaggagaggctcaaacgagcctgaaccttcacccaaacttgctgcgagaaggtgcaggcttggaagatgtgttggcaggactctccatccttagaacaaaggtgacaaattggtgcgagcttccaacctcggcgctgcaggttatcagctgttaaacaggcattgcggaccgcaaggaacatgaagaacttgcatctcactggcgcgcgggatttccagataatcttgccgagcgggcaggatgttctaccggccgaaaggatagagtaggcagactgcaccgagaagtcgccattaggtgccgccttccagatcatagagtcagtacttccggggtcgagagaaatcccggcgatcacgtcccagagcgcaaggtattcccccatcgcttggacagacaggccgcccctaatatctgcaatccaggagttgtcgcagagagcggcagccaccgtgatgtcactcagcttgacgaaggagaaaagaattgggaatctgtactgcactgatcctccgtctggcaaccagctgtcgcaccaaaacgaggtagaggctccgttccccagcagtactttgctaccagcggcaaagcagtgcagtgactttctgtcagctagaggcgcaacgcgcatccaaggacgctctggctcagcgcggcgcagccaaatccaccgagtgcgaagcgcaattcccattaggcataggtttctgatccctagtcccccctgctcgatagagaggcaaagcttctcccaagccaccaagctgcaagagcccgcagcatcttcatcacccttccaaaggaaaccccggcatttcttctcaatttcgttgatcgcccaagctggtagttccaagacggacatgaagtagagtgggagcgatggcgccaagttcatgtttttgcatatcagaacttgctcgttagctgcgcgtgattaggcttctgttctgtacttcgtaatctagtattagccaatgattaaaagctccaatccagcctgttcatactctattattagtcatttttttgtgcttgtgtgtgtaattttcgtagccgtctaggattgttggaatatttatttatgaagacctaagtgttcaaatctgttgctctgctcgaatggtccaattctgattgtactgcactttgtgaaaagttccaaaatttaacattacctgatctgcaacttgatgtagagatggcatccggacaaatgctcatcctccagcagtgcaaagcacatggaggaagccaaggagaagttccaggagatccagggcgcctattccggtcttaatcttccttatctcaaactccaccctgttctgtaatcacttcacttgttacaacgattatgctacagataatgaactgatcacaaccaaagaaaacggatttagctagttggcaaacttattgcatggagccctcgtgctcccatcccattgttcttgtgcagtcctctcagactcaaacaagcggttcctctacgacgtgggggtatatgatgatgacgacaatgacgatgacaacgtaaggattctagccatgattatgatttattgtcattgttggttcaactttaactcctactgcctctgctgcagctgcaggggatgggggacttcattggtgagatggcccagatgatgagccaggcacggccaacggtaagaacagttagcaccttggtcctagtactagatgcttctcgtaggctctagctgagaggtggtactggtacatcaggaccacaaatttagctgcaaccgtgattggctaattagatccccttttgtgttgtcataatgcgtgataggttccagctagcatttattactttctatgttcttttgactaatcgtattatcatatttcgtttcgaaaattctatcgctgtattttgtaagcaccatcatacctgttctgttctgtcctttgcaaaagtacgctaaaatggttgaaaattaacttactgcttttggtctgagaaaacaagtatacacatggtaaattattgtggtttgtggttctagaactctcgtcatgatacctctggttctcagcgatgattttgctacagtttattgggaattctatgctatttggggttgcatgtcatttgtcatgcatacaatcatttcttgttcattggaataacaaaagaaaatgctcatatatgaatgctaagttatcagaacttctccaggctgtttatctgaaaaaacttgtaaactttggaaatttttgtatagtttatactggatattgtttgttctatgttcatatgtcacaggcttaaaaaaggaactgttatgaaaagctccatgcccctcaactgaaacttttaggtgattttttctagaaccaagctggaaaccggcctctttttctcctggacctgatgcatccaagataaatataacaatagcaataaaataacaatgaatcattggatttgcagaggcaggagagctttaaagaactgcagcagctattcgtagacatgttccaagctgatcttgattcgggtttctgcaatggaccctcaaagtgctaccatacccaggcccaaagccagactcgaacatcctcaacctccccttcgatgtcaccgtctccaccgcctccagtagctactgaggcagaatcgccatcatgtaatggtattaataagcgtggttcatcagcaatggactctgggaagcctccaagagccagcgaagtcggttctggacagagtcaatcagggttttgtttcggggtaagtacgcatatgtcaatttctgtttacttgtttggtttggcaataatgcatctaggtaggcgctgctgtgattacttaattactgtggtctgattaagcagacactgttgcttattgttgatggtgatcaccaaacaatttgtgactggatcatgtgataccttttttggggtgcaagtaacagtttatgctatttggtggaggtgtgctttcttcatcaaagaatacaagttgcagctagattagcttgagaagcacgatttctcttgaaaggaatgtgctgataatgtgaaatcaacttgacctgccgttgatcactgaacatgtttttttttttttttttaaaaagtgcttaacggccaggtggtttattattattattttctgagggaaggggtttatgaattttgcttaataagtttaggcatcagataccatacttgtactctggaatagattcctttggctagctttgctctttttcactgtattgggcaatacactgtttacatttattcaacatatttattcattattccaataaagatttgctttttggtagagcattgtggggtcctggttgtctggacccactagatgtttgggcatatgccatatggggccattcactgggatgttgcacataagccttttgcggccttttcatttgtaataatcatgaaataatccagaaagttgtggaggatccaccaagtgagtacggatcctagctccaccaccagatgtgctattcacatgaggacttgctgatcaactatgagatttctggatagggtcatttgaatttccatcactgttacatcgttgttgtgtggtccgtatatggaacagtctagtgtgctaccttcttctggtatatattaaaattgattgcgataggatttttgtatatgcctggtacggcatttcttggtggtgttctatgtcatttaaggatatcacaaggtttggacgagattatggcttgtctagcatcttaaatagagcccatgcgtcattttctgcttttctgtatgtcctttcttggattgctacgttgccttgtgcctttgctgacttgttcaatttgctattttatttttgtaacacgccttttttgtgcagcactcctggtccaaccttaaatctccaaccagataaatgcttatgataaggccgtgtatttgctatttccttttaagattatctgaaaattcagactggtggtgccagttgcgcatgctcgcaccaaacttgctgtgcttctggttacttggatgtctttgataatttagtgcccacgaggaacaaaaagttccgttgtcggattcttccactttatgctctttctatagttcgcctggttcttctgtagcgatccatttgagccacacttttgatacggtactgatcattttggctggtgcctttctgcagcagaagagtgatgctaaacaagcggcgaagacgcgaagcgggaacacggccagccggaggaggaacggccggaagcagaaggtgtcgtcgaagcacgacgtctcgtctgaggacgagatgccaggttcgcagtggcacggcgtggcctgaccttttgttcgtgactggtttggtcctttgatgtgccggagcaccgagctgctgccgctgccactctgccgtggcggtggcgctgctcggagtgagtgaccgggcgtgccaaaactcgtcgatgctgctgctactgcgcaattctttctctccatccgtgtcgcggctgtgttgtactacgtagacattgcattttacaattgattctcagtacctatctgtcttgctgttcaatttcaagaactgaagaagtcatgttggggaaatcaatgattgacgaagcttctatgataaacagaacaataggggtggggtgatcacggttctaagagttgaaaagggatgcaatggtatacataactgccaatctatagaagttttccattttatatttacacattagaacattggacgtataacagtatatttagatatgcatactgaattaatacaattctttaaacaatctatacaatagcacaaatagtatgctgccctatctatacaatagcacaaataatggtctaaacagagtcttcaatgagctaaggtcctttttatttaggctttttaagccatatttaaaaaagcttaagtccaaataaaccatcactctttttgtttgacttttttaaaaccacaggtcacccttacactgttaaagctaaaaactaagtttgagtagctttttttaaaatgtaaagttaagatatattccaccaataaacttaaagcttaaaaggcacatgtagccaagaagtctaagctcaaacgaaaatggttggagaagattgagaagatacgcaaaatgaggtgagccattagcgcatgattaattaagtataaagtattttaaactttaaaaatagattaatatgattttttaaaacaactttcgtatataatttttttaaaaaatataccgtttaatatttcgagaagcgtgcacgcggaaaacaaaacaaactttctcacaatctccttgggagttaaggccgtgttctttcgaagggtttagaaacactttcagttatgtaaagtgatatattagctcatgattaattaaatagtagataaaaactaaattaataaattaatataatttttaaaacaatatttttacagaatagtttataaaaatattatttaatagcttaggaaatgtgagtgtgaaaaacatgagagtataaggtgtgaaacatgataaaaaaaaacacgaacaaccgtgctccgtgctcactgctccctccctcttgataaggcccatgaaaaagtatctggcccatcaatccatcacgctcttacggcccagagagcccaactccacccctcttcttcctccgctccattctcctcccaccctcccctgcgccatcgccgacgcgcgccgcggcgaacccaccggatcatcttctcgcgcgccgccgaattccctcccgcctccgccgaatccaccggcgggcgcccgatccctcatcctcctcctcctctgctcgtgccgcaggcgcgggcggactccctctttctctctcggtaggcaaccctaaccctcttgatttgcccccaattctggtcgttccgtggaattccaccccatccgatccgtcccaggcgcgcttggggccttggattaggccggaaacggatcggttgctgccgtagggttcctggacgttcgtagggattggattttggtttgttgctcatttcggtgtgggagagtggagtggaggccggagggttgagatcggtgtgctactacttgcgggggcagatctgatagggagaatcgggtggatagtggggattttgtaactttctcgtttgatatcaaggattgtggattggcgtttcctgcattcagagtttactcttcatactacgtggttgatggcgctaatcatgtttctaaattgttaaagagttggatgataacgtttaacttccttgttttactgttaaaatctgcatatgttatggcaccgacttaattatccttaattggactttttaccgttaaaatttgctagtatgttttatggtgtgatgatttacttctaggtttgttattggaagactggtgtaatcaatcttataccgattatttacccctcttgctctctgtgcttactcgttggtttattattataaaagacatataaatgtttggtcacccttggagtcatacatactacatagttttagtgatctagcaccttctgtggattcatccattttgttcaaactacttacacatatcattttctgtttcagattggaaggaatagctgcttactgttgaatattgacttgcttttgttgctgtcacaatgtcgggcctgctgaatgtgcgtgcttatccttacaactgattattgtgctttcgcttgatatccctattttccatttcaaactttttacttgatttctctctgactagtttgttcatcaaatagtttgcttatgctgcagcttcgcgtggataacgagcaatagatttgtcttttatcacctgataaagtgataattgtcctctgttataacatagtgttgatttatttatattttatacacacatttatttcttacaactgcggcactgtcctcttccattctttgccatccttacgtgagttttctgtgttgagatgcttcatatgaaatttgaagcctgacacttccatatgagaactgtgatggcagggaatattagcattgattgcctaaataagctatgcatgtacaggcactgcattatcagctactccctccgtcccataatataaggggcttttgtctatgcaaatgcgtagccacaatcccttatattatgggacagagctaatatatctgtggtggataatctgtttggttgggcactatttattcttttatgctgctgcttaacccaacatggtatttgcttttgaagataatggcaattccatatgacctgctttgttctttgttttgacaacttgccattttttcctagcagtcaaacctgaacaattctgcatcaaatcttcaagactcaactggaagaccgtttacagggtccttttctggtcaatctggatcagttccagggggtttccatcactctggtgagcatatagtaaaatagcttggttagtttgttcgcacaatgctacattcatgtagtaaatcttcttgccatttttcaaggtttgcacaacatgcatggaagtttaaatatgccaaatatgcctggatcgttttctcagaggaatgctgccatgagtggccttccatcctctggggttcaacagcctggagggagcatgcctgggagatttgcttcaaacaaccttccagttggcatgtcccaggttgtaatgacttccttcatccatattgcaattttattgtttatgctgacggcttgtggaaactaaggtacattgttgctggttgaaatgatcgtgtaacctcaccatgttactgttttgttgcagatccctcatggtcattcaggagtcggtagtagaggattgaatgttggtggaggtccagcatttagtagtagcctgaatattggtggtaccattcaaggcttatcctcaaacctgggtgctggtggtagtcgtaattctgttcctgggatgtcagtatctccatctttgggaaatttgggtcctaggatcactggttctgtaggaaatattgtgggtggaagtaacattggaaggaatataagctctggtggttatctgtgccaagcatagcctcacgcatgaatttgagtggcaatgttggcagtggcggtctgaatgtccaaggatc

SEQ ID NO: 2552 - DNA, 1607 bp, Oryza sativa
atgagcaaacaggagaaaagaatgtcaagcctaccctaaagaagctccatatgaaccatgcttgccctaaaatagctcacatgcctatgcatataagagataagatcattaaaaaacagtgttgtatcataatttagtgtcactgtgtgtgcaaaggtcaaaatatactagctgagtatatgatttaaaacagagatagaatcaagatgagaattcctggcgtggtagcaggtgcagaaatcaagagttaaattttgcttaaaatgcgctacacaaagaagataagagatgaaaaggagaaaaagaaaagggcaggcaggtatagcaaatgaatgctaggaaatgaaatgagaatctcagatgttctgaagagacagccagcatacaatccatataacttcatggagcagagccacctaaacaacgtcctccattaatactgtattgcgagcagaacaaaaacatggggtctactgctttaactgtcaagataaacctttttaatctgatggccgacaatgcaaaattggcaattaacttggttggaggaatgacaataggaaatactgcgagtccattttgacaccacatgattgatgccgtatacttattatacgatgaaaaggatggatttatgatgaagaaaaatgctagcaactcttattatgaagagttctggctcagaatttctcccaattatgaagagattgttctgggaagatatttcatagcaaactacgctgtcaaaagatgaaacaaagccaaggtcattttaagcgatgcaccaccactattgacatccttcagaaacatcgacggattgattggcacggaagaataattgcatggacccaggaggaatagtgccactgatgatctatacagggaagaaccatgttgcaagtgacatagaaatcttattcgtgagctatttacaatctgaataaggatatctctgttcgagttgtcccctctttccttaggacacaattttgtgcaaaaagataactgtgtccaactttgaacagtgtctactactgtgcacatctaacatgtgccagccggaagaagcaagccgaagcttatttacattacatttctatttctatagttcccgtccagaggataaggtatatagcatactgttccccgaggaaggcaaacgacagctgatgattccaggatcgaaaatccctgcatcaagaaatggaaacttcagcaccaaaatcatctctggatttttatcagagggaccaataaaacaagggaaaaccatcaactcacattaaacttgctctggaacttccgtgatgaaatttttttcctccgtgtaactcattagattaacaattgaactaggataaactggaatgctgcaaagacatccatatcatagttactccatagaatcttgttctgagtttgccttcctcctgtatcaagggaactggacgtaggaaactttgcatggcttgtgaacctttacttcacattcattgctgcagccatcttcctcaacctttgagatatttctgtgaaggatggtctatctgctggttcactggcccaacagttttccatcagtgatttccattcacgatcacacc

SEQ ID NO: 2553 - DNA, 11224 bp, Oryza sativa
  unsure (1)..(11224): unsure at all n locations
caccgcgaacgggaggcggcgagaagccattgcttgctcctaattaagtacgatttttttcgcttgatcgatcagatcaggcgtgatgtttgtgttacgttcgtatttatacgagctggagtacgagagtttttggctgggaaagtgcgtgccagggctgaaggagtggcgttcatgttcgataatggttggcatttgtttcaaaaaaaaaagattatggttggcatgcatatataactaagcaagataaagtccaagcaagctatatatgcataatttgatttgcgtccatgtctaacatatcaaagccagctagattttgtcgcacgatggattgcgacattttgggcacaatatacgggcacgtcgagcacgttacgtattgccacggccctcatattgcgttgcacataggacatctggaactgggccgcaaataccgtttcggacatttagcaagaagggccaagcgcttcccgttttcacagtttcggtccatctagtatgggctgaacgtccgtctcaatcccgttacggcccatatagtacctcacgttgcagctacggcctgcatactggagtatataataggaaaaagtacatatgagatccctcatcttatcaccgaattataaaattgtctatgtctcaaccaaaaaccaaaaatatatgatatctctcaatttacaaaaccagatcactctgcatccttaggtgattttaaccgcggttttgttcgacgtgacggctcagtatgagacccacatgaacctcacatattagggtgaccacatcatcaccctttctccttcccctcttgtactgagccgatcgcccgatcgaacgactgagaaagggtggacggagcaaattccacctacggccgtgtttagttcccccaaattcctaactttccatcacattacatcacatcgaaaactttcatacacacaaaaaaactaccaattttttctccaaactatcaactttttcccaacttcctaacttttcaccatctaaacacagcctatgtttacaagtttcaagcaactcgatcagccagcgtgcgattttgtcacaggttttatttcgagataaagcacgcacgcgtgcgacgtatataccgtttccacctactgacctacaggtaggtatactgcaggcaggtcggtcagtcagaccgcccgataatgtgttctgaatcttaactagagatgcctaacaaaacagttctatctatcgtcagtacagcaaaggttctcaaatcagccctgtaagcacgccgcaagttcgccatattgacgccaagtcgccaacaaatagctgtctagctactgactacatactttgaattgaacacagcaaattagcatgcatatatgatcgatcagtatacatcaatactactattatatatatatagcatagttgcatagggcaccgtctctggaaaccgagatgatgtagcatctacacaagaacaggactaccattggacaatctcatgctcctagggctaggagtatatttttgaatatgatgagagccatgcataattgcatatagccatatttttttttcacgaacacgcaaaataattgcatgtcaatatattagaagaaaaaaatattttgttacacaatgcaatcagccagaccggcttatgccaaggaaaggaaggaaagcaaaacaaaagctgaagctaggaaaaaactactacggtggctaaacgcaactccgaatagcgggaaggggcagagccacgctacactcacaagaaatcccagaagcggcaatgtcagctaaaaaccacaaatggaccttcgagagcacagagtaaaaactctagagtttcgttcctttcacagctgccaagagaccaggagtaccacatatggctatatctaactatccaagtatatgtatgtattcatgcatagacacggagattgaattaatcacacatatgcatgcattttatttctgtgtatttcacactcacatactatgtataacatcatcgatatgatactaatgctcatacaaaaaacatggcaattaaaccagtagtttaatttaattcacatacatttatatatatgtattaacagaaacgttcaagatcaatcgaaaccgagcgtacatatgcatattatctcatataccaactagctatcaattaacaattggatccatatcactgaatgtaatatatatatgtgtagctagcacccaacaccaaaatctattattgatcataccctagaacgtaatcgccggcgccgcccgaaccgtagtcgcaagacgacgacgtccacgtcgagaacttctcgtcggcgccgatgatggcgctgccgtccgggcactgcagctccggcaacgacgaagggatgatcccgccttgcgctccgccgatcgactcgcacttgaagaggaagtcgtatagctcgtcgtggagaccgtagccggcgacgaacccaccaccacccgccattgacgacgacgaggtcatctctacaccggcgactcccggcatgtagttcgaaccggtcgccgccgcagggtcgaggtgctcggcggcttggaacgcctccgacgtggtggcggcggcggcggcggcggtggcgagggtatggccgccgacgaccaaatgatgggggtgttgcacggtggcgacgacggcgtccgtcggctgcacggccgggagcggtctgctcggcagcagcgcctcgagcttcggccactgcggcggcgcgacgccgacgccgccgccgttgctgctggtggtggtgcagccgaacgcgctgttgtagaggccttggaggcgcatgtggagctggatccgctcgagggccgacgagcttagggcttgatgcggcggcgccgccgccgccgcggtgccgacgccaccgcacatggcggcggcggcgctgcctgctagaccgcagtggtcttggtttgcgcgggcgcggcgcgacggcgcgcgcttgccgaggagcttcttcttcagcttggtgttccagtagttcttgatgtcgttgtccgttctccccggcagctgcgccgcgatgatcgaccacctgtgaatgcaactagcattagcacatctctactaaattatctagattttttagggagattattagtaattagctagagtttttgttttgttttgttttgttttgataattaatagctgaagttattaatagtgcatgccatgttttagtaagtgatgcatgtacgtgttagtctctgagatgaaaggggaaaaagaatgaggaaagtagaagtagatagagaggtgtgtgcatgcagttatgtatgcacatgcgatgagaggacaagttgctaatatggtgattattacctgctaccgatgctaatgtagaggctacaaatgatgtgctcctcttcttctgtgaaatcaccatgcttaatgtttggccgcaggtagttgagccatctgagcctgcaactcttgccacatctcttcagccctacaataatcatatgcaattaatatactttaaattcatttgaattatacagcacccaattgcatcagatcaggagacagaaatgaaatggtctaggatagacaaccattagctagtactgcgctccagtattcagagacaaaaataagaggagaattgaagggctatgcatgcatactactgaagatcaacaaatacaagctagctagaatttaactaataactaagatcaaactacttggcatatcttccagtgtgctagacattaacagactactcaagtttaggttcatgtaattatcatgtgtgcttcaagctgatccctcttaatttatcaggaaaaaaaatcaacttgatcccctttgatctagatctctcactccacgacaaacaaatagggcaatctacaaatggatgatcatgttatagttcaccccttttagatcaaaagtctacataaactttaccttctattagtaaaacagccaatccaccatacaggtgatacaaaagagggaaaatagcatgtattagatgcatctctaaaaaatgttttgctttaatccccaatttagactcaatcacacaacaaaaaccatactactacctatcaaaagctaaacatatggatgattaacttgcactagcaagctagcaaccacctgtcataaccaaggaaattaattgctagcaggataaattagaattcatgaaaacaaacccaatttttgctgggttagcccaagattaggctgaccaaatgttaattgaaataagaagggggctttgtgcgttacaacatctacataaggaagaccaaacagcgcggtcggtgcccagccctagctaataacacacaaatcagccactagagagaagtccagaaacagcaaaatgaattgaagaagcaagagcaaattaagctaggcgaaagaacacaaggtaggagaggagtatatatatatatgcgtgcttaccgatcttctgcggcagcgcgatccagttgccgccggtgccgttctcctcgatgtaggccttgagcttggcgtcctcctccggcgaccacggccctttcttcacgctcgccttgtcgcagcacggcgccctccccatcactaactccttcgaattcttgatttcttgctgctcagctcgatcgtcgtcgccgtcgccgtcgtcgtctatctcagcagaagagagatctagaaccgatggatcgctagtgcctgacgacggcgacgatgtgtagctagctgctgcggctggtggtggtggtggtggtatggtgatggcgtgtttggcagcagcggtgagcgggtgcatctggggttgtggccgggctggctttatagtaggtttagtagatggatagctagagaggaaggaggcaccggacaccgggagaaaaatacgggtgtgggcttgtgagaattgtgaatttgtgaggtgatgatgtgacggttggctccattatagggacaccgccacattattttttgtgtgtgtttgtgtgtgtgtgtgtgttgctggggattaacggacgccgccctaccatgcagtcaagtcagacatgcactcaccaagatcttctctgccaagccaacttttgattattacgctagctgctgctgacatcggttaattaattgatttgcactagttaaccatgaatacttacaggtgtgtgtcctctgaaactgatcttttatcagtatactgcaaatatcaatccattatgtttagcaaaatgcgcatgatctattacaatggtactagagctaagtcatatgactaaatcaacaatagtgcattgatcaacacggtttatactttatgacatgcgcatgcttctcctttttaacatgatcagggttgcttcatttttttttccaataaaacaaaactatcaaaggcaacataggtaaatggattacgttcattgagaaactacgcgtcgacgcatatggacttcattgaagtcatcgggtgcatatacgataaacaacacgcgatgatcctgcaaatacgatgacattagcacactaaaaagaaagtcgttacatattgatatggaacgagatcgcttgcaagtagtattacccactcctaagagtaaaagcatctccaacagcctctctattcctccaagccaaaaatttagcaaatgaaccaaaaacactccttcaatagactctctattcgactctctaagccaaatgcctgtccatctcaacccacgcactggccaatattggccagcctcccagactggctatccttctatccgcctctccctgtatccatgcttctcctctccctctagctctgccgccacaccggctctcaccatccctgctgagctcccccgtatcccctcggttgccttgtcatcgtcaccacctgtgggaggagcatcgtcgccatcgccttttgccgtggccgccatccacagggaggagtgctgccttccccgaccttcctccgcacccaccatcccctaagctgaggagcaccgccgcgaccgccgccgttgacagccaccgccgccagccatggccgccgtcatttgcgtcgtcaccagccatggctgccgtcatttggaggcctatgtcaccatgcaacccctgccggattgggccggccgtgcgacctccagactggcggcgtggatttgaccggtcatcgtcgaggtcgtcgttgccgaggtcgtcatcgcgagccgccgccgccgccatcgccagcctctggatggtcgcagtcgcgcgggatgtgtccgagagaagaggaagagggagagaggaggaagagggagagaaagagaaagaggaggaaggagtagtagaggcagacgtgtgggtcccagtgtcataggctcataatggatagtggctattggagtgagaaatgagtttggcttgccaaatcaattggacagctggctatatgggtgtttggagagaccgatttagaaagactgttagagatgctctaagtaggggcacatatgttagtcagcagtaccgcagatccagtgtcgttgcggacgtcctgtgtccttgttgatatatatgcccacttattcagtgtgcgcaatggatcccagcagagcatgcatgtcgatttggcgtgtgacaaaacccttccaaacgcatgccaatcccctgttccatgcatgcctacctttacccagatccgtttctttctccctgagttcccaaatccgccattgacaattcctccacaaaaccaccacctttttcactgcattcagcagctagcagcctctccctctgtcacctttattagcctcagtgttatgccgggatcatatgagccttcaggagttcagacctaacattcgtggtccctgcaactcttgtcaaagaaaaagctttgcttaattattttgttattatatttaagtagctaatcaagcactgcacagatgtcgtgttggctggactgcccatgaagccacgactttcagggtttcatgtttgaaattctgcctctgtctcaggagttactgtttcaaactagtcattgactataaacatgagcatagttaatggatggtccaagcagatgtgccaaaccgatgaactattagcagatgttctcaagtgcagtaaaccttgctgcgttaaacacgtctactagatgtgcacgtaatgatctcatcaccatcatcatctgttatatatttacctagcttactatgtgattacatatgtagaacttgtgttttctgtatacgtgttgcttcagaattgagacagaagaggttaattttaaatttatctatgtatatatgactgtacattcttttcataaaaaagaacaattaaagctggttgtcaatctggtcgtagaaatcttctcgatcaaacgcgtcactatgcgtggttctgaaacggaaaaaaggccgggctgcctgcccatacgtcaggcatggtgaatccaagttaaggttcagagaatgtaccaagaaaagcagagaaaagctatctagttaaagaacatgcagactgaaagagaagattcagaagaaaagttgagactgaaagaggcaagaactctaagcgaattgaaagaaagaaacgtgtacatgactcggtcatttactgcaggcagctaccaagacatggggatatcaatatgcacatatggttttcttttcttccatcatcaaatttatcaagaattttaatttgcatgcatgcatactgccaacatctatggtctcccagctacagatcaagagctcatgcatattcttttgttttgaccatcttctcccagtcctccatgctgctgttggctgcttgttttcttgtgccacctaactaacttggaaaacttgttcatctattaaatgccatatatttgcctagctatgtggatagtgctactctgctcttctaccctagatgtggcaaaactcaaaaaggggggaaataattaacaataatactttagtatcaaggttagctgcatgtaactatcactgtaattcagtagataatatttacagtgatagtatatacccaacaactctctaactaactatgatcattggacagcgataaaaaataattaaccaacaaccatgcatccaagtgaaggaaatttttgggagataactaacttactatggcaatcaatctcttaaaactgattgagttgaactagctagctcactcactactgtctagacaagtggcacaaatgtccacatccttatttatgcaccatggaagaagctccaaacaggaagctgttgggaattaatggcaaaaggctaccactttacattgcatattgctaatactaaactaataccaatcacaatgccgtgaaattgagccctcacatattgaccttgatgattaatttgcctggtcatcgacgtaaaaattaacaattgattggtcctaacgaagtgtcaagccaccgacaggtggggacaggccaccagagtggagcacattagccccactgtcagtgactcataagacagcgatggtaaaactagatggatgcaatagagccaccacctttttctcaaaaggcaatccaagttaatcctgatcaagtccacaggatagactttattaacctaaagcaagatggcttaaaatatgcaacccttcataagctagcaaggagaaaggatggaaggagtcatttggtattttcctgcttgtcacttcctacaaggtcatattcccaaaggccattgcctgtcatcagcaacatgaacagttttaaattttggccaaaggaaaagagatgagccccagggaagaaaaagttgggaaaaggggggaggaaaggcagtgggaataactggatatctttgctgagcctcattggagtttagcatttgatcgcatgcatagtacttgaccttagaggctgtaccccaaaacaaagtacaagagacgctatgaatgcatataataaggtaatcagtaaagtggtaatgaaagtggggatatggtctaatttgtgccacaatggtgagagatttttcaagctggctcgatcaatcactcgatccacggtgacgcaattcaagtaatgaattccatcagattcgaagatagagctatattatatccatcagcggtgcgatcgttcaacacattctgtgtcatatagggatattacggttccttcacgtaaccgtaaattagatggtcaagataaaaagaccttgcaatatcgtcatttacgcggactgaaaattttttgcgttcatcctggctccgagtcggtcgcacggcacaacaaatagacgataaaaaaccttgggtgtgtttagttcacgtcaaaattgaaagtttggttgaaattggaacgatgtgacggaaaagttggaagtttgtgtgtgtaggaaagttttgatgtgatggaaaagttgaaagtttgaataaaaactttggaactaaactccgccctcatctaggaacaaaacctcacagcacctataccatccatgtcctatcaatcaattgtccataaccgatctgaatgttttttggttgctaccacatgcctacaatgtccacttcacattggctgatcatacatccccgacaaatgaatgacaggagattggactgcacatcaatccagacaccaatctgtcgtcagggccggttcaatttcccctccattttcacctcttatcattggcaaatgatggcaaattggcaagctgctctgctccctgccatttcactgtctgcacatagtgaccaagttcatcaaccaaagatatcggttaacgcaagaaaaacaaagaaagttagttagtgagtgagagtctcatggatatcttattcattgcttcagcttgaagcacgcatgacacatctgttttgactagtagcaatcactgtttcttcctatcaaacttgttgcttgcacaaatctctatcagttgtggtactgaaaaacagggtgcctcatctctgtgtattcagtattaaaatccttttcagtttatttgcattttattactgtgtcagctctgcaaacctattggcgatgctgtaagctcgctgacgtcagccctgaattgtggaagttgtaactgtcatttgacatgtcttgatcagttcttctactactagtatgaattttgcatggacaggcaagttgttaattagtggcaattgtttcttgcatttatggatgacaacctagctagatagctagagaaaaaaaaggagattaatcagttgcatgtgtcagtgatgaaaccgtgctggtcctgctggagaaatctcagttggagagattcccctcgttgcgttgctaggacagagggatttgattaaattgataagaacaggagaagaaaaaaggttggggctctagcttgttgccatcgtgtcaaattctgccttttcagatacaaccaacggccaaggccaacacatgccccaatattgaattccaggttttctgaacttcagagaggattaggatgtcgcaaagcaggcaggattcaagaactcagtatctttcagcatttgaaatttcaggcctcaggttcaagttagttaccgccaaatcgaaaaccggaaatcttggagctgacacgaaacacctctgaaattgtaaactttttaagacatttgcaaaggagatttgtgataccctggacctgaatagctgatatacagttcagtttagattttagtatactgacgagccatttgcaaagaacaacatggaaatccttagctgacaaagaatgcattttccaccacaaaccattattgataaactggctaggaacttgccaaccttctggagctattctaattttgggatctaaaaccccctagatccatgatgactcatgaaatcagaatgtcttgtactgaaggtaagcaagcctcgtctctttggagctgtcatttctatcagtttaatagtgcatatgcagcgcataacgactgccatggatagcaaggccactcattctccagacatttntntgcctacatttattccgagccatgatttcacttgctttacacctggcaaacgcaggcaaaaatcacaataaacgcacaccaaaaggaaacaagtaagcactatttaaattgcaatcaatcaactgcattgtcaattaattgtgaccccgcatgaaccctagctagattagagctaggtggtgtgtctgaaggaggaggagaagaagccaa

SEQ ID NO: 2554 - DNA, 570 bp, Oryza sativa
caaaaagaccacggcacagatcatccttatttccgccagctggagacctgcgccgggggctggcttggaagtcggaggcgcgcttcgttggcgaggggggtgtagaaccagtcgctcttccagtcgtcccacttcttgcgaagggcgcaggggatgtagcggttcaacaccggcccccgcggctggaagtagcagccgccaaccaccgacggcggtgacaccgactgcacggtgaagaaccaccggaacagctgaaaagaggggcgcaccccgatgaacatctcgcacagatgcgcgaagatggccaatgtcatcaccgcattgggggtgaggtgcgccatctggaggtcatagaactccaggacatccatgaaaaaatgagaaaatggcgggactagcccagccattgcgaaggggaggaagaagatggaccgccccgggtagtctggtgccgggcgcccctcgcccagcatcactatctcccgaccggtggcggactccggcatgaaccggcgcggcagtccggcgtgcctctcattaacgatgcgggaaggcggtagtgcactgccg

SEQ ID NO: 2555 - DNA, 670 bp, Oryza sativa
acgaagaagatagatgctgtgaaacatgacaaatcaagcttacaagttccaaccctgactccatcataagtccatatgacataatataatagaagtggtgcatacattcgacatcaaaactacgagaacttccaggggttctcagggaacagcagttcacttgcaaactcaacatgaatccggttcctttcaaaacattttcagccaaaattaaaatctaaaaaagataaccaccatcctccacacttcaaaagtctgcattggatgagaaactgttattaatttatcaaacaaaagacagcagcaatttggaaattgcacagccatttatgcttcacaatatatgcacaaaaattacaattagagaaacaacaaacagtactagaatgtttcagtaggatgccaaactgatagtttaacaaaaagacactctgttggtaaatcaaatactcggttctttatactaaataggatatgaagacgcgattgcattaagataaatttagcatgcaaccttgtgacaaacatggctgggaaacttttttacattgtaagtaaatgtgataaaaattcctcagatgtcaatcatttgtgtacataacgattacactacaaggacccaatatcatgccaatttagtatctgcagttcaatagccatagcaggttcc

SEQ ID NO: 2556 - DNA, 40442 bp, Oryza sativa
ctgaactatgacggcgtttcttggttttgaatttgtatgttggaagaaaattgatggattctgaggtaccccctcttgtattgtttgtatcttctctaaatcccataacaaatatgatgcagggcaggcagcagcatatcattgcacagaggatgaagggcatggcatacccaatacaactaaaggtaaggaacacaatacataacctggcagggaaaaaagtcagcaacaagatcaagggagcatcttatccacacaaaaaatatttgtatttacctgtacaagtttggagcatcggcgggagaagaacgcccgccaaatatccacacatttcctacgacaaaccacacagcaaagaaacaatccaaggccatcttgaagtggtcaaaaagagcattaatcctgaaaaggcatttgcctttaaatagcaacattgtgaacatgtgtaaataacaatctaaacaatagtgttccttgcaatgctcatacacagatgcttcagacatgcactaaaacatatctagcctagttgatatcttgtaacattttcctaggccaacaacacgactcggaaagcctagccatagaactaaagaggaattccttatatacaggcaagatctcacaatagcaattttaatgcaaaagatgcacaacaaagtaccttggattagcgagcactgcatttcgtgcagcattccttcgacgctctgatgcactagcagaaggctcagttgaattgttctgagaggagccttgaagtgtatgtgctggctcattttcaccattgacaatattgcggtgtatatagcgccaataaagatggggtagtgtagcaaaacaaccaactgtataacctatgacccactcaaataatggagcttgcggatgttcctttcttgaaagagaaagcacaacaatagcagctacaatttggctcacattgacaagaacttctattgaaatccagagtccagaattcaaagggcttctgtgccggcgaacatagttatcacttcttctagcacctgaagtatgtcctgcactaggtgcaccaactgctgatggtgcctgcaaagcaggtactagcgctctggttgcagatctatcaacaggatttggttctccatggttttctctagcaacactatgggaagtcgaagtagatggaccactgtcccttggaatatcaattatgtgctcatggccactaacacctgtagtttgttccatcctcgaagcgtgcatatcggtatgaccttgaatttcaagtaacgttgaaggctgaggtcatcaattcttagatgcaacaaagaaagaagcaagctgctaaatttctgagacctccagttttctcaaaactgagtgcaggaattatctacgattctacgcttcagcagagacttccagcttcaagtgaacatttagatttatatcacaaagagagctattctgcaagagaacacagtaaaaaaaacatcaatttcgcacatagaaggaaaataaattttcaaataaacattaagacgactagaaatgaacatagaaattattgcaaagctgctgaacacggaaatgaagaaagcaggtaatctgtatgttcaacaagttgaaattatgatgcattttaaaggtgatcaaacatcacaaacctgtccccgtttatgtaatcatggggctttggacattgtttttgcccttttcagaatactaacacgcgtaaaagaaacagcagtggatattaaagcatacctacctcctctcaagcataataatatccatacagtacatagatggacaggtcacaacgcatagaagaaaaataataaactttgacagaacatgtatgcgcagtatgcaggtttgcctaatttagtaatatttaagtttgtctaaattataaagtgtagagaccaccatgcaggcaaagctagcagctgtctattcacacatgtttccactttctgggttatacctgattaacagcaaaccacagctgacacacaactttaccaggtgaaagttataccaaagtataaaaaacaggctaggctaaattaggaaccagaacatagagtgtaaaatcaggatgcaaggttcaatacaatacatgtgttgtattgtatcttatcatagcacgtaagaacatatcccacagtttagactctagagatgcaataggtggaatattcaacagatctgaaggcctgatgtcaaaatcaacactacaataaccacagcacggtacatcatatagaaacaatatcattcacctctcataggatccaatgatccataatgaccaaggtcattcatagccaatgtttggaaaaacatgccttaaattaataccaaaggcgtttggcaggcaaagaacaggacatcactcgtagtatggatatgcaaaacaagcatgatagcaccaagggtaagatatatcagtgaagagagaagaagcaccaaagtttgtaaaagtataatagcattcagagaagggagagtaaactaatccaccctactgaaaacacattgcagtatgacacaacctgacctaacacattcagataccaggctgaggtttgcatccagttcctgaaagaccaaaatccaagtcctgatctatttttaccagtactgaaacaaccaaactgggattatatcacaaaacaccactaccaacaaaatttgacaccaagtttaggcaatccatatccgtacacacgcacattatttctctcttttccaaggaattttcagcaattcacattccaaagaacccttactttctcaccgttggtgttgtaatgaaggccaacaatagtcaaaacggacaactcctaattgatgaatgcatagaaaatatatattgattttacagaatagtgtttgtcattaccacttaaaccctgaaaactaagacataacagtatgcataaaaccaaaaaccggatgaagttcccctaacatgaacaaaccacagatcgatcccctaacaagcacagccacaaaaagtcattcccccctactatctaggtcccactttcacatgatattgaggcattgcgcaaaagcacatttgggaatattaccgtaaacgtgagttgtgctacatttaaggtaaaaattcagagcaatcgcagatctggcgaatccaaaccatatataaacacacgaacccactcaggtcagccgatccgcgtaagcaaatatcacagtcgaaaggatttggggcgcagatatttaccacggacttagagcaacaccgtggagggtagatcggtggcccgacagctgagattccccctaggcacgactcccaactccgccggatgggagggtacccgcgcccgtggcagaggacacggcgagcgggaggcagtggcgacgagggagccgcgcgcatgggcggcgcacaaccctaaccttaccgagtcgtcgccagatgcacagagaggagggtagctcgcgctcgcgcgcgcgcgcgaggcgcgacgcgggagcggcgcccgcacggtagacgacggcgcggccgaggcgcgccgagctccgctgcctgcgccgcggcggcgacggcggcggcggcggcaaggtgaggtgggcggaaaagcggaaaggccgagagggagaaaaagggttggggggtggggttggttggtgacgaggtgagcaacgaaggggtcttcaccctctcgcgattggccgattggggatcgcttcgtcctcccgcaaagcagtgggggatatggggagacggaatatgggccgggtcgggccggatccgcgaccgtgactgaaaacgagccccctgaaccacccaccacacgaggttcacccaccaaccaccgtatggtccacattgcctcttcgcaggcccatctttctcctcggcccaaccaattacacggcccatctacacttgcttcacgacgtgttgcacgagttcttccgtaaggaacaagggcctgttcactttgatgccaaaataaatcttaccaaattttggtaaggcatagttgccgaaattttggcaacttgccaaaattttagcaggatttcttatatagttaccaaaatttggcagcaaactaaatatagccacttttttggcaactttaccaaaatttgataaggttgaaaatggcatcaaagtgaacaagccctaagttctcgttttatcgctcaatttgaaattcatccctaaaccacaatactactagatataacttgtctctcagcttaaaaatcgggtcacatttggtcccaatgcaatattcctctcagttttggctgacgtggcagctagtattacgggacgaatttcaaattcagcgacaaattgagggacctaaagtgaacttattcctttcaggaatgctcgtcttgtctatctcctcggcccaacaaattacacggcccatctttatactacacttgcttcacaacgtgttgcacgagctcttcagtaatgctcgtcttggatgtgatcacgaattttaccctgctcgagtgccctgttccattcaatttcggggacagtttggtcacggttttcacgtgctctagattacaggatagtaatacttctccgtaacacttttcgagctggcatgacctgcacttacagcattctgcagaaacaagtggaatacctgttaaattcagtgtatcatctgcaggattgcaggaactcttgtcagctgtagtattacagcatcactgtatcagtgtcgtttggccttgcaggcaacagcagcagagcagaagaagagacctgtcggatgatgcccatagcgaaaaccaccgagcttcctgcggttttcatggctaagctgtttaacttggttcattgaacacctttgtttagcttggcttttgtccattcatttgctgttttcgccaacagcttgtacctaaaaggcaggacaccaacaggttagatgcaggcgacatgtttgagacagatgctgcatcggagacgaagtccggctggatttgttcgctcatgttgggacactaggacatatactctactccacttatgcagacgcaagggccatatgctcaacgaagcttttgacgcgttggcctagtagtagaagagggccccctggcccagcacatagagcctgtcgcatcagccagggctggcatgaaaatggaattaccctgcatctttagcgtcattatctactggagtactatctcccagaccagtagaattcagctcgtgctcattgcgttttttagttcactgaactcgcctgacccgtaaaattccgctcgtgctctttgcgttattggagtttactgaactcgcctgatgacccgtagaattccgctcgtgctcattgcaatttggagttcactggactcccctgatgctactttcctcgtgcctggaattcaatgcattcatcagaatttgttgattccacgatcgagccgtgcagacaagagagcatgcataacgattattcccacgtgatgttgttcggtttactcagctgggagtagtagtaccgtctggtagtgcagctctgattctttttgctttttttttagaaatatattacatacaccataattacaacgtacgcatacccacccatatatcgacgaacaagtcatttatcacttaaaggataactaaacctatgcatacccacccatatatcgacgaacgagtcatttatcacttaaaggataactaaaccaatacgcaaacatccatattaagtttaagacttgaatcgggataaacacgtccatttgaatgaacccaaataattgaaccatgctggagatggattctaatagctcgagtgaatgtccacctgtttattgcatgtcaactagatggttgcaaaaaattttttaaaaaaattgacaagatagatcaatatgtaatatatcactctacaaacatgcaagttaaaattctacttgtacaagtcgtaacaaaaataacaaatttaagtgtaaatatacatatagtaatttgagttttgtttgttattttttgttacaatatgtagaagttgaattttaacttgcatgtttgtggattgatacattacatattgatctatcttattcatattttttcaatttttttcataaccatttagataacatgcaataaatgggtggacatccactcgagctgttaaaacagtttccaaccatgctccctatacgtatacgtatatatcagcatgcagttccattcgctgaaccttgccgacaacgattcctcactatctggcaccccatcctgcccagttccccatcaatccccgtccggcagcaagtgtgacaaggcaacaaaacgagctgccattttccgtacctggatacatacatgcacgctggcgacggacggacggtacgttcggacaggttatcggcacgtcgactgatcccggagaaagacggcgccaaaaggttgcgtactagcgtcaaggagcgttggaaacgtgacagccgaaacagccgtggatcgcaggcaacaaacagtgagtaagccatccatccagccagacgacaccggtgtccgttttattgcgagcattgaatccgaaaaggtgcctgcctcccggccgataaacagatagaagcgcgcgtgtacgtcgtcgtcgctggttccgctatcccgccaccgtgcgctgcgtgacgccgtcgccgtctctcgtgtttcgccacgagcccaacaaaaaaaaaaacaacggtctaatttagttcctaactttttctttaaacttttaatttttttatcacattaaagctttcctacacatcatataaactttaaacttttttattatattatttaaatttcaattaaactttcatttcaattttagagtgaaaacacacccaatattgctagccgcagcgcgcgcgcgtggccacaacccccatccgggcgggaaacgtgcccctgctgacgctgatggggcatcgcggccggtgtctcgcgcgcgggccggcctttcggctttcgctgccgccgcgaaaacgatcgacggccggggcgcacggcgcacgacgacgcgtaggtccgcgcgcgtttccgcagccggttgcaaccctgcagcgtgcagctagccatgcaccgctcgttcgccatgacacggtgtgtgctgtcaagcgtcgcgcgattgcggattcgccgagcggcaaccggtgaccgtgatgcgcacctgccttagctagctagcgttaaatgcttcgagaatctttggccctgagaataaaagctctctaaaaatagttcagcttttgatcaagattctaaaaaattataattataaaaaattataattatagaatctagaaaataaattagaagcaataagttgggaaacccacttttttcagattctcaaaaaccggctttcaaagccagccagccagcttcttcctaaaatcttaagcttcctaaacggctcctttatctgctcctacagcaatgagtgctttactacaggaccattctaaatgtagacctatacagatgcggtgctccttctgccgtgcttcctccgactttcttggagatggaagaaggtgccgtgctgctacacgctggatcgatgtagtacatatacaaaagcaatggataggattgatcaatccgtaactgctcctgtatgtcgagaggaggagaagaagattactgttactgctggtagtgtggtgtagtatgtggtatagatgacgcacccgtgatgacagcctcggggccttcatcactcatccacgtcggcacgaaaaccttttttcgatcccactagctggaattatgaccatgacagttacatctacgttgctttcttgttgttttcttccacaatgtcaaatgtgaagctgcaaagaaaaatggcacgcgctgaggaaaggataaaagaaagcaatgttccctttttccttcagggcagcatggaaagcgagctcttcaatctggagatttttagcgttttttcaactatggtgggtccttcaaaaattgtgaatctaatctcccaaaaaaaacaagtgatgaatcaggtaggggagttcattgacatcgaaagatatgcataatttacatatgccgaaagcgatccatttccctgccactaaccaatagaattgaagatcttatcagctccaaaagcaagtaccagatctttgtttatagcccattttatccattagctcgagtagcaccatgagctaacaacattcttgtatgccagatgaaatgccactcgcacagaagcaccgttggcaattgcaaatcatatttttggctgctctgtggtgtaggtttcatgtgaaaagatgaccatatattgcccagaagtcactggtttggtatttggatttaatttctgccgttggttttgctccaagccggccgcgtgctagtacatactgactgacttccataggagattcccacactgttgtatttttacagaagctgaagctgattcaattgaattaggctgtgttccttccaaagttgaaagtttgggttgaaattggtacgatgtgactgaaaagttgtatgtgtatgacaggttgatgtgataaaaaatttagaagtttggatctaaaaacagccctagtaggtcgatctcatcttcatgacttcatgacatctgcgcccatatgccctttttaactacaattttttttcaactgcatttttgtttttcccagagggtaaatagaacgttttcagggcaataaatcagaagaaacaaaagatgatataaatagctacatatgttcattcccctccaggatccaattctcagtttgcctggcacggattggctgatatgagttgaagttgataagatcgggtcaaaaaaatcccaagcttactaggctaggcacacggatttttatacgtacttgagctaacatcaaaccaagcagtgatggtatggccagattacatcacctcatggccacttgattaggggcaataaccatgaaaacccatatacaagttggaggcaattaattagagaaaagcgagagaatcgctagccctgtttatttttaaagcacctttgccgctgcatctatgcaaatgatctacagaagcatcagtgtgttggccttacataaaaaaaaaatactccatatctttctgaaggaaatatgcaaattctttcttttttggaacaacaaattctccatatcttgtgggacagaccggcgccattgttgatgactccagcagtagtaagtcatgatccatcgctgcatcatttggagcccacatatatactcgggaatcccaatcagtcgtggcctcgagctctctttcggccgtgatcatgaagccggtgatcagttcatgctcatgtccacatctcatctcattccaccaccagccaaaaaagaaatagaaaatctctctatttttggattttgccggtattatactagtactagtcaacgaacttgttgaccacaggatgtgtttcgttttgtggaggagatggttaatggaccatctaatcgatctgaactccagatatgagatcttgtttggttttgattgaatggttggtccatcaacatctcctgctctaaacgtacattggtgtattgttacttatttgttaatggaaaataaacaatgacgccgtgctgccaaaatcaagggatgatctcatctactgatagaccattccacccttacacattgagatgactagtagtgaactagtgataactcaaattaaacacaccataaatatagatatgttcttattaactactccatttgtctcaaaatagatttattttttatccattccacatataccaataaaaaaactagagtacactcactttatcaaatctgaatacaattattacttttttatctactcttggtgctctcatgctttcataaactttgatgtagtgaatactcaaatgtgaacttattttggacaaattaaaggaaccaaaaaataaatttattatgagacgagtgagtactactggacgagactttcagctcattgtttgttgtatgggtgaattttttcagtactttaagcgagctgaaaaaaaaactgtgataaaaactcagaattaaaatttaaatcgcgactgatacaccaaatgcaaaatgttggagctgtattacattaccgagggcctgtttggcatagctccagctccagttccactcctcctggagctggagctcggccaaacagtttcaactccaccaaaactgggagtggagttgggtggaactctatcacaaaatgaactagagttgtggagctgggtttaggcagctccacaactccactccagacctaactcctcgagctaaatttaggagttggagctgtaccaaaccggccctgaatatcaatcggatccaaggatctttggccgtccaatccattgagcgtttcgccccttactcctagtaccataccatgggtgtgtttagttcacgctaaaattagaaatttggttgaaattggaacgatgtgacagaaaagttgaaagtttatgtgtgtaggaaatattagatgtgatagaaaagttgaaagtttgaagaaaaaatttgatactaaggccccctttgaattggagggaaaatggaggaaaaacaaaggaattgaaatcctacactattcatgcctttgattcgtaggaatgagaaaaggaaaaatgtaggaaacttttctattcctacaattctagagcaaaaacgtaggaaatttaacatccactctaacctcttggaaaactttcccagagtctatctctctcatttaattcctgcatttttcctgtggtctaatcaaacggtcattcctatatttttcctgtgttttgcaatcctctgtttttacacttgcattcctaccaaaatcctgtgtttttcctattcctccgttttttcaatcctacgattcaaaggggccctaaaccatgttaggcaggcagttaggtaggtgagtaactaacggtgacacgacctcgtcagctttgaaacgttcacgcatatccgtgcagagccaaagtgcgtggacgcgccacgtaagcctaagccccccctccccgacccggtcgccgctgcttcctgccggcttccgcgcggccaaccaaacccaacccgaccggtcgcgcgccgcgtttcggcgaagcccccgacgaagcagccgcgcaacccctgcaatgcatctcattctcgccgaagggaccgatcgatgcgaggcgatgcccaacggatcggaccgggacgacccggtcgggtccatccgggacgcctgcctgccacgtcgacccggcaaagccagcgttgactcccaccagcgagagagaaaagaaaacgagcgtgacgtggcaggtcctgcgcgacacgctggcgttgacatggagcttaccggatcgccgtgatgttgtcgtcggccaacttctaggaaacaagttaaattgacttgtagatgttgtattactccctccgtttctaaatatttaacgctgttgatttttttaaatatgtttgactgtttgtcttatttaaaaaatttaagtaattattaattcttttcatatcatttgtttattgttaaatatacttatatgtatacgtatatttttacatatttcacaaaagtttttaaataagacgaacagtcaaacatgtgctaaaaagtcaacggtgttaaatatttagaaacagagggagtagtaattaactaactgaagtaggagtaggatatttttgcacatgtcaaaatcaacgtatgaactccaatctccaccaggaatgcagtagcagtactcgtgtagtagcgtggggtattagcagacctatcctttcacagcatatttacaaacgaaaaataatttgtaaataaaacttttttatatgtgtgtttttgatgatctaaaagcaactgaaaaataaactttgatgagaaaacctaaaattaactctaaatttaagataaaaaattaaattttagctgataagtgtaagtataagcgaaaaaacgagacgacaatatcgttagattagataggggtaaagtaaaagttgctgcgaatcctgacctgatcaagtcaggggttcattgatctcttctcacttctcagcaacaaagcttacacacgcatcgcacgttggaagaacagcccaaaacattcgcgatagacagacagtaacctcgcttgaatagtgagcactcgcgctgtctccttctgtgatcgccactagctctagttgacggtttgcgagcgtgaaacgcaacgcagagaggagaaacgaggcaaaattggcggacggatgagcgaggaagaggacgcgattggaggcgttgtttggttgtggcgtcgcgcgcgtatggcgtagcgtggcagcagccgtcccatcaatcacccgtcgtccatctctcgctgcctccttttccggacccgagagagaatccgacgagtacgagaggcagcagccgccagccgcgctgctcgcgttggttgtaccccttcagtttgcccccacgcatcactccacctgcactacctcctgctcctcgttttgtctttcgctttccttgtttcatctactcctatcctttttttccctcttggttttacactctatgacacgtcatcttggagtacggagtacttcacactatgctcagcgttcgtttgaaaaaattgtttcgtttttccacgaatatttttcaaactgtcaaagccatgtgtattgcataaaatatagaagcattgtttaaaagatcatgataatctattatttttaaatttaaaataattaatattcaatcaattatacaaggtgctcgtatttacggttaattttttttattgctagataatatatccataaaaaacactggaacttatatttgctagtcttctagtagatgtatttataagataggtgcggtgtgcgggtgtgttcttaagagtaagtgtgtgagcgtctatgtttgtatcatgttttaaagaaagaaaatcatatgctaaaaacttatctcgttttaagtatttttcatgattttttttctcaaatatacccctaaaggtaggaatagtataatttccgggggtgctcgttatacggtgtggcgatggtataattcccgaacccagtaataaaaccgctggatgtgaatcccgaggcggtgctccagaggccgaaatccacgtgccacatgagacgatatttattgcccccctgtgaatctcgatgcaattggcagggggccggcagagggcgttggtgagcgtaatttttgagccgtttgtttacggcgcgctctcacgttgttcatcgcgctgtgaatcggagcatcgaaatccccaagtagccccctcctcctcggctgccacgcaaaaacaaacccacacgccgtacattcgctgccacgcaagctggcaagaattttagcggggcccacctgctgacactggcgtgtgggcccgaggatcagggcgactgcgcgcggctgtcagtgaccctgtgcgtcgcagactcgcaggggagaaaccgcgacggcgaagtggtgttgttgctgtcctcctgcggcacgcctgactaggaacaatcattagcttaaccaacaagatttgttaattaccagtgttgattcaaacatgttttttttgaagattttgattcaaacatgtctcaaacatgcttaactctcattttagctgttttgcgttgtttaatttgaggctaaacatgtttctttttgtctatttttaggggaggggaaacatgtttcgacatggcattttagtaccaaactagggctaactggaaccaaggttcgtaattccgatagattattttagttagttttcatacaaagttgatggaaagtcatcgatttttttcctttggttttggtaaattgataggaccgaatttcaccttgaaaacggtaatgtaagccatgattcgagccataataaattcatgtaatgttttgtagtgaagaaatttaattagatcataaatttgtcactaaaatgtttatcgagtagtatgtgtttaaagctgcatgctcaccgcctcgtggataaccaagtgtattaagtgtgtggtgcatattcgtctttcatatgataaaggacaaatatgtaacgaaaacgctgataatttaaaattcaattgggatttacaacaactgatgcaccaatgtgatactgcaaattatttcctctggccggtgatcaacggccaaaaagctctcatgagagcaagtctagtagtacagcccactactagctccaattcatctataaccaatttatacaataattgcttactatactataaatatatggtcccacctgtcatacacacagtgtgtcttggagcccgctgctcttctctcttatcgtttatatcattaaaatatatttatagttgtctaatagcctgctattatacctgctctaatagtgggttcagtagctaactactgtacgtttaattatttcctggtgtttttatacacccaaatctagctggtggattctgtttacactcagcttttctaattaatttccctgtatagtactcttatctggactggtttccttatcgtgtgttttcaaatatgaagacattagaaatggatttgaccaattgaactaggtagtagaaaccgttaagcctaacaaccatgatgatcatataaaaattctggaagatcaccggtggcttctcaaatcaaatgctctgccttccagttctataatctaatacccacctgatatgcatggcatgtgaacaagagggcataggtggttacacttacattttaatctgtttgtttttttttcaagaaatcaacaatcgaatcatgcatggacaccacttgcttatctagaaggctggaagttagacacggaaatattttctaactaaaacagcccagtacatcaacttaggtgtaactctttttaaactgctggggcatgaaagcagagcattagaactttcatcctaattatggtggaatttactcacatttttatcttctaatagtaagaattgttggattctcaaattagctataaaattattaacaggaaataagtatgataggaagaataccttttataaatgcacataaacatgtatgcatttttctaattcaaaccaacatttcaattttgcattctaggtgatgttatcttatgacaccggacacgagctaaatcatgattttcaagggctagtcataataaaaccaacacagaggcaccatggcaaataagaccaataaatgttacaccgttaataatgtgtcgtagccgttttcagagtgtttttatatgatagtagtgtatttaataactacacgtatactttctcatgacgctatgtttaaaagttggcgccaatcgcaactaaaagtaacctcacccaattatctattaacttattaaaggaatagaaaaaggatcatccacgttcgctctcacggcctagaaattcttacattaattgaagaaaaaagaaaaacagagtccatatagaaatacaatttagaaatagttgaaattcgaaattaaaaaaataaggaatattggaagaggagactagagtccatatataaatacaatttataaataactgaaattcggaattaaaaaattaagagtattagaagaatagtatagagtccatactattaagaaataatagaaaatcagaattaaaaataaggaatattagaaatagagtatagagtccatatagaaatacaattaagaaattatagaaattcaaaattaaaaataaggaatattaatagagtccatatagaaatttaaaactaactattcagaataaacataatagaattaaaagtagagtttagagttcgtataaaaatacaatttacaaataactaaaatttaaaattaaaaaaacatgggaagaagaatataaagtcaatatatgaatataatttagaagtaactgaaattcgaaattaaaaattaaagaatattgaaagatgagtttagagtccacatagaaatacaattagaaataatagaaattcagaattaaaaataaataatattagaagaagtgcctagagtctatatagaaatacaattcacagagaacaaaaattcagaataaaagaaaataaaatattgaaagacgagtctagagtccgtataggaatataatttacaaattactacaatttgatataaaaaataattaataactaacatgtatataaaatacaatataaatattacacattagtagtttcgtaaagttagtacaaaatttaaaattatgttgttattttaatatattagattgagaaaacatacatgctattatataggagaaaatataatgatgctagccgcgtaatctgcgtaggaatcctgctagttttttttacaccaaaaagaaaatttaccgaggtccacaaaacgttgaactatcacttggaacacggcaatacgaaacacaacaaaaactgactcgtctgatttgtaaaaccagagagaaaagaaaaagggggaaaaggaagttataattttcttgccacccccatcacggcttcacttggcctcgtctataaaaaaacactcctctgtctcgaatccttcttcctctccctgcccccgatcggcctcgtcctctccacgccgcgagcccaccagaaaacgcacacgccgacgcgagccaatcaacccgccgcgccgcgcctcgccgccgtcgcgatgcgaccgggcgggccgccgagcttgcgggcggggctgcagcagcagcagcagcagcagccggggacgccggggaggtcgcggcgccggccggatctcacgctgccgctgccgcagcgggacctcacgtcgctcgcggtgccgctgccgctgccgctgccgccgtcgtcggcgccgtcgtcgacgtcgtcgtccgggtcgtcctcgctcggcggcgtgcccaccccgccgaattcggtcggctccgcgccgccggccccgccgccgctgtcggagctggagcgcgtccgccgcatcgggaacggcgcgggcgggacggtgtggatggtccggcaccgccccacggggcggccgtacgcgctcaaggtgctttacgggaaccacgacgacgccgtgcggcggcagatcacgggcgagatcgggatcctccgcacgccgagcacccggccgtcgtgcggtgcccggcatgtacgagcaggccggcgagctccagatcctggttgagtacatggacgggggatccctcgagggccgccgcattgcctccgaggccttcctcgccgacgtcgcgcgccaggtgctttccgggattgcctacctccaccgccgccacattgtccaccgggacatcaagccatccaacctcctcatcgactccggccgccgcgtcaagatcgccgacttcggcgtcggccgcatcctcaaccagaccatggacccctgcaactcctccgtcgggaccatcgcctacatgagccccgagcgcatcaacaccgacctcaacgacggcgcctacgacggctacgccggcgacatctggagcttcggcctgagcattctcgagttctacatgggcaggttccccctcggggagaatctcggcaagcagggagactgggccgccctcatgtgcgcgatttgctactccgactcgccggcgccgccgcccaacgcctcgccggagttcaagagcttcatcagctgctgcctccagaagaacccggcgcggcggccatcggcggcgcagcttctccaacatcggttcgtcgccgggccacagcagcagcagcagccgcagccgcagcccctcgcaccgcctccgtcatgatgaattccgatgggattccggcgttgatccggctcggccatggatggacggtggtttggcattgagacgtgggatctaggagtgctcttcctagccattttgggtattcaagccaccaccacaatttagtgatttaccctcatcatcatcccctctcttgtcgctgttgctcctggaattaagctcctctcctctcctccccttcccctcctcaacttttctttaatctcttcttcttcttttttttcttcttcttcttccaattaagttcatgttcttccaaatgatcatcatataatatgggttgttaagaaagcaatttcttcttaattaatttattttctaaaatcatcattggagcagtagaagtagtagtagtagtaggtggtggtgtccatctgctccagttgcaggaggaggaggagaagatggtgacaaaacaacattgtgatgctttgctgtgctggcttcttggattctgcaaattgtggggggtggattggattggattggatggatcatgaatggttggagcaagcaaatcttgaaatgggaaccaaatcaactttattttttcctcctcctcttcctgaatcctgatcctttctctctggtggttttgaggggagaatgatcgaatgaaatcatgaattgctctctttattctttgtctcactttgctaccagtagtagtatattgcttctgaacctgtgcttttcttctcttctccttttccctttcccagttcattatttttggggcccctgtagggatggcactactactactttgcatgcatcgatagatttgggtcatttttttttagcgtgacatccttaattttcacgtagtaaaaggaaagcatgaaaaagaacaagaagaacaggggacgcagccgcgaagggccctctgcttctgttgtgcagagagtgacaattgcttgcaaatggatagatttgtaggtcggcgaaaggggctgtacataggaaaagcgatgatgagatggtatgagatgagatgagagcaagagagagaagaaccaaccaagagggtgtcgcctccatcaatgtggtgatgctgtacgcaggccgtcctgtgctgacatgtgggcccgaatgggctgcttgcttcgtggaggtgtatgaattgagtttgtgaacagtgtgcatctacaataaatagacacggccttctcatgtgtgtgtgtatgagctgacttatgatgatgatgcagtgcacttgcagcaaagagtacaatgcgccccagctgagaggaacaattcaactgtgatttctaatgcaagattttatctagtataactttataaattacttctttcgttctaaaaagtttatctgttagttaaaaatgaaccagcatgatacaaaagaaagagaggagtgtgaattactcatcctcctatgtcctatcttagtagtaggttaaaaagggtgtttaattatctctcccagtgtacatgaacatgatgatgagtacttcgtcgtaccacgtatggttgcatgcgcagtactcctctgcttataatgcgtgatgcggtatgtcttgcgtgatgcattattggtgtagttaagatggcacgagatgtcaatgtttcgtccacagattacctacgggaagtacatccagagcactcatttatattcgttttgttacttttctagaagccctgcttatgattcatgagtactccagtagtccagtagtactagtaaacatggttgtgaatatcacatctcaagaatatactccagtgacttggagggggacgttgattacaaggccattcccgactcaatgactaggattgtgtctatagcattaaataaggtgatacctaggatgaaaaatgatgtggcatgtaaataaatgagaaaagagaaggaaaccatgtcttgagacatggtttctacacaacatccaagacatcatgtgagataagaagtattaaatttaagtatggaatattagtgtttgcattggaagaacggtgtctagtactagtctcttgatgatgtggagtttatggaaaccatgtctagtgttttaggttgggaatggtttaaaggaaacggttaaaaccttaatcaccggataggtggctcatttggtatcctacaaacaaattatagttaaataatattgtactatgtccgtctaaaaaatatagtactcctagattttaactatgtatcttgatatgctcttatctaaatttatatctacaaaccagtagaacggtagatattagtagtattaataaccatgccactttcaaaagcaggaatttcagaaaaatataacggcggaataaaaagaaattgattggcttatacttatgcttgtaagcaaaaacattgaattttaaacttaattttgaatttaatatactgtttttatcatagtttattttatactccctcagtcccaaaaaaaagtctaattctagagtgtgtccagattcatccctagaattagactttttttttttgaatggagggagtagcatttgcttttgagttgttaagggtatgtatatgtagtactaagttttacttacaaattttatttgctaataaacgtttcggatagttaatgtcttttcacgcacgatcacggtgaagtgaagtggcctgcgaatggaagcacgaaacggaaggacaagagagggggaaaacacagacccagacacacgagatcctcggcggctgctgattggagcgcaaggacagattcttctgaaactgaaatgataggtgcctgacacaaacatgccatgcccgaacagcgcctacccctagtagcagcagctgcagcggtagcactagcatccaacgcgtacgggcacgcctcggctgccactgtttggaagtttcgcctcggcgacggatcatcatctcatatggatgcggccctgctctgctctgacagcagtgaaggctactgatgatgaatgcacgccgcacgctgcgtcatgagaattgcgggtgttcgcgttcgattcgatcgattctctcgtgaagtcatgagatgtcgcagtgcagggcccccacatttgtgtatactactactccctctatccaaaaaaaactcaacctaacaataaatctgaacaaatatttgttctaatagaggtcaaatcctctgataagttaagttttttttttatgaagggagtaattctgtttaaaatgtactatcatttcagactcagtgctatttctgtagattatcctgtgtattttactacagtggagattattcactacgagctgacttgttctttcagtccttcatgatcaattcagttcagactttagtggtagtagtctttttcttctttgtacttatcgtttaaaaattgacgagtctttgttgattgttgatggagtaggaaatggtcgtcggcatgtcctcttcttaactactccctgaacgtcattcagttgagtactattatgcagcatgtcgcacatgataaattaacaggaaacaagtgtagctcaaagatatgaacagaagaaatccggtccagatgataatgtagctatgacggctgaacctgtataagaccagatctttggtggccctttttccgagcttctggatgaactgtcagcattttgattagttttaaaatgtcaggtcatttacaaacaacaggaggatcaagaaacgatcgacaactagtttacaaccacaccaacatgtaggcatgaacatggctctctgtctctgcattaacaaacagtagcttcctactcagattaatcaggagaagcattggataaaaatcatgcttaagtgagccttgcagtaacgcctattgcagtcgtagtgcaaaactcaggtcagctttaatttagttgtagttgagccttcgtccctgcatggcttgctggctcgtgtccgcgtcgtacgacgacctccctacgctgtgctcaatcgccatatcctggtgattaatcagatgaagcaacaaagattcaattgatgttcttgcttgcaagttgcaacgagatttgcaggagatggtggatggattgatcttacggtttgtcgatgaggttgatgcatggaggagttgctgttgtagggcgagctgtgcatgctgctccggccgccgccgctcatggtgttgcagagctgcatgttgtcctcgccgagggcgcggaggcggttgagctccgggagcacgacggtggcgaggtcggggcggtccttccggcggagctcgcagcagcggatggatatctcggcgaagcagcgcgcctcgtcgacgggccagtcgtggacggccgggtcgagcatgtcgacgatggtgccgtggtcgagcgcgcgcgcgacgtggtgggtgagccccatgggcggcttcgcggtgacgatctggagcagcatgacgccgagggagtagacgtccgacttgacgccgagcatgcccgtctgctggtactccgggtcgatgtagcagaaggtccccgccgccgacgtcatgtggcactgcgtgacgctgtcggcgacggagggcgggacgaggcgggcgaggccgacgtcgctgatcttgctgacgtagttgcggtcgaggaggatgttgcccggcttgaggtcgcggtggacgagcggctcgggcttggtctggtggaggaagagcaagccggtggcgatctcggcggcgatgcggaagcggtgctgccacgggatgaccgggccgccgccgcgccggacaggcagtcgtcgaggctgccgttggccatgtactcgtagacgaggcagccgtactccgggcacgcgccgaggaggagcaccatgttggggtggcggatgcagctgagcacctccacctcctggttgaactgcgacctcccctgggcggcgtcggggcggagcaccttgatggccaccggcgtgtggtccaggtggcccttgtacaccgggccatagccgccctcgccgatcttgcggccgtcggcgaagtgctcggtggcgagctcgatctcctcgatggtgtacttgcggtaccggaccgcgccgcgcgagccgccgccgcccatggacttgagacgctcctcggtctccttgagcgccttcatctccgcgctgatccgcttctgcgcctccatctccgccagccgctgcgacgcctccgccgcctcgatggccgccctcgccttcgccttctcctgctcgatcagcgccatggccgactcctccgtcagccgcgtctcgtgcgaccgctgctcctcatccgtcttccagcgctgcagctccatcgcctgcacgcatcatcaaacactcgatcacatcaactcttctcaacttccacaatccaaacgtaacatgtcaataacgtgggaaactattctaaattcttgataggagattcactcattgattgcatataacccaaatggttatgaaaaaaatatgaggaaaaaacaaaatagattaatatgtgataaatccatccacaaatcaaatttaactgcaacgaaaaaacaaatttaaatgtggatacacattaactatatatagtttaattaattaatatatttttaatttatagaagttgaattttaacctgcatgtttgtagagtgacctatcacatataatctatcttttaaatttcttttcaacttttttataaccttttaaggtggtgtttggatccagtgactaaactacttcagtccctgttatatcggatgaatttggagtattaaacataggcatcttataaaactaattacataaatgagagctaattcgcgtgacaaattttttaaacctaattaatctataattagcgcatgtttactgtagcatcacataggctaatcatggattaattaggctcaatagattcgtctcacgaattaatccaaggttatagaatgggttttattaataatctacgtttaatatttaaaattagtgtctaaacatccgatgtgataggactaaaaagtttttgtcccatctaaacagggtctaaatgatatgcaaacaacaataaagttgcgatgcttataatttcttggttgatcaatggttcatcgctaaccttctgtttagccgtgagcgcctccttgcacgcggtgctgtacatgtccatggtctgcttgagctcaagccgcagccgcttcatctcggcctccatgtcctcctggtatatgtacgtacgtgagagatcgatcacaacgatcgatcatggcgacgaaatctcatctgatgcaaacaaaaatctagcctgtactagctagctagcttgcattattgtgtgtaccatgggaagggaggaagcgaaggaggagttgctggactgggagtcgctgccgaaggagtcgccgccccacatgctgggcggccgcgtcgcctcgaagctgtggtggtcgtgggcgtccgaaccggacgacagccgcggcgggtacaggtccaagctccggcgagggccggagctgatgaaggagatgtccgacgactccggcatcgagtagtccgggaacgccttcctcaccgacgtgttcgcccccctcgcgaacggcgacctgtctccacacaaatgccacaagcttagcttcttgtttctcatccattcttcccccctagcttaagcttacggaaagagtttttctacatctaggtgtcagcacccgttatttgtatactgctcaaatagttatagaaactagcttaagcttacggaatgagtttttctacatctaggtgtcggcacccgttatttgcatactactcaaatagttatagaaaaaagatttaaaaaataatatcaattaagatgatataattttatagacaaacatacaagacatctagactaaggccctctttgtttaggtttataagccaacttataagtcgaaaagtctaagcctaaacaaacaagcagctttttcatttggcttttttgaagccataaaccactttaacactattaagccaaaagctaggttggagaagcttttttggtttatgtgaggtagatgtatgactcaactactaaacttaggacattaaatccaccggcttataaatcatataagccaataagctgacttaaaagtctaggccaataaatctaagcctaaacaaaaagggcctaaatcagatagtaatattatgttccttaaaaaaagatatatactacatccatttcaggttataagactttctaacattgccccccccccccacacacatatatattcattaacatatatatgaatgtaaacaatggtaggaaatcttataatataaaacattataaaacagaggaagtagttaatattacatgtacaatgcatataaaatttgttatttttatttctttatatgtaaatcaaatttatatttgccagtttgtataatgttttatattcacaatctatctcgtcaaattttataattttttatattattatttaaaccgcatgtatacacctaggtgtcgtgacgtctaggcatagaaaatactttcccctcgacttacataatgaagttgtcctgtatcttcggtgtcccggcgatgtcaggtctcgtcgtggacggaggaggcggcggcgtccatttctgcgtggacacgttatcgggcttggggccctggatcattgtgcggagcggcgaaacggccggcgcctggcggacggcctgccgcaccgacgtcaccttgccgcctttggagacgacgtacacggtgctgaagtccggcgccgtcttggagatgctgctcgagatctccgccttgaatcttttcaaatgccacaaaccaaattcaccccggtttcctcgacagctgctttttgagagttgatcgatcgagatgagatgagtagactgaattggttggttggttacctgacgaagccgcccctggcggtggcgccgacgacgagcttctcgatggcggcgtgcgcggcgaactcgacgatcgccttggacacgtcgtggtcgtccagcaccacgtccttgcagtggatctgcgagcccagccacgagaaaaacccccattagttattgcaccacgccgtgctgcaccgtacgagaatggacgcgtcgcgttacgtctttccgcgtgcagaagcagcggaacgggaggaacaggtccttcatctgcgggtccgacggctgtttgtacccggccgcgtcctccacgccacctgcacacgcgcgcgtgcatcgtcagagaaaaacttgaaatccgacgagagatttcagcggcgggggtccgggggatgcagtggttgcctgaggagcccttggtgtggacgtggacgagcacgatggtctggcccttgtgggcgagcgactccgtggcgtacttgagggcgttctggctgttcttgtccttgtcgatgcacaccgccaccagcgggtacccgccgccgccggggtcgccgccgtccttgcccattgccagggctaaccgattaaccaatttagttcccccttcctcgttgctctagtgctcgaagctttttgctatcctgtactagttccatgccattttccttcctgcgcacagctctgctaccaatgtcttcagaaaaactctgctggttgattgttcatccactgaaagattgaaatggggagggaaggccattgttcatgatagagcatggggatctcatttagacctttgctcctgttcctctgacctgtattgactattaataaacacgtcctacttggaaacgagtttaaaacgcttatcttgttccttgtcttcttttacctgctgggttaacggatgaccaccaatgcttcctctctccttttttggtctacactacaaaacagacagcgatggtatatatatactgatgacaacagatgtacagatcataggattatgtgtgtcggtctcaaatcattgacaagggcactcctgctttatattaccactaagccaaaattaacacagaaccagcaggagaattgcataaagagcatctttattcagagaactgcatatacaaccagaggcagtcaagtttataaaatttatatgtacaaaaaatattacaccgacatttacactattaacaatctaacaattatccttacacagttacactacaagacaacaaatcagaggcacccaggctccgataaatgataaccttacatcacgtgtgatctaatgaaccaggcatgttggtccacgggtgtcatcacctaactagagtggtacaatggagttaacccaccgtataaaaggctgttatttatcaataattcatcgaaatttagctacactagaaaattgtctatcaaatggtagattacgtcttcgccgtctgaattaacaggatggatcctaacctgcaccaagcatcagcttacatcaaatgtttagaattctctctctctcttaagatatcatcagataaatcatgcgggaaaatcctctctcttaagattgtggaaccaagaagaagagaaatatagtgaaccatgaagggctatctatcgacaacagtatttgtccataactactgaatgcacatagaagctactataacatagaaggtccttacgcaaaaccccagcagccacattgccttgcagttaatagttcaactaccaattactggtcagttatcagtcttagattatgtttcacaaaaagaatctgcaggagtgccgattatattattcagtaactattggcaacagaggtgcgggactagcagaagatacctggatattgtggtgggcattgtatcttagccagctcttatgaaagcatacatcaacacgttcccagggaacttgtgtaaggccatggatcatcacttctgtaacagtaggagtaaagtctcattgcacagctagcaggaaacatagaaacaaatttaagttcgtgggtttgttatagatgcctctactattaacaccattttagttcgatgcgtcaataaagcttatgtgcactttacacagagcaagagtctcctgaatttagagagcatcaaaaccaagcttgcctattgatatatatatgttatagttattcttaccttccatgctatctgtaagtgaagcttctacagattcctcttgctgatgatgctctgaatttcctttgtcaacatggataatatgtggatactttttatcacttggtgttaactgcaactgagatgcataaacaggccagattattaatgtagtgagcataaaagcacagcaacattgtactgcctcctaaattgaaaaggttaaatggtaatttactttaggtaattcgtgctgacgccgaattgatgatgttctccacccaactatatctttaccaacatgttaaggacacaagcaaccaaagttgccttgagttcaagagaataccaaaaaaggaaaaaaaaagtaagtaaagtgggacattggtaggatacgatcatatgttacattcgcataggcaacacggcgcttaaaagagcgcaacgcagacctgcacaaagcaacaacatgtcaagcatggtacatggaaatagatatgttatacataaaaatatagtagattgcaccaattgctggatatgtacatgaattttccatcatcacagtcttcagccattcgtaggagaagtgggggcttcccatcatctgagtctgtaaggaataaatgtttccctgttctcccaactataaaatgtgcagttactgcagcagttcgctccaaaagtggaacaccaaaaaggaagggaagctgtcaagaacacaaatgaaagagtaggatcaggtttattctatttattcatactattttcttattgaattcatacgtacaaaatcccaaaaaaattatcaaggaaggtttaacgaagtactccatgagttcagagctgaataaaaatcaacatggggttcagtttacggaatgttttcctagatcaataggccatatgatataagtttggtggttacaaggttctaaggattcaaattgagaatgcaaaagctaacaatcagatgagagataaacatgtcaaacacacaacaaacacataatctggacaacttacttgtttattccaccttgatcccaagtgtggagtagcaactgcaataaaatttattggctccaaaccagctattttaccaccatcagatgttctcagttcatttgagaagttttctttatcaagagaagcctcttcatttattgatggatcatacagttttccaattgcatatcttgtaactaaaccaccaagtgaatgggcaacaaaagagatcttctgcaggttacttctcctctgaacaacttgtcgaacctgagtattaaatattagtgccattaggcaccctttgtattaaactgcaacttcatataaagtgcgatgataaagtgttctactgattacagtgaccatgaactagtagatgtataaacagttggtacaatgaagttggctgtacgcctgtacctcttcagctaacctttctcccatcaagtcgactccatcatatgttaactttgaatggttgcactgactgcctgtttcaagaaatttagttagacacggaaggtgtatgtttatgtaggctgatcaactattactgcttaggacatagcaaatcaactgggcagtatgaggtatagacatgggagaacagcaactaaatctggagtgcagctttgcaagtgaagtttggctgcatcaatgcacatcatgctaatatggtacttgctccgcaaatttcagactgtgattgaaacagctagtcttacgaggaatttcaaacaagctacaccccagcttaacggaaacttgagagggatttcacactatccacaccctggttaaacagaagctttctgtaatctaaattgcacaaagttcacatcttcagtgcacaaccaaatcacgattttttttctaactagcttgatgcctgtttgtggaaatgcaatgcattgcatttgcacttccagattgaagacattttgtaatgtgcaggcaaaaccaattccacaagaccctctagattaaacacttacacgggagcaaaattgaaaagcagtaacttttttttttcagataatggaaatggtacaaataagccagtaactaatcgagttgtataaactcacgatgcacgaagactttccccggcagcctcttcacaaactgctctgcagcaaatttccaatccgccgaactgcccaaagcaccaaattatgcaattagctagtaataggaaagcataaaacaacacaatactatgccaaaaaaaaagagcagtgcaatcgcacgcacacctcccgtacagcccgttgaccatgacgacgaggtgatcggcctcctcattcccggcctcctcctcctcgcggttccccgcgtccctcccctaggcgctcgcctccgcctccgaaggctgcggcaggggaggcgccacgaagcacctcagccagttcgccaggtccagcttcccgcccccggaccttgtcctcgccttgcggccaagcagcaaccctaggtcgaggcggagcccctgcaacggcggcggcggcggcggccatctcgagattccgcggctgcggctgcgccccggccccggcggcgagctcggggcctggcccatcgcggaggcgggcccccggccgcggccgcggcggcgaggcgaggcggaggtggaggcggaggcggcggcgagggagcacgtggcggaggaggggttgagtctggaagacgcgggcatttccggttggctgcgaggtgtgtgtggggcccacatcgacggttccgaatcgcggagaccttttttttggtggaatggacggtggtgattggatggtggattcgcatcgagcggctgggatgcactggggcgtactgggtggttggctttcgcggtcattgaattattgcgtgggccgctacgagatattgggcttgaggtgtattggactcttgggtttggtagtaatgggctaaaggcccatcagagattgatccagtccaattcacaaacgattttgctaaatatttgtcgagtgatttttttcataggatttgacgtttttctagccgcacgatgttttccaagatttgcgcaaaagcagggtcagttgagtccatgaccgagtcaacctgactttgtattgatggatttctgtacatcacgcatatcagtagccatttatttcttcgctctatttctttctttctttttctagttaccaaaatttacaatgcactttgtactaaaattacaatacacttgtactgaaaatacagtgcacttacatgtcatatctactacttttacaaatgtaattttagttataaagcactgtaatttagttataaatgcaacatttaacacttcaaatatctgcacggtttctcaagcaatgtatttatactaaaacgacaaatattctagttaacaaaatttacagtgcacttgtactaaaattacagtgtacttacatgtcatatctactgtttttacaaatgtatttttagttataaaacactgtaattttagttataaatgtaacatttgtgttaatctttactgaatactactgtactaacaagcacaatcacaggctatctgtacttttttttttaccgttggatgcagatatgaggggagaaaaaatttgggtgattttttcttaaaaattacacgacagatgtctagacagtcccattcacaaatgttctctttttgttataccgtacttcctccgtttcacaatgtaagactttctaacattgtccacattcatataaatgctaatgaatatatatatatatatatatatatatatatatataatagtgtctagatttattagcatctatatgaatgtatacaatgctagaaaatcttacattgtaaaacggagagagtagtaatgttttcaacaatagtacttttttaagagagagatagtaggcactgtttgcagcaaatctctacaattatagtattctctccattctaaaatacagtaacttaagatcgtgtagtactagggtatgatcctttcagtcatagattgttatattttagaacggaggtaatactaatttgtacatgttttattttctcaaaacgatgaatatagtatgagtatgaaatccagcccaatttgccactgtttttgctcattgtttaatgctgcatcgatcaacagcagcaggaaacgaacgaaacttcgacgtattcgccgactgatcttttcgatctaagatgtggtctagcacgcatacccacatgaaagcatgtgtagccacttcgtcggtcgtcacagtgcttctacttacacaaaaaccctgccaaaaatgaattttgtaagtgacactgacacactggaaaaccgaaacaaattgaagccagaaaactacccttctccagccgtttacttcagggtgcaaactgcaagttaaattccatcctaggcaggcatgatttgacatcgtcacttgctccatcgatttcccaaaggtgtcaaaccgaccaatggaaaagactcgaataatatacaaactgagacagtactgaaaattgcaagtcaaacaagaaccgggacgtcctgtctcacgcgcggcctgcatgacgccctcaatgtacgtgccccatcacatgcaacgattctgcgtcgatcgattaattcttcatgaactctgattcgatcagtagatctatggtacttccagttgcagattaaatcttaattgtcaacgctgtttgtgcaataatcttcagctcgcatgcgtatatataaacaactgcaatggtaaggtagcctttgaagcctgcaattaaccagttagctagctaagctaggagcgacactggtcttgagctagctagtgtggtcggccatggagtacagctcaaggagggtctcctgctgcgtcgcgctggccgccgtgctgctcctgtcgtcgcgcacgctcggcggcgccgccggcggcgcgccgcggcggctgctgcagatcagcgaggcgcagcagttcgtggtgccgcagacgcacctccgcgcgatctacggcctgcacccgctcaagtggagcagcgacctggcggacctggcgacgcggtgggcggaccagtacaagggcgactgcgcggcggcgtcggcggcgtcggcggcgggcggcgtgaacgtgttccgcggctacggcggcgaggcgtggcagccgagcgacgcggtggcggcgtgggcggaggaggcgcagcactacgactacggcgccaacgcgtgcgcggcgggcaaggagtgcggccactacaagcagatgatgtggcgcgacagcacgcaggtcggctgcgccaccgtcacctgctcctccggcgagacgctcatggcgtgccactacgagccgcagggcaacatcatggggcagaagcccttctgatccacgggctaatcgtaattaggatctacccggtcttgatatgctagttaatatgctttgcattaatcttgatacgtactataatttatctatggttattagttggggctgaattagatcgaagatcgatgctatgatttttggtcgtgcgttttgtttatgccataaggatcaaacctatctcttcgaatatcatcgatgtcatcagctcttagctagttttgttcgattttttcattctgcatgacgccgcttatgagcttatccaggtaatactgggcaaaatgaaaacatacattactccttcacttcaaaagctgatcatccagatgtatccgttttgctctgtgtcttcatgcctcaccggtgtcctatataagatcagccataccaaaatttaaattttaaagttttttcattgaagtttattttagcgttagtttttaaatcgctaaagacgtatccacaaaacttttactataattttttttggcctaattaacagatggaggcttcactcgagaaacgcaaatcgtttcattggtctgagaggctgcgtattccttctattgggccggaagcgcacgactatggcccaaatcccctaaaccattagccttttcactgttttcaccttccgtccttccctctagtaaaaacagttccgacaaaacaatggcgctctagtaaaaaggtcattagatgtaacgaaatgtataagaacttaaccaccagtgagtgtatttacagtgacagtaactcagaaatgcagattgcacacacctgattcctgaaacttttattcagcagctgtacatgcacatctcattccatcatttccatccaggacaatcctgacaaactctgtggtatcctagtgtactgctcattcagtacggcctctcgccgacgacgttacccggcgggtagtagttgcaggtcatgaagacgccgccgtcgtcgcaggcgacgcgggcgcagccgacggaggtggtgccgcgccacacgatctgggtgtagtggccgcactcgcgcccggccgcgcacgcgttggcggcgtacgagtagtcgacgccctcggcggcccagtccttgacggcgtcgccggggcgccacgcgccgccggccccgccccagaagatgttctccccgagcgcgaactgcccctccgggaacgagtggcgcagcgcgcagtcgccgcgccgttgcgccgcccaccaccgcgcgtacgactccagccgcggcgaccacgccagcggcagctcccaccgcgccagccgcaccaggttgtggtagtagaggaactccagcgactccgcccacgcgcccagcgcgccgcacccggcgcacttcgccacggacatgtcgtacaccgtcgcgttgctgtacccgagcgccgccgctgccgcctccttccctcggcggctgccgtcggcgagcagcgagtggacgagaagggtggaaacgagcagagccacgagcagcttcatggcttcgatctcctattggtcgctgtgtttgcaacgaaattgtggtttgggattgaaggaagcagttatatgcggtggctgatagtgtagtgtttgtctctggcacccgtgaccgtgggtgggagcaactgtagtagccatattgatggtatttttgtccacatttttgacatctcgagacatcgtttcgatcatggcttgtttgtttatgcaaatgcgggtttgttttggttatcacaaaggccaccaagactttcacggatttgattctgtgaagaaacctgaaagaatcgttgctgacgagagatcgtcgaacatacggtccatgattgattgctgtatatactgcactacagatttttcaatagttcatcaaaatctgttgatgaaagcttgttctcctcctaccttgttacctgtgagctcgcccgtgacgatgaatggccgcttctagatacttccgtggtcacgcgcgagcttacaacaaggtccagggactccaggcttatgatgaatcggtagcacggccggtcggccgggcggtttgccatagattgcttctgcgcggcaggcggcacatgcatgtggtggccgcaaggccccgcaaacggtgtaacccaccaccgttgtcacaggaggcccggccggcttgtcgtgtactgtgtacgtacgtgtccgcggacatttcggccgcttctgaacttgagagaagttgagatcgatgcatgcaacggctgcctcgtcggcttctgaacctgaccactctgggttttctcttttctgtttctcctttcgcaaacttgtgctgatgcgaacgtacgtgcggcccgtgattgtgagcacgaaagtacgcgtcatgcgtgcggcgggttggaccgtgaccgcggcggacgttcagcccgttctaaaatgctcggcccgtttgacgatttgactggctgttcggtagccggtttcggcttttgagccaccgcgcccaggctcgtgcttcatttgacaggctgcgctcttttttctgtcgtagctgcgagaaagattgtttcgttttccgcgcgtaagtttcccgaactactaaacggtatattttttaaaaaaatttctgtagaaaagttgttttaaaaaaatcatattaatctatttttaaagttttaaataattaatacttaattaatcatgtgctaatggctcaccatgttttgcatatcttcccaatctccttaatccccttctcctcaaacacactcttaatttcgttagcacatcttttaaacggttaaactgtgcattttacatgaaaaatttttatataaaagttgtttaaaaaacctaataaatatattcactattttttatatattaatacttaattaattatatgttaattacgtttctcgttttacgtgtggttaattagccgtttcaaaaatctaaaaaaaaggcagcccttgtacgtactcctcctcaaaaataaaataaatccaattctgaaatcgaattgactcaagggccgtgtttagttgttttggtaaaaaaaattaacgtatacgaacacatatttaaagtattaaacatagactaataagaaaccaaattacagattccgcctgtaaacagcgagacgaatctattaagtctaattaatataccattagcaaatatttactgtagcaccacattgtcaaattatggcgtaattaagctcaaaagattcatctcacaatttacatgcaaactgtgcaattggttttttcgtccacatttaatgctacgcgcatatgtctagacatttggtgtgacggaaaagttggaagtttaaagggaattaaatacggctaagataggatttgttttagatagatggaataggccgcagctagaaatattgcaatttttttgtgaggggctatatttcattgttgccactgagttgccagcggctggaagttgttatgttatgccttagaaaatataatttctttattttttgccgggataaattataagttctttaaacaaacagcatcttttatattgttaagtcattccttttttacaagaatacaacatgagactacaatcagagaaagtacacaaatttactaaacataccactacatatcgacaatgcctatacatgctaagaactaaacaccgcgtcagggaagagaaagagcttgcttccaccgttgctgctttcaattggtttttgccacatccatcgctattctctcttaccgcctcccttggtctaaaggaattattctaccatttaatattggtgtctatgttttgcaatgaggttgaagatggagacagttggacggaactgcctgttacgagacttgagttccttctcaaattgtttgtttggtgtcaatgttgtgtaatgccattcgcggtgcattaaatgacgtatgtgtgatcttaggcagccacgtggtcgtatgttgtcctatccttacgaggatgctcgtccctttgcaaggtcgcgcgagtctcagtgggctgaagaaactcgtcaagtcaaggtgtgagaggaaccatgttggaaaaaccatgccccagtggtcccctcctgagctgccttcatcatcatcgatttgttgttgtcgtcacgggaaatatatggcgagcccgtcaaattttggcaagcttggtggcgtggagtggccactgccacattttctcccgcggctttgggaatgaggaggaggtgacatcgtaacaagaaggagaggtgatgccgcctgatctacttcatggtgagggaagggtgaaggaaagtggcgccgaaggagagagtggccggcgaagagggggatggagagacataaatgggaggggaggtgatttcatatttctttatatttttttgggtgttcagtccaaaatattgttgttccctataaattgataaaatatgaggactaaaatagaaaacaatagagggttggctatgttgcactttataagaaggggtgtgaatcattaacgtatgatgatttaagtgttaactattataaactaagatttacttaaaacaagaaaacttaggagtatttctttttaacgaaatgcgtcatttcactaagggaaaacgaaaaagttatcactgtttcaaaagtcctttggatgggcacagttgagaaacatattcataactaatgtcgtgtagtgccgtgtctagcgcacacaccttttcaagctcaattttgaccgcccaaaacttatcgagtggtaactactactccctccatcccaagctcaattttgaccgtcccaaaacttatcgaacggtaactactactccatccgtcctaaaatatagcaacctataaccggattcgtggtactaggataagtcccatccggtcctaggttgctatattatgggtactaagatacgtcccatctggtcatatgttgctatattctaggacgggggagtagtagtatgaaaaagctgcttttcactttggcgactatcgtgttttcagtgtcgatactgttgtgaagtcagcgctgctaggtcgcttgggctgctagctcggcaacgataaccccttttatgcgatgtcaaagctattgtatcgcttttgtgtttagcttgcggcgatgtcctgtttttgggctccgccgttgttagtagttgtgtaggtaggtttcatgctttttttgtgcggtgggtttcagtcggtttccccccgtgcagttgtatggttttcgggttcgattttccttataaactgaataattttttttctaaatataaaagctgggtttttttttaaaaaaaactactactagtagtgtactagcagaagcccgtgtttattggccggccatgtatggaggaattcccaattttacggcggtaagcccgtgtttacttggaacgagcaaaaaaagggcttgagtacccgtaaatagacgcattcgccaaaagaaccagtggctgataattttccaaatatcacgcagtcataacagcgcacactataaaatatttaggaaatactatgaatgtcattacttacctaaaataaaattgattgggtagaagtagtattctcaagcaaactctcattggtagaaatccaaccattaaaatgttgttatatggaagctttttaaacaaaacaattataaagagagaacgtcagcgataattggcatgcatatattttttacggcagaaagtttcagcccaacccaactggttgtgggacacgcccacaaggggatcgacatgtcagtgagagaacgtcggtcagtttatgggtaagaaataatagcttctccatcacgcggactctttccgtctctgtacataaaagaagggaacgagtagcggagtgaacgcctcgccccgcctattcttccaccatccaaaatcctccaccaagcgcagagagagagagcctcacaccaaacggtgtctcccatggacgacctcgccgtcgcccatcccatcaccagcgtctacttccggctcgccgtcctccctcccggggtcgaccttctcctacctcttccctgacggcgatgaggagaggcagtggttgacctcagacagacgtggctcactcccagccaccgctccttgatgggatgagggggtggcggcaacggcgagtcgtgcctttccggcagccccgtgcccgaccgccagcgtcgtagttgcagaagcgccgccgggagtttgcttgaccgggctcgctctccgccggtgaggtggagacggatttgcacgcgctctagatttgagcgagtggctgtagagcttgtctctggctagatttgagccagcggctggcggagccttcatccggctagatttgagtcgccgggctccctctagatccgagctggtggaggtcgttcggctcgttcttctccaggtaaattacttacttaagagccgataatttctctgatttctccaaagattgcccaaacgcataggcccatcagcccatcaccaatcttgccaccgtgaaatgcacgattccggcctagtataatgctagctgttcttacggattttatcatgtgactcgattgcaagcagaaccacattggcccatgctttttgcaggcctcatttcatcatatttacccgcattttcagcatttctacctcgatgctgtagtgggcttgtagagatcgaggatgtagcaaagcattgcgtcgtgatgcctcatactactatctataaatagtaagcttgtgatggattttttatcctagcaacccaaaaagtgggcggcgtgtagttgtagaaagcgacctcatggagaaaaagacactaccacccaggttgaaatcgctctgaccaatttagtccacatcgttctcttcctcctttgattttgatcttggatagccactactgggtgcatcttttctcctgctcgcgctctctgtgccctgttcatcaccgtgttctcgttttgtgttagtggtgtgtggagtctttgattgctgtgtgtttttaagtttctgcaggatgtctatgttcttgtgggttaagtggggtatgttcaacttggctctttagccatctttgtacatcttcacctgcctggatttctagtatcaactgatgttcttgtaatttctatattgatcattttcagaa

SEQ ID NO: 2557 - DNA, 14099 bp, Oryza sativa
atattaggccattctggttcgtgacacttcacattgcctaaggctggtcctctcctgtgttaactagctattatgcttctgctgctttagtatgcttatgttgggttatagctaccctgtgtgctgctatgtaggaccatgtgccaggttttctgttgtttttctaatgtgtgactagctagtatgcttttgctggtttgtaactaacttgtatgttgctgtgtaggaccttatgtctttgaacatggattattgtatatatttttaatgttgttaagcatttatggttgtattttatcagaacatggaagtctgttgtctccttttggtcgtttcgttacagttttaagagttggcaaaactgatcaggaaaaacacttatggctgatactaacgtgaacctgactataaatattcattggttcttcacatgcaattattgtcctatcagattttcaaatttcttaaaacacatggttttgtattcctgactgtcatatttatatctttattttgtagttatcttgaggttctgcagcgcaacatgccagttcagaatcacgaaaaaataatggaagatgcactgaagagggagttccagcattgcatgtttagtcacgcgcctcctcgtggtatggcctacttttagaagactgtttgtattaaaacattagcctaactgggcctacctattcttgagataatttcttgaagaaaatggattttatcattttccctactctattattgctaagatcctggatttgctcattggttgttgaaagtttggtctaagaagatcacattcattgattgaacctgtccatatgaaaattgacttggttaactgcaataattgccaaaaaatggatttaataattttctctactcaattattgctaagaacctggatattggttgtattgaaagtttggtctaagaagatagatacgtgcattggttgaaacctaatttatatctaggaaaatggcttgttagttggattgaacctctccttatggaaattgacttggttattattggcagaaatgtctttcccatttattgcattggaatttgctcgttggcattactggatcaccttcatgaatttgcatttgcttattggctgtatttgctttgatgaatttggaacttttccttcttttgcagtacacatccagcagagccaagacccacctgaattagagatcaacttgggtattgctggtgatgaaggccccccattgctcccccatggaaatcatgataaccatgcacatgcacttcaccgactcctgaagcttggcattctcgggggacctgatggatgtcttcatgatgtggtctatatctagtagatttgtttctgtgattcctgacttctagaagtgtggtttgtgagtatgactaatatgtagccactattctgggtttagttgagacttgggacatgattaggcactattctggctagtagtagaatgtaagtaagcgaagcatgcctggtgatgattgtagcctatcatcgaagctttggaagttggattcagacttgatctgctgctgctcctttcattgggagtatgcctgaacttccttctcaacaagagatttacttcatttcgattttcagcggagtacttttaaatttctcgcattagtaatcaggcaatgcattaatttgttttgcccgttgatttatatgatcaattaagttgacatgctctaagtctcagttggatgtgctgctctgagtctcagttggatgtgcaggggtttgcgttatgctgttgtggtattttactgtagttgcccaatggtttcactttttcggtaggatgtgtagaattctctttttagcctacgcagttgtgcttgtgacaagtgaagtcttgtaaagttgtaactgaacagcgtagtagttgcttcagtttgtagcacttctttttgttacgattttagtgaatttgttcattttgttacgatttactgttttttccttttctaggcaacctcccaactcctgctcgtttctcaccttgcatgttcgtaagatccggtgctcaatcattctgcacagttctcttgcagtctagtggattatgttccacactttgatttggggtgtgtttagttcacgctaaaattgaaagttcggttaaaattgaaacgatgtgacggaaaagctgaaagtttgtatgtgtatgaaagttttgatgtgatataaaagtcaaatgtttgaagaaaaactcggccttgataatggccttgtttggatcctccgggctattaaatagccctccggaatcttactatttaggattattaaacgtagattaccgacaaaaccgattccataacccctaggctattttcgagacgaatctaatgatgcatattaatccataactaacatggtggcccgcgcagattgcgcggttagcatcattatattttctctcatataatagcatatatgttttctcattatattattcaaatatattaaaatgacaacataattttaaattttgcaataactttacaaaactactaatgtgtaatattcatattatattttatatacgtgttagttattaattatttttaatatcaaattttagttatttgtaaattatatatattcctatatggactctagacttgtcttttaatatttcttttttttaattccaaattttctgtaaattgtatttctatatagactctatgctcttctttcaatattatttattttatatctgaatttttattatttctaattgtatttctatgtggactctaaattcatctttcaatattctttaatttttaatttcgaatttcagttacttcgtaaattgtatttctatatagactctatgctcttcttccaatattatttatttttctttctaaatttttattatttctaattgtatttctggactctaaactcatctttcaatattctttaatttttaatttcgaatttcagttacttctaaattatattcctatattgactttaaactcttcttcccaagtttttcttaatttcgaattttagttatttgtaaattgtatttttatacggactataaactctacttttaattttattatatttattccaaattttagttagttttaaatttctatatagactctatactctacttctaatattccttacttttaattccgaatttctattttttttcttaattgtttttctatatggactctatactctacttctaatattccttatttttaattccaaatttcagttatttcctaattgtatttctatatggactctatactctacttctaatattccttatttttaatttcgaatttcagttatttcctaattgtatttctatatggactctagtctcatattctaatattccttattttttaattccgaattttaactatttctaaattgtatttctatatggactctgccttttctttttctccgattaatgtgaaaatttctaggcgatgagagcgaacgtggaggctcttttttctattcctttaataatataatagattagcggctgattactgtagcatcactgtagtaaatcatggattaatatacctcgttaaattcgtctcgcaaaatagcctaggggttatagaataggttttgtcagtaatctacgtttaacactcttaaatagcaaaattccgtagggctatttaatacccctccggattcaaacaggccaatgttgttggcgcaccagctcggtccctcggtgggctgctctgctctgcaagtccagattgataatgttgcagtctagtggattatgacattatgttcccaactcttgattggctgattccttgtgtctctcttcgtggtgaaaaaaaaaacagcatctgctcaaacatttaaaaatctaattatcaatgatttatcaaatgcttagtttgaaaagatggtacttgtagatttgtcttgaaaagtacggttataagcggcaaatattcatgttcggaatttatataagttaaaattcatggtcggaatttaaaaaaatgaccaaacttattataatcggtaaatatttatgaccctgttgtgcacgttctcttgcaggctgcaaagttcaggtccgtctgctagcgcttgctgctttggtccaatctcagattcgtgctactccggttaccctgctacaaactcaccccagcgacgtagagcccaccgccgggctgctgatcccgtgctcccacggcgcccgcgccaccctactgtacttcagtactctcctcctttcggttgctccttccctatcaaaatgttgccattcatcgtgaacatgagtgcgacttcattactactcctacatcaaaggcttttacaaggagatgcacttgacagtactatggtttcgatcccgacatcccgtattcaatcctcaataaacttataatttcttcttaaatatgtttggagggcgtctctcccttcaaaacttttgaaacaaaatgctttcacagagaccgaccaatggcatggttttcagacttccaatgaatcaaaaatatttcactagcatttacaatgaaagtctttttttttacaggatgagttgaaccgtctgaaaaaaaaaatctttcacagataccgaccaatggcatggcatgggctccagtcttccaatgaatcaaaaaaaaattcacaaacatttacaatgaatttgagagaaaaagttacatgagggatatcctttctgagggattagaatcctctccccattctttggaaatgcctcaaacgtcctaataaattatgtcaaattccttcgaaatccttgtgtacacaagtgtagtgatttcatgccaaccatttaggagtacatcgtaacaagtaataacaatgttccccacgaaaatttagaaaataataataataaagactttaacaacaatttaagacatttgcaaatactgtgatcactttatattgattcttattggcgatgatctttcctcgttgatcagcctcctcgttaactctctctctctttgtctgtacttggataccacgtagttgggtaatactgacaattctcacatttgacttcatcctccagatgtatatcttccaaattgacagccgcgtgtgctagacgttttatgagtttcacaaatttatccttgatctcaaaaccaacaacagtgaccaacagcagattgtagtgcctgaaatcagaatcaatgtgccactctatattgtttttcttgcagtacagtagcttcctcatgacatccgctgctgccaagctgccacaagagtgctctgttacctgtacgcgacgcacgacgacaaattgctttagttgagcatgcccgtaagttttagagacgacacatgtttaattgataatacatataaatatattattccttctgtccaaaaatataagcattttttttaaatagtgacaagccaaacatttttaacttttattattaatagaaataataataataataaatcaatcatgtaaaattgatattactagatgtatcattaaacaaactattataatatacaactatttttatttaaaacatcttagggcctgttcattttgataccattttcaaccttaccaaattttggtaaagttaccaaaaaaaagtggtgacatttagtttgctgccaaattttggtaactatataagaaatcctgccaaaattttggcaatgctaaaatttggtaaggtttttttatggcatcaaagtgaacaagcccttatttttatatatattattggtcaaattagcatctcggagacagggttagaatctaaaaatacttatattttgaaatagagggagtagcaattaccgatatgcgaagctcctttaagaggggtgcagcttctaacacaaacatcgtccaaatgaggtcacattccttgtgaatcttgtccaaacatgcaatcctcagattgcggagaagtggagccagatgtttcgggctttcaggttggaaccagatctgcacaaaaatcagtcaggacgaatcaacaaacgtgacacttcaaacctgaaacagaaacacacgtacgaggaacaaccaattcttttacatgcataccttttcactctcaaaaatcatttgcagtgtacgtatgccggtggcattgacaagaagcccgcttagcttgagagttctgtagttaactgtaccgacagtggagagtactgtccggagctgtggaacatggccaaaaacaagcggaggtagagtccgtgaagggaaccagatgttgttggagacctgaaccagcctcgggagccacttgagatctacggtctcgaagtcgcacgcgtcaacgtcgaggcgaacgagccgcgggtgctccatctccaacgccgccacgttcgagccagctgatgcgtcgcagctgtgcaaggagaggatctccaggttctcgcaggcggcgagcacgttcgccacgtcgttggacccgcgcagcgtcacgctctcgacgcgcagccgcgtgagccccgcgaacgcgcgggggcacccgccgacgagcgacgcgagccgcctcccgttcgcaagcgtgtccctgcccgtgcactcgagggcgcgcttctcgcccctcacgtcgaacgccgcctcgcggaagcgggcgcggccgctcgcgatggcgtcgtcgacggagcggacgatgccgatggactccgccctcaggtagaaccgcacgaggaggcggtcgatggcgtgctcgccgctgcgacgcgcgaggatggctttcgcggcgtgcgccacggcgaggttggctcgagcttctcgggacagtctcgacgtgaaagtgaaaccatcctgatgatcatcatcctgcttctttctgaaggagaggacgtccagtacgatatcgggcagcgcggccgggagatgcctccaccgtttagcgagtatcgctgttcttactgcgtcgcgtaggtcgacacgtttcaggatggagagcaggacgtcgtcaggtagctcgctgagccggtccgccatcgatgcatgcacctagctagctttccacaggaagagatgagattatacttacatacgtacactcgctatcgattcgatgcgaaggtgaagaacggaagatcggaggaagtccggctagagctctctatttaaaggggtacacgtataaggacgtccgtgtcctattcaaattctatgtcgtacagtatacccgattccgcatccgtctcggagattaagtatttctttagagaaaaaaaacgttggaatttgctcccttctcgccttcttggtctcttgtgagatttgggggcatttaactatttgccacttttaagatatgataattaaaaatttatcactcgctatctatatgagtcctcatatattcatgatatgggtctagtggcaaattttttatcaccacttataatacaattggtagatcgatgcagcaataaaaattgggctcgcgcaggaagttacacttaactagtttattatcattttctcttcctttgtttaaatatctttttcctaaattaattatccgatttatgatccggtcataccattgtattcgtttaattaaatatttacaacaaaatatcgtatgattatattttaacaagagaaaaatgtgtgtttcaaatcgttaaaactcaatgttttatatatgataaagatatgtttcagcatgtgcctttatcatgtttcacaaaattcatgcaactaactacaactactatctctcctcaccatccatgtatacatgcatccatttagcgatcttcaaaattatgttcttctaaactatttatctaatctacgatatgcgtgattatattctgatgaaaaaaacaaatatgtttcaatttataacactcaatgtttcatatgtgatagtgacatgtttcaacgtgtctctactgtgtttcactaaaaaaataaatatttcagtgcatgatttcctcatttcaccaaatataacttaatatttcaccgatggttagctgaaatatttgaccgtctaaatttttcaagacataattggaggctcggtttatagtttcttccttgagattttgctatgtctcgtgagatcttgaatggggcgggagcggaattgccacgaacgtgcaggcgtgcagcccatatgtatggtggaacaggatgagatgtacgtgcggtgtgttgggccgtgatcgcgaggaacgtacgtttctaggccgtttgggacaccacgcccggtttcatgctgcatctcctctggtttgtgggcttcagtgacttgtgggcgccgctggcagatttcggcgcgagcatatgggtgacggcctgttaggatcagttttatacggagcatcgacaaacaaaacgaccaacgaatttctgcgccagcatatgggtagccagcaggggcatcttcatcagtgtgataattgcggatctcattttttctatgttatgcttatcaatcaaaatttaaattttcgatcttaaatttatagttgattttgaggtttttcaatcgaagtttattgtaagcctttgcttttatatcgctaagaacacgtatataaaagttttattcgtaaattattttttgtttaccaacgtgacgtttcccttagtatgctatatttgtttttgggctatagatggcaataatgcaggatggcacccactactttgcacccagttgcagcacccaaattacaggcgcagctgacaaagtagtagtagcacgccagaaattagctcagatttaacgcagcacactttgcgcaggttcgatcgaagggattgttattgttactgatcattacatggttcattcaatgtcacatgctccaacagtggctgcatgggggaggaacgagatgaacaacgatgaaccctgcaatttgcgagagcacatgcatgttctgatgttcctttgcctattgtcaaatcggcagggcattaaactagcgccgctgtcttgttgacatttgccacatgacaatgtatatcacagcacagattatcgtgcaaatgtaaggcggaccataggctgcaactatggcctggtttagttaaaaaaaagttatatatattttttttatacatgcatggagcattaaatatagataaaaataaaaactaattgcacagtttgtatagaaatcacgagacgaatcttttgagcctaattagtctatgattaatcataagtgctatagtaacccacatgtgctaatgacggattaattaggctcaaaagattcgtctcgcggtttccaggagagttatgaaattagtttttttttattcgtgtccgaaaaccccttcagatatccggtcaaatattcgatgtgatacttaaaaattttcttttcgcgaactaaacacaccctatatattgtagtactgcaagctctgcccccgaaataatactcaccagatcaccaattgaccgttccttcccttcagctttgacccgtataaactgtgtataagatacgtattggctgcacaagaccagagctgcagaagaaatacagtaaattgtattagtactagtagcgaccaaaggtccaaagctaggtagcatgtggacatgtggtgttcgcagcgacccaaatcacatctgcttcgcgtatgcgtagtctcgtgacgccgtgatgctgcaatttttgctgctagattcgcacagtataattgtactcttcttgcaggcattgtcgcgtatttaactcatcagctgccactgatactactctactccactatacttcagctacgcattcaactcgaccgttttggcgatcaatgcgcgaagtttttgcagctagacgacgccgcagagttagagggggagattaaaaccggttgggtcgcattgcattgcatcggattccaactgaccatgatgcacacacctcagagattcagagtttcagacttcagagagagagagagagagagaggaggcccaggctctgagcgtcttcggtacaggcacatggatgcgccaaatacgtacagtagcactcatttaacaactcatccgttggtcgttttcgctttgcaatactctgccaaccgaccaaccaccaatcagaggcgaccaatctcttcacctaaaagcctcacacacgcagagagagaaaaggtgatttctgtaccacctagccattcttcctttaatccttttcaattgttccattcttgcagcagctctgcataactcacattttgccactgtaaaatgtgttcaaaagtggagtacatagtacacgtgaaatgtgcgagaaggggacggggaaaaaggctcattttgttggacagaacagagtaataacagaccaatcaattagctgatcatatttcattgtagtttccccgatcctaccaataacatcataatatatattttggtaggaaaaaaggtaaaaaagcaaaaaaaaaaagatgttgcagcgtgcagtagaaagaaagaattattttgtacagttgtagtactcttgtaacatcatcatcatcatcatatggcaatgaatgagacagcaagattggttggttgctgcgctgcgtcgccctgccgtgtgccgcggtgctcccggccggccggcagagcggaccaaggaaagaatcggtcaccgtcaccatcaccggcgacggcagcggcggcggagggtgggtgggcgggtagtcagtaggggcgcatgccgacgtagttgccgggcgggtcgtagttgcaggtgatgaaggtgcccctgccgttgtaacaggcgaccatggcgcagccgacgcggcgcgtggcgcgccacatgatttgggtgtagggcccgcacatgccgccgtaacaggtgtggctccagtagttgtaccgcggttgttcggcgagccacccccccacggcttgcgccggcgaccaacccgtgccgctcccccagaacaggttctccccgtacggccccgacaagtgcaccagcgggcagttgccgcgccggaactccgggtaccaccgggcgtacccggccacccgctcgtcccacaccagggccggcaaccccatggccgcccttgccgggttttgctgccccaagaactgcatcctgtagtccccgccgccgccgcggcgtggggtaggcgaccacgacgaaggcattgccgggaagaagaagcccaatgccgaggagagcaagggcaatggcggtggaggacgccatgggaggcaaaatgctgagctgtggatttgcactactgccactaccagtctaccaccaccgcgctagctcaaggccgtatatatggactcgacgttgagagtaaaaaagccattttttagatgatggtgttggggacaggagccatgttcgataatgattgcgccacacaagactatggaaggcaggtctacctaaatgtgcttccgactagaataaaattagcagttcaattatgtgcaggctgcgccgagaggacgaactgattagcttctttgatttttatggaatctcgaactaattatagtagttagttctatgcaggtcagagtctactccagcagtccagctaatttagtcacagcattcattccgttaccgtttggtaattaaaatcgatgccaatttgttcagggaagtctagctctttggatgcaagagcagaggactgaaataaaactgcaccagaattatttttggtgagttggattcatcatgacgaaccgcctgacttggcctgtagcaccgatcgtgccacggcgttttgctctcgaaaagacgctatactacctctttacaactcacattggctgccaaatgacaacacagtgacatacattgatagccagcgcccatcagacagctttcattgctcgaaaagaattactactagtgcgtacagctccattgttaattagtgagtacttaattaaccgcttgtacttcgtttctgaattctgaactatgctgtgaactctgaaagtcaagaaaggaacagtggcaagtgcagcttttgcagttaacaacgattacgttataatctaatcaataaatctcagaggtcaagaggtcagtcgtggtaaaacaccatgtgcatctgggtggtactaatttaagtgatcatcacaacgttgcatttgcgtcgcagatttcgtttattttatggcagaaacagatgccattatcactcactcattcagaactgacctaccgaatagccaggaatatatacgaagaatgtattggcatggtttggaaggtttctgttggtatgtacctactgatgaacaacgtgccaatcactgtctgtcaagaactatgcccaatatgcggcgaaacaaatggagctgatggaaagacttttggcgtcccctgcactagctaaacagaaaaacagcatgacaattttgacattgttctctggagtacttgggtacgagtgataattgctttgggacagcataacaaagaaggatggaagataattgcagggttaggagaagacagctcagtgtcgggtgttcagaatttgaagtgtacagttcagtactactacgaagttgcttgttgtacacattatcacattattgccttgtctgaaccagtgtaaactgttccctcaatggatgtcttgacaaacgctgtaaatgtaaaatgtaagcttgcaactttcagtcgccagagaaaaccaaggccaaacatctcaacccggttggatttacgccttccgtttttttttaaaaaaaactctaaatatgaatctagacaaaagtacttattcagattcatagttagagctttatttttcttaatgacggagagagtatattagtaccatagattatgtacttaattagattaacaataaaaaacaaatttaacaataggctagaacaagtgtactacgtaaatccattatcttttaaaaatagaacaagtgtactacgtaaatccttattgaagtcaactttacacagctttgactaatattttaaaaggtcttcttatgagaaacttgaatatacgattttcctatcataaaacctatactttgcgatgatttttatgcttaaagttaactcttgttaactggtattctctccgtttcacaatgtaaagattctttaacatcaatataaatgtggaaaatgttataatgacttacactgtgaaacggaggaagtacgtattttaaactagcttgttttttttaatcggagggagtattatgcataactgctgcaagacgaccttgcaacaaaattccgttaaaataaccttattattttctccatttggcattttcaccaataaaatgaatgacaagaagtaacaaataatcagcggttcctatacatatacacatacacatatacacatatacatatacatatacatatatatatatatatatacatatatatatatatatatatatatatatacatatatatatatatatatatatatatatatatatacatatatatatatatatatatatatatatatatatatacatatatatatatatatatatatatatatccgctgaacaaaagatccccgtgaacaaattcaacacaaacctgtccaaaacaacacaaaacaaattcaattagccagcaatcactcgtgcacccaaatcacgtctcccctgcacactgtacgtgcgtgcgtgtcgttcacgggctcgatatcgatcacgtcacgtcttttcgctagtacggcctcacgccgacgtagttgcccggcgggttgtagctgcagacgccgtacgtgccgcggccaccggcgcaggtggcgagcgcgcaccccaccgccgtggtgcgccgccacaccacctgcgtgtagtgcccgcacgccgcggcgtcgccgccgcggcacgagttggacgccgcgtcgtacagcgcgcgctcccgcgacacccacgccgccaccacgtccgcgggcgcccacccgacgccgctgccgtggaacaggttctccccgtacggcccgtgcgagtgcaccagcgcgcaaccgccgccggggccgatccgcgccgccgtgtaccgcgccg

SEQ ID NO: 2558 - DNA, 549 bp, Oryza sativa
agcttcatagataagaagaatgttgtttgtacaatctgaaaatacttttttttttgtggggacaatctgaaaatacttaaccatgcgtgggaagcagactcactgatccaatgttagttccacctagcagaaatcctgataagcatgaggattgtgcaagtagacacagcttatcagccattaacttattcagttttataccagtcaggcttagttccgaaaacctgcagtgatgatggctatccattatttcactgcacatctattcccaataggtatcaacagtaattgaacaaatgttagcgaaccttttcagagaggcaagtttggagagaaggctaagcattgtatttccagaaattggattgttgtttcctgtcaaaaatatgaaagtttgaaacataagaatgtttatgaaacatatctgatagtttcaattatgcagagcaggagtaataaaagtacctaaggagagatgtgaaaggacagacccttcatgcagtgcatctgccatcttctgaactgttcttgatgtgatagaacattgct

SEQ ID NO: 2559 - DNA, 3565 bp, Oryza sativa
atccaaataatatatggtgtcttatttgttgaaatgccccaaaattgggggaggtctaatgcgcgaaatgtatgtatcgccgtgtgaacacgtatggcacgccgacaacatgtgtgtcggaaagctcatgcatgtgcgtagggaatccacatgcctttttctttttcaacctttttcaccaccataccatcccataacaaaatgtgaaaaaaacgaaaaggaaaaaaaggagataatattagagagaggaatggagcaacaacagaattgagaagacataagcatgcaattgatatactaaaatgcatgaatgttgagatggatgcatgcatgtctttctctcaacaaaataagtaaatgtatatccacatgaacaaactgagacactgagaactaattaggtaaaaaaaaacctgagaaacgttgagaactaattacagcagcggtacggcgcgtgtgcctaaattatgtaagtatcctgctgaaggcaaaggaggtaaacttaatttggtttcaccagtgcagctagctatcttcgtccatgccaccaccttgacctgcacacgtacgcaccagatcaattacattacaagctagctagagaagtagagatggatgattgctcactctctcgcgcgcaaagataaagtagataccagcggtactcccagcgcggatggagatggaagatcgtcttggaggatgtggcagtggcagtgttacggaaggcgcagcaagcgcaggagtagaagaggatgagaagcaggaggaggacgacgttgaggatggtgacgttgtgccagtggcgacgcagctgctccagcacgccggccttgcacgagtcgcacccgtagcacagcacgccgggggcgttgctccaccggtagcagtcgggctgctgctgctgctgctgggcatcgtcatagtaggtgcacgcggtgggcggcttgcagcaaccggactgcacgggcgtgaggtcattgcggaggtagtcgaggggcgtccaggcggcgagggtgtcgcaggccctggcagccagcacgcaggccagcgccggcctccagtaccgctccgcccgcacgtggcgctgcagccacgacgagtagtcggcgaggcggaactcacggtagggcctgccggccacctgcgtgccgccccctcccgcggtgacggccagcccgaagacggtgatcccgagcagggccagcacgaggagcagcatggcggcgaggtacagccacagcgccgaggggacgtggtagcaggcgcctaggaagccagccagcgagacgaggagggtcacgaacccgatggccagcagcggcgcctgcagcgcggacccgcacggcgatgacccgccgtgagcctgcagccagagccccgcgccgatgatggggacggacgccacaagcgtcaccaggttcaccaatcccaccaccctgttgctcaggtgctgctgctctcctcccgccgctgcccgccggctatacatgctcaccgatcgatcaaatctaacaatgtagtacgtgcttgcaaattcagctagctataatataattaacatatatagctcccatctgatccagcctcctcttcttgtgtgctccggcctccatatatcgacatcgacctacctagctacttgcgcctctgcaacctactatagcgctctgctttaatttgcttttgcttttttactttctttatctactttgctttacttaacgatgatctggaaccgtctctacttaacttttgcgcatccccaaacctctttttttttcttctactggagtaaactatttcaaatctgttttttgcgcgcgcctgctcttcactactactgagatctatctatctcgtatattcgatatggtttaactaagaacaagcatatataacctgcaagatctaccgagacatgaaaagtgagatttttttttgaagtgaagtggattataaactctcgaatagtcgagagatatcccctcgttgcttacattacactcaaagagttaacaaaaaaataattctttttgagaagatgtattagcatctgatatatcactccacaaatatgcatcttaaattcaacttctacgtgtcgcaacaaaaaattaaattaaactacaactagttaacacatattcacaggcatattgttttttcggtgtgacatgtaaagtgaattttaagttgcatgtttgtggagtgatatatcacatgttaatacattttcttatttttttaactatttaagtggcatgcaaataatgatggaacatccccttgagagtttagaatagttcccttttttttgttttctcatttctcgcaagtagggttaaacttttcggtttagtcgatttgatcggatgtcaccgaaataccgaaattttgaataattttagttgaatttggacaaatattaccaaaattcatgaaaaaaaataaaaaaattgaaatattttggccgaaataatatcgtatcagaggggtccgaaatgaccgaaatctcagaaatttcagtccgaaatttccaagcctgctcgcaggtcattcaaatagctatgatatttttttaaaaaaaatagcaaaatgaattaatatatgtgatatatttctctatggacatatggatttaagctaagttcaaattcgacctatacaagtctaaattgtagaaaaacacgtctaaattctcttgtatcgttaacggtttttgttacatcattaacagttgatcgacacaaaaatttaatgagaattcaaaaacatattaatagatagcttcttggatgatttatggacttgtggcctcatggagatgcgattgacagtgtaaaagctaatgagaatgcaagaaagaatggccatgcatgaaaaggtagcgggccaacaaagcttgttggagtccaacttttgcggtatggactgtaggatatctctctctctcacacacacactaccttttgggctagctgtctttattccaggccaatgtaatgtagggcaggacatctttcgtttctttgttaaatttacatatatcggccatcaatgtgcgggtacaataagctgactaggcgggctccaaaaatgtttctgagagcaggtacaataagctgactagacggactccaaaaatgtgccacatcatcatattcctatgtggaggggagagaaacgatgagagagaagcgagcgagcgacaaatctatcgcccggcgatagctctctttcccacgcgctatcgcttgcttgcagcctacctgggcgataaaaaacacgatttgtggaccccactaaccgcggccgatcccttccccaccgtagccgatcaagatcccctttcccctccacccagcgcccgcccgatctccgcccttcccgcgcgatcccgggcgattgcgctcgatctcccgcgcgatcccgggtgatggcgctcgatctcccgcgccgcgcgccatttctttccctcccacacgcaccatctcttcccctctcgagcgcgaagatctcttcccctcctgacacaaatccaccgaaaaaaaatccccatcta

SEQ ID NO: 2560 - DNA, 15159 bp, Oryza sativa
  unsure (1)..(15159): unsure at all n locations
gagcggaagcggaaaacatctaataccatgaaaaactgagtcaacacgataattgttttaatcacaaccatgagtacataggcatgtacatccttatttacaatcgacctgtagaaacaaaatcgagaatcaaataaaaccggtaatagataagattataaaaccatatctctaatcgtgatctattcatttatatacgtatttctttctgaggtgttggattcttttagaccggtataggttggatttgaaccaagattgaggaataattacatgaaaaattattaatatcaaagtatgtcatttaggggaatatcaaagcatgttttagtttgatatactccctccatctatacttttaatagtcatatttctaaatctgaaaaatttatttttgataggcatatttcaatccaacaacctattatcttaatgattttctcagatttaatgcatgactctccatttttccacacaagattggttacatgggcatcgagaaatatatatatatatatatatatatatatatattaatgaatcgcttgtttacgaggaattactagtagcatgtttaaattgatgataagtagaattacttatccttggtctatatgctaagatgaaatatgattatcaaaactagatagagggagtattaggaaaatgcgcatttggtcgaacagaattactattattagagcaagtacaatagcaaactattagccagctacaaatatattttaataagataaaagatgagagagaagagcaacgggctatagatccgtagccagttgcagcacggactccaagacgcaatgtgtgtatgacaggtgggaccatatactaatagtatagtaagtaattattgtatgaattagctattaggggtgtgtttgaggagaaggagattggggagattgggaagatacgtaaaacgaggtgagccattagcgcatgattaattgagtattaaatattttaaatttcaaaaatggattaatatgacttttaaagcaactttcctatagaaaatttttgcaaaatacgcaccgtttagtagtttgggaagcgtgcgcgcggaaaacgatgtgctttctcaccctatatcacacaaacgaatgcagcctagattgacaatagatgaattggagctagtagtgggctatactattatcggcatgttgtgaggaaaggcgtattttcgtgaatcccgtgtttattcagggggtaacgcagagcaaaacagacgccacgcgtcatgtggtgattggtcctggctacgtgtcccgtttccgtcccagttaacttgtgtacgcgaatgaatgagaaaatttgagtctaatttagcaggcagaactaagagagcacggcggcggcggcggcgatggcgcggtggccgtggaggtggagggtgctgctgccgctgcttctccttcactcctcccccgtcttcgcgcaaggtactgcgacccccgctttctctctctctctctctctttcttgcgcggcggcgcttcctcttggccccgccacccccagccccaaatggcaaatactgcaagtgaatcatccatcatacagataagatgaacgcgagactcgtcatctcattccaccacagcagtgttctgcatccatctgcgataccattggatcgtttctaacacaagatatttggatcttagagccacccttggatcctaaatttaacgggaccactgcatcctaaatttgctatttaacatattgatttcatggatcagcaatgccctaagtttcttttcactccaattagcactacgtctacacaaaatggatgtttcctttatgcctcctggtagactaagtatcatttttcccctcattttttcagaaggccaagataatgatccctctactttgttcaaacgagcctcagaaatgatgaacctaaggaaatatgatggatcacttggtctgctaaatgctgtgttggaggttgacccaaatcactcagaagcttacaggcagcgtgcatctgtgcttcgtcacaagtgcaggtaaaaaatttgtgtgtccgttactttagtttataatccattcatgtttgattcacatattttcctcagttcaaagttacttaccagaaaaataattacttgccaccgccagaaagctaaactcccattttctcttgccccaaaaatgtctaaagacttgtaccattaaagaaccgttaagctaatatgcctacttataacattgtcagttttacacgtatgtgtcacctttccgtatcccttacttgtttcaatgtgttttttctgaagtctaggtacaaggaagcggagggtgactatagcaaatacctggagctaaaacctgggagttcttctgtggaaaaggaattatctcaactgcttcaggctcaaaatgcattagagtctgcttatggccaatttgaatctcatgacttctcaaaagtcctggagtacatcaacaaaattgtgcttgttttttctccaaactgcttaaaggtatatttcagaggatagtaggaatcatggacagctaaatatttcatctaattttgtctcagtaagctgcagtactaaagattgatttttcaggcgaagcttctcaaggctaaagcattgctagcacttgaagactactcaagtgttatctcagaaacaggatttattctgaaggaagatgaagataacctggatgccttgttgcttcgtggccgagcatattactacctcgctgatcatgatgttgcatccaggtaaagcgtatctggtattttaggtttggacaagtgcatgcttgtttgtgcctgcacacacaaatgcagtactagataaatgtgctagctttaaatatttgtacagtgatgacaatattaattgtttaggcactaccagaaaggccttcgtctagaccctgaacattcagaactgaagaaagcatattttgggttgaaaaatcttctgaagaagactaagagtgtgagtatgatttctttgtatcaacaaattaggggcttactgcatcatagtaataggatcaaacggtgtgcatgcaggctgaagataatgctgccaagggtaagctacgtgtgtctgctgaggactacaaggcagccctagcaatggatccagatcatacttcttacaatgtacatctttatcttgggctatgtaaggttctggttaaactcggaagaggcaaggaggctatcagtagctgtacagaagcactcaacatagatggagaacttgttgatgcattaacacaggttacattacttgcttggcatgtacagaaatacacatttttctaatttagagttcgtattattcgatgttgaaatttccgtgaaaaaaagaagggaatttcagtctgattgccctgccattaatgttgaatcttggactccttccgcacactgatgccacattattgagcaagttgtgagcatgcagacatgcagtcgcattagcctgtcctgctaattctgtattttaaaccacaagacttgggaaagctgcaactgttattcagaaaccacaaaaaatgtaattcagtatgcacaatcaatgtgttctgattttgtgagtgaataagtgatgcaaaaaaaaagtaatgtatatttgtttggtagtgttgcaccaggaaactaagttatgcaccagacaatgcaattgaattagttgttatagccagatctcactagtctgttacttcatctgcttgttgtatgttaccttctactggttgcagagaggtgaagctaagcttcttacagaagactgggaaggagcggttcaggatctaaaagaagcttcccagaaatctccccaggcaagttttatgtggacctatctcttttttcccctaccctcctaggcaaatgttagggataagtgtgctcatatatcagcatatcttcttttttgtcgtttgaaaacattcatattgctatttgagttcccatcaaataatctgcttatgtggctacgcggtgtgttgatctcattttcttttagatttgggaacacaatatttttagtgtaattgtgctgcaatcaaattatcatgaaacatagttccaaatggatgaaacatctagttttagtcgattggatagacaatatgcgaaaacaattatttgttttttacggtagtcatctgatgatacttttactccccgtgatgtatttctatttgctgcccttctgccagcaatctttgttatccggtttttgcagcgtgggatcgtaggttgcatatatttctctagcacctatgcatgcaatggatgagttgataaaactagatttgcacattactattgttagtactactaataataaagtggggcaccgaagaggaactttatgccaatgtatttatgaataagcaacaggatctcatcaagatcttaaactagcggaaaaggtgagggcggtcagagtatcgaacatgtgtgagccccgcttgacggctgccccttccagcacagttctcaaataatattgatagttacacaaattgcttctcagctatattacaaataggaagttaacttgttgcttccatgtttctttaacatcaggaattgaatccaaaggtcatgtgcttttaatggaatgctttattagatttatctatctagcagacttggtctctgccccttttctgtatttttttggtacaaatgtaacaacggtttgcactgttcatgctcaggacatgggaatccgagaagcactaatgagagctgaaaagcagcttaagttaagcaaaagaaaagattggtataagatccttggcatttcaaagacggcatcagctgcagatattaagcgtgcctacaagaagttggcactgcagtggcatccagataaaaatgtagataaccgagaagaagcagaaaacatgtttcgagaaattgctgcagcttatgaggtatgaataaacaaaattgaaccgtactaagtatttaatgttctatgagatgacattttctattaatatggttaatttaaaatactcatgcattccaagtttctagccctggtgttgtactatgaataagaactagctgaagtgcatttcatccacaaaatatatcatgctagacaccgcgtgtgtccgagagaaaaaagtgtcccaataacataaattctggtcacccatatttagcgataggcatgtttgttttgaatcagatcgacatgctgcagatgccacgcgtgtcttttaacaatgcgcaatcggcaatttgcaggttcttggggatgaagataaacgtgtaagatacgaccgaggagaggatcttgatgagatgaatatgggaggaggaggtggtggtttcaatccttttgggggaggtggtcagcaatacacattccattacgatggtggattctatggaggaggaggattccccgggggcggctttcctggaggatttcagttcaactttggatagaaagttactgtctgtggagttggagtttgtatgtttgtttgttttaggaacgctgataagcttaacaacaggtattgattgtaggcagtcaggccgaccgaccgatcgatcaagatgagaatcgtatacaagtgttgtttaagcaccatcaaattttccttaagttgtatccttccttgggattttctgacgcatatgatccaatcgaaataaactgagccttactgtggagctagctgtttcactttcactagccaaggatttgcgccgaaaccataaaaaccgaaggtccattccatgtattgtgatcggagtcggcacgcaacagaaaaactaacccaaaaaaaaaacttagatcctctgaagaaacatactgaaccactcgctggaccgtctagccatcagtcaaccatgagcgtcatgtctaacaatctccatgttaactgtaacatctggctagctaactttctctgttttatattgtataagaagctttctaaagtcaaacatttttttaaacttagatcaaatctatatagaaaacataataacattttaacataaaacaaatataatatcaaattatatttaataaaattaattaggtgttttaaatgttgctaagcttttctataaaaattattaaacttaagaaaaattgacttaaaaaaagtcaaaatgtcgtatgatatgaaagggagagaggaggtttaaagtgatttggaagtcaagcatgcaactcctcctgagaaatttttatttgatgatcgatcgatgtttgaacaaagtctgaaaatgaatgctcctaatttgggggcctacggctgcaggaggccagggccatgagggagtaggcgagctgcgcagtatggcgctgcacctcttccctcaccatctgtcgcatcacctgcaacatgacacgcgatgccgatgatgatctgctgctgccgtcttggatctcagaagcagctgccagtgccctgggcggcggcggtgccacctcaacctcagcagcagcagcagcggcgccgggcagggaaaggctaaggctcagggtcagcgacggtagtgtctcctgggcctgggcctggatgatggcgggcggcgtgaccggccgatctgcaggctcgtcgtcgtcgttgagcacgacgatgcagtcaggtggaatattaattggatcgggcagcagatcagggtccttggatttgaatttggcttggcggcggaggcacctccggaggttggagttccagtggttcttgacggagttgtcggtgcggccggggaggaggcgggcgatggtggcccacttgttcccgtggcgggcatgggcggcggcgaggagggcatcctcttgcggggtgaaggggcggtgctgcacggccgggctcagctggttgcaccaccgcagccggcacgacttgccggagcgccccgggatggcgccgctgatgatgctccaccggtgggggccatgctgcgccaccagcctcgtcagcagcgcgtcctcttccgccctccacgaccccttcttccttgtcttgctacacatccccatttaccttcacttcaattccctagctagctcccctcgctcgtcgacaatgcaagcgcgctatatatcgcacttcattacctactgcctgcaacgtccgggcaaaattaaagcaagcaaaagtaataagtccattagcaagtaattaaagtatgacgcacgtatgcatacgtgtatgggcgtctggacgatgcgtaggtgcggccatgtcgcctagctagctagctaactcgtatatcgcacgcacgcatgcatgcaccgatcgatcgatgctgtcttgttcctaccaaaacgtacactacgcttactcgatcgatcacgtagtattcgttgattctttcttggtcgctcgatcgttttgggttaattgcaaattgagattatattggtcctagctagcgagacagataacgactacacgtcgatcgtacgcaggtgcgacgccacagggatactgaaaaaggaaaaagtacgtactattggatgcatgcgcttcaaagggagatagagatagctacgtcgaggtggcgagctagattacaagaacacggacggacgatcgatgtgccacgcccgtttgtgagaaaagctaatttaaccagcaggggaaaacggcatgcatgcacatcgaccatgcatgcctaaattacaaacagtaccagaggtaatatataattttctttcattctttaatttataccagcttaattgccgatcgaattcaccaccgggaagttatttgtcaaaatctctttgatgaatggccaatatatacgctatatatagaaacatctttattttttctaactgctaagagaagacccgtatgtaaaaataaggaggtgcccgcttttgtcatccaacgctacagagataaagagagaggggtcgactgatatatgtctattgagttggttttcccttcttttattgtcacatagacgatgtagaccaagaaacaaatcttatagttggagatggacttattcccggctgaaaacacactggcccagcaggccatcgtcttcgctaggccgggccatcctcttctcgcggcccagcaacccagctcccctcctcctccactccactccggcccggcagcgcacgtacaccagctgctcgtgcaaatgcgcaccagcgccgcccgacctcatccggcgccagatcgccccgccgccaaaccaatctttcctcgcggcggcgtttggtcggcgttatgtagggtaggtcccgccggcagcgaggagtagcgggcgcgatgcgtcaccgttctcttgctgctgctgcttctgcttctgcgccgccaccacaaatgccgccctcgttccacttccattggcgccaccatgctgctcgtcgcctctcctccaccaccgcctgcctccatccacctccactgcaacctcctcgagcgtcggcgtcggcgtcggcgtcgctcctcctccagctacaggaccacatcgccagcggccacctctcccgcgctcaccacctgttcgatcaaatccccagcccggacgttcgcacctacaacgacctcatccgagcctactcctcctcctcaccgaccgccgctgcggatggcctccacctataccgccgtatgctccgccaccgcgtcgcccctaacaactacaccttccccttcgccctcaaggcctgctctgcgctggccgaccaccactgcggccgcgccatccaccgccacgccatccacgcgggcctccaggccgaccttttcgtctccaccgccctcctcgacatgtacgtcaagtgcgcttgcctacccgacgccgcccacatcttcgccaccatgcccgccagggatctcgtcgcctggaacgccatgcttgccggctacgcgcaccatggcatgtaccaccacgcggttgctcacctcctcagcatgcagatgcagatgcatcggctcaggcccaacgcctccaccctcgtggcgctccttccgctccttgcccagcagggggcgctcgcccagggcaccagcgtccacgcctactgcattcgtgcctgcctccaccccaaccgcaacagcaagagcaagctgacggacggggtgctcctcggcaccgcgctcctggatatgtacgcaaagtgcgggagcctgctctatgctcgcagggtgttcgatgccatgcctgccaggaacgaggtcacctggagcgcacttatcggaggctttgtgctgtgcagcagaatgacccaggccttccttctgttcaaggccatgctagcccagggcctctgctttctttctcccacttccattgccagtgctctcagggcctgcgcctccctcgaccatctccgtatgggtgaacagctgcatgctttgcttgctaaatctggtgtccacgccgacttgactgcagggaactcacttctctcgatgtacgccaaggctggcttgattgaccaggcaatagctttgtttgatgagatggccgtcaaggacactgtctcctacagtgcgcttgtatcagggtatgtgcagaatggcagggcagaggaggcgttccttgtcttcaagaagatgcaggcatgcaatgtagaaccagatgctgcaacaatggtctcgctcatcccagcttgctcacacctggcggctttgcagcatggaaggtgcagtcatggttctgtcataatccgtggactcgcatcagagacttctatatgcaacgcgttaatagatatgtacgcaaagtgtgggcggatcgatctctccaggcaggttttcaacatgatgccatctcgggatattgtgtcatggaatactatgattgcaggatatggaatccatggactagggaaagaagccactgcattgttcttagagatgaataatctaggttttccaccagatggtgtcacattcatctgcttactttcggcttgcagccattctggacttgtgattgaagggaagcactggtttcatgtgatgggacacgggtatggtctaactcccaggatggagcactatatctgcatggttgatcttttgtcaagaggtggtttcctcgatgaagcctacgaatttatccagagcatgccactgagagcagatgttcgtgtgtgggtagccttgcttggagcttgccgggtttataagaacattgatttaggaaagaaggtgtcaaggatgatccaggagctagggcccgagggcaccggcaactttgttttgctgtccaacatatacagcgctgctgggagattcgatgaggcggcggaggttcggataatacagaaggtacagggttttaagaagagtccaggctgcagttggattgagataaacggctccctacatgcatttgttgggggagaccaatctcatccacaatcacctgaaatatatcgagagctggataacattctagtaggtattaagaaactgggttaccagcccgataccagttttgttttgcaagatctggaggaagaggaaaaggagaaggcactcatctgtcatagtgaaaagctagctatagcctatggtatcctgagtcttagtgaagataagaccatttttgttactaagaatctccgcgtttgtggggactgtcatactgtaatcaagcacataagcttagtgaagcgcagggctatcattgtacgagatgctaataggtttcatcatttcaagaatgggcaatgcagctgtggagatttttggtgacaacacaacgcgtggttcagctactgagctacggattacaatccgaatcttgattttgaattttatagttcgattcaatgattaatttttatggattatcttcaccactttcgttgctttggctctcttttcatgacctgctgaagaaaaatataaaacactacaaaatatttttaaaaaactttaaaattcaaaagcgctttggataatgaatattgttatatttcatgaccctaatcaaccatgtagaaaaaattgacaaatgcaatcaaactttctttattttttttttaaaaaagaaaggtcatagaccagccttatattgaaagccacagtggcaagggtttaggtttctggggttaacagctttatagaacacaaaagcaaaagatctcatggcataggaaggaatagatgacaagcaagcatttaactgtatagctctgccaacatgagataagttcccacattccaagtatctaatctttcctcaaggggtgttcggatctagggagtaaactttagagtttagtccctgtcatatcggatgaatttggagtattaaacatagactacttataaaactaattacataaatgagagctaattcgtgtgacaaattttttaagcctaattaatttataattagcgtatgtttactgtaacatcacataggctaatcatggattaattagactcaatagatttgtctcgcgaattagttcagggttattgaatgggttttatcaatagtctacgtttaatatttataattagtgtccaaacatccgatgtaataggggctaaaaagtcatctaaacagggcctcaagtttctgccataggaatacaaacaaacaaggcatctatttgtagctaaagaactccattgccaaatatttgatttggttgaactggcacatttaccaaaatttcatatcacctaggatattcagtcttacgaaaacttcgacagcataatcaccgaatattgtgcagtgcatatgaactattatatttatgatgtcgtattaccaaannnnnnnnnnnnnnnnnnnnnnnnnnngcaaggctcttaaccttgtggtcgtgggttcgagccccacggtgggcgattatattattaatttttgtgcctcaaatttcctaataaaaatcactccagtcgcatataaaaatttgcaaatccgcctcaaaacccttatatccttttccacctcgaatccctaataaaaatcactccacaactccagtcgcatataaaaatttgcaaatccgcctcaaaacccttatatccttttccacctcgaatccctaataaaaatcactccacaatcacagataattcttttttttacaaatctacctcaaattcctgatctcctttcccgcctcgaaatttaaaaatccgcctcaaatctctaatctccttttccacctcaaatccctaataaaaatcactccacaatcatgtataaaaatttacaaaaccgcaaatccacctcaaatccatgattttcttgcatatcattctgtgagcataatctcctgcattattaatttgggattatgtgtgttctatgtttccgatggacgattgattatagatgttgagtttgtgacaattactcgagtagattaaatattagaaggttgataagtttttgttttttctggcaaaggttgattgtaggtgaaaatgttctggaaaaatcataaacttaaggggctgtttggatgcccacctcaatttaccacagtttttataccaaaggtgtggcaagatgcaaattatgtggctcaaaatttgatggccacacttgtggcaaactttagctaagaaaagagtctatgactagtgggaccaaaagagtagaaaggaccaaaagagtagaaagtgtggcatgccaaagttatagaaacaaaccaaacactagccacatttcgttaaactaacatacctcaagtatggtaaaatgtgacactaaccaaacaggcccttagccacagaaagggctaagctgctgttgccttgaggagcccttgtcgaagaagcagaaagcaaaggatcagccagcattcaactgggctttgaacaaaactgcggggcaggtttgttctgctagattttgtttctttactgtaacattgacaaaccttgcttaagcatttattctgattacaagtattgaacttgaatcatgctttggagtttggagcatttgattgaactccatccgcatattctgcccacctggctagctgctttgctcatgtattggatgggaatttccagttttgacgttcgtgggacatgatttttctcaatcacatactgtacagctgtttggttgcacacttgtactgttgggttgaactgaacatagcaatttgtgccaaaatttatgtccttcctgggtttagttgcctggcttaaagcaggctaacacccctactactacctttttctcctttttttttttatttttagcatcccgggatggctaccacgtaatttcttttacaacatgctccctggttgggcagttggaaccggtagcatgcggttcaagtttggtacctcccaccccatgtgtctggtctccccctacatgcatgccacgcatgcactagcaattttgcaaagggtagctttatctatatgtattttcaaattcattatatatagggagaaaaaaagacaaaattctaaaagatttatattgaaaaactatctaaattttatctttttaacgactaaaatacaatgaatttgagattaagattttacacataagtgtgatgctattttaagtacttgtacaatttttcctagattttttttgataaagtttgttactccctctgtttcaggttataagatgtgttgactttaatcaaagtcaaactgttttatagacaaatatagtaatatttacattaccaaattagctttattaaattaatattaaataatttttataataaatttatcttgggtcaaaaatattattatttttatccaaaaacttggtcaaacttaaaatcaaagtcaaaacatcttataatctgaaacggagggatttgttcgttcgggttgggtacccacctcctccgcacgaaaaacggaacgatccattagcacgtgattaattaagtattagcaaaaaaaattttcaaaaatggaaccgttctccctcttcttttttccatctatgtataaggtcaatataattttttaagcaacttttgtatacaatctttttgccaaaaacacaccatttagtagtttgaaaaagcgtgcgcgcagaatacaatggagaggggttgagaacacagagcaaagagtatagcgaactacaacatccaaaacatcaatagccaatttaatagtaaattcatataatagttatttactatactattaatatctaatatctagtcccgcattccatacgctcgttacgtcttatagtccgtgctgcagctggctacagattcatagcccactgcccttctctctccctttttatatctttaaaatattaaattcatataatagttatttactatactattaatatctaatatctagtcccgcattccatacgctcattacgtcttatagtccgtgctgcagctggctacagattcatagcccactgcccttctctctccctttttatctctttaaaatatatttatagctcatagcccactgctctcctctctccctttttatctctttaaaatatatttactgcccttctctctccctttttatctctttaaaatatatttatagctcatagcccactgctctcctctctccctttttatctctttaaaatatatttatagctggcttatagcctgctattgtacctgctctaatggagtacacgaaaaagctggtgtgcgtctagttacccaataggcacggcatactaaaccatatcagcagcacacgtgtttcaggagtttgatagacaacttattactaagctacaggtgataattatcgcattttgaattacgggacaacggagacacatgaactacatatttttatctaaccttcattaaatttgtaagacaaaacataataactacggagtataaatttaaatttctacggtgcaaaaaaaaaataggcatagcgcagcacagccggactagaaaggagtttggcacaagggacacgttgatttgttggatgttgagaaccacttgtagaggcaagcaccatgaaacttatgcctgcacgtcttgcaagccagccggggaaggctgtggttgctcgtgtgcagaatgctgtaacagattgggcattcctccaccccctcaaactccttgtcaaaattgcttttccaagtgtggatcgcctctgctattgcgccgttctgtacacaca

SEQ ID NO: 2561 - DNA, 9100 bp, Oryza sativa
acctaaccacatttattgcggtttggctgagcgtgtcacgccgcatgtaacgcagtgcagtgcactcgtttatccggtctgtgaccagtcacagaccggtcagatcgcgggttaggtggcgacaggcgatctgacgcacgcctcgccccatcccgtcaggacgagggcttctaggcgctcgtccccagctggagctagcgtgttacctcccagagatggcacgttagtcctggtcagatatatgccaggcttcatcctaaccattacaggcaagatgttgtgtgaagaagggcgaacatgtagattgctaagctgacacgtggtggacaagaatgaccgacgtgacgggtctgacaccggtcatgtcgtcagcagacagccacgattccacgtcgcacctgctcccggcgaaagtggaggtagttgtgggccgtctcatcagaagatgactcggacggcaactatacaaatctccgtccatttatgaaaaggtggggtaagtccccacaaaaaagagagaaatggtgcatgtggtatccccttaagatataaaaggaggacctagcccactgagagaggggactgatttttccagatagggaacccagaacaagggagcggctggctcatactttgtagctccttcatacacagatctcccaaaacacaggagtagggtattacgcttctcagcggcccgaacctgtatacatcgcccgtgtcttgtgtgtttcctgtctcgcgaaccttccacatacagagagcttagaatctcaccctgagtccccggccgaaccggcaaaggggggcctacgcggtctcccggtgaggagccccacgctccgtcaatatgttacttcgcatttatcctaatacatttttttatcttgcagaaaagacgtgttgtcggagtcgtccgtcaagcctgagtggaagagctagccctagaaggaattggagcaggcaagtgacgtaataatataaatgattgttatatttgtaatgcaattaattaagattattagacctgtaattagacttatcatataagattgtgtagtgttctaatattatttgagttttaatataagattattttattgcaaattagacttagtatgacattattgactacggaattggtgcgactcctaggaattgactattgtagtcttaattagacttagcatatacgcacgaaacacttagcatacattactattttagtcttagcatgtaatattatttgagttttaatataatattactttatttgtaattagacttggtatgtaattattgactacggaattggtgcgacaagtagcaattgactattgtagtcttaattagacttagcatatacgcacgaaacacttagcatatacatgactattttagtattagcatgtaatattatttgagttttaatataagattattttatttgtaattagacttagtatataattatttactagctagggttgtataatatacgtcacctagacttagcttatatcacgatttgtaattagacttagcacgtaaggttgtgtagggttctaatgtacgacatttacacttagcatacatgacttagattgttaaaacataaatgtctcgtgacttagcagatgtttcttgtatcaatagatggctgaccgcgatgaggaacagatattgtacgatacaatcgcggagggaagcagccaatactggaatgaagaagaggggaacgaggatccaaaccagtacttgaacgaggaagggaacgtggagagggatgcggaggggaaccagcaggggcacgtggaaagggatgtggaggggaaccaggaggaggaggctagtggtagtcaaccctccgttggacagaagagggcacgcgggcaacgaggtgcagcgaagaagcttgagggtcggcacatcataacggaagtggaagaagatggacgtcctagtgccccggccgaagccgccaagaactatgtacgtcacagcggttgggttgtgcgggataacgtgcctgtcagtacggtgtactggcgaagaacaagggcacgcggagatcatgagagctttgtcccaaattcggagaaagagatgctgtggaccacaatgctcgagacattcacccttcctgcgggtacagaggacaaagtgaaaaggtggactctgaagaaaatggcagaacagtttcagagcttcaagggagatctgtaccagaagtatatactgaaggggcagacaccgaacttcgacacattcccaaagctaagggatcactgggacgagttcgttgcatataagacaggtgaacaagggaaggcgatgatggaaagaaacaaagaaaatgccgccaagaagaagtaccatcaccacttggggtcaggaggctatagcgtcgcgatgtcgaagtgggagcagatggaggctagcttgattgagaggggtatcgaaccggcaacagccaattggccggaacgatcgaagttctggtactatgctcacggtggaacgctcaacccagctgatggctcactggtcttcggctatcagatacaagaggctgcgcgacgactaacagatgcagtggaagcctcctctcagggcacgttccgaccagacagagatagggacgagctgacactcgccctgcagactccagagcatccaggacgaactcgagggaaaggggtgattccttggaagattggtttcaaggaggacatccacacgtacaggagtcggatgaggagcaagagagataccgaggcgaagattgcagacctagagttccgagtatcgagctacgaactcaacatgcaagaggaggtggcaaggaaggttgatgaacgcatggccgcacatcggtcccatgatccccagctgaccattcctcctgcaatggtgagcccgtcaggaaaccgtagcagctgcgcctcaacggggcaggtaggatcacagagcatggacgccatgcaaacacaggacgaatcgacctgtcccgttgatgacatcactcagcggacaccatgtgagctgcatattcctttcaagaacttatcaataaaggtaagatttagccattctgctagttgctgcttatatatgttgattactaataaataatctctcacaacatgaaggtggcgtcgggcatggccatcccaacggacccttcaggtacttaccactgcaggccgattccagcaggatactccaaggtcgaagttgagttggtcaaaggcgcgtacgaggacctcgagctggattaccctggaggagacggtgagacgcatctacgagacacatgccatgccattattctatggcgcaggcggtacatcatcctccctgggcgacaagcggcgtctcgtgcaccatctcctccggctccgccatctcctcctcaggatcctgcaccgtctcctcctcatgctccgccagcaccgtctccacctcaggctccagcatcgactcctcaggatcctgcaccgactcctcctcgtgctcctacacctactcccccgcaagctcctcttccggcaccttcaaagtcaagggcccccccagctccaccgcttgcccacacaagggcaacaaagaaggcgaaagttgacgccgccaagaacaaggacccggggtacgattgcacgcaagaggagcttgacgcttacgttgcatcagaagtcaagagacaattcaagcctcgaagtccagaaaagaagattcctatagaccccagtgtcaggaacttcttcaggggtatgtctgcatctgtcaaggaggccatcaagctatcggactatgagcgaacgctgaagaaagcatcttctggaaagtccaaaccagtccctcagcttggagagcaaccaaaccaggagatcgagccgttggtgaccggtaaagaaatgacgatagaacaatttattactgacaccggtctaactacggatcaattgctaggagtcgcaccaatcgaaaaggcggaagtgaaatacatgtacgaactcggtaaaccgcttgtcaagcctgagctgctgcagtccctacccacacaaatgtacaagttccatcagctgtacatggagatgagcgccaccggtagagagatgatcagagcgaggatcagggacacggacttcttgcaaggagatgacattctctggatcaatttcaggggaatctacgaactataccagctagacgccctcgacgtctctattatgagttgctggattttgtaagtatatcgttcagttagatttcttactatacgtctcctttaattaattaggtccttgtatataagtagaccatagaaaataatatactcccttttatcgttgtagaatggagattcaaagggcccgacggcggagggttttcgatactggattcatcgaccctcggaaagtaaacgtcgcaatgctcgaccaatatccacaagaaacagaggacaatctcgtccatctcctgaaggcgcagcattacaagacgttcatactgttgccatacaacacagagttagtttaattttactgtcttcctacataccaaatttcattcccgtacgaacttgctaagtgtttcatatgtaatgcatcccacgcacattgcagattccactgggtgcttttactcatcgacctggaggcctgcaccgtcaacgtatatgactcaatggataaaaaagagtctacgtttgacaaggttttcgaacttatagacaggtaccgtcataagttcctttgttaattaagaaaatcttgttatgttaattgctactacgaatcatagctttaaactccatgtagggcttggtatcggttccgtcatttggtccgcggcaaatggagagaaagacttaggcggaagttcaaatttcctgtgagtacacatgctctacatttatatttctccgattcaaatacatacaagtgtatattaattagatctctcgttgtttgtcatttatttgtagtgcgcaaagcaaaagcagggaactaacttgtgcggctattacgtgtgcgagtattgccactgccttgcaaaccaaatcatcaccacaagagagctcgatgtacgtacaaataaattcaaaatttcattacgtagcgatttcttgtttaattactaatcaatttcatacattcatatagtttattcgcatgagggataacctgaccacacacaaggaatttatcgcggcggttcaagaacaactcatgggattcatcaacgaagaaatccttgatcccaagggtgaattctactacgacggaaacacaattcaccggtccttagcttctgagctagcagcgagtactactacttcgaaatcgtagctagctaggacatataatggattgtaattaatacatgactacatatgtttctatatgcatgtatacacattttctataatgtaaatatattttgttcatatatatatctatatacatatgcatttgcataacatatatatgtataaatacatatacatatatatatatatatatgtgtgtatgtgtggataatgatagaaagttttataatatgagacggaggaactagtcaactggacgtggatcgatggataattgtggtgcgaagctgttatgtgcggtgcaatataatagtggtagatgcatgtcgatggagtcaaacaagtggactatacatactgatcagctaggtacgtccaataagtcaaaggaagggtcacggggctggtggcatctctcagctggcactaattaattaagtacgagtatattagagtacacgtatatatgcttaattcctgatttatttgctatacatacagtagctagctagctaattaaggtaggcggaacgaacagcatgcaggcacaggctcttgagatgtaattaagtaacgtatctctagctattgcctttgcaatacaaagcttgccgatcctacctcgaggtagctagtagttgttacacttacacatcaatcacaacttcacaggtagatacatatactcctatatagtaatatagtttggatctgcatgcagcctactactactaacccggtttaattaacacaatttattatttactactaactaacgtacatatttctagcgattagcttgcaactaaaagacagatatgtataaatggagatatatatcgtaggagtatcacatcatattctagcatgatgcaaagagatagtactgtagtttggccgacgggattgatatatcaatgcatgcatgcatctgcatggatcgatgcatttgctgcctgtcaagtcaagtcagcctactctggttgagaatgaatcgtatgctactatacttattattattattattattagaatgaattgtactctctccgctttaaaaaaaatcaatcctaagccaggattgttttatttacagagtttttttattgtccttgacaataagcggtaccaaatcgtagccgtcgatctagcgacatcgaacggctgcgattggtccgtactgcatggtaccgcaagccccgattgaggaggtaccgcgagtgggagggtaaactagtacttccacgtccgagctcatccgtttgcggtgctttgatttgcagccctttgggaagaagggctaaaatccaatgcgagctcgccatagttttcgttcgctggccgcaactggtgagcatcgtggacccaaatccattgccgccaggcagcatcagtgccgtctgctgcattgtcgactatcgccgttagggatggatttggaacccacggtggacgccgccaactccgaccgtgccagaagtacaagtccggccgcatcgccagccgccgtcgacgaggggcagagagggagcagcttcccctgggaaaacacctcgaaggacacgcaactttccttcttactgcctatatgctcgattccacggcaaccaaacgcgttcgtcaaagtagaatccacgaagccaatctggtgattcaagacgacccgtactagcagcggcggcgcgacgacaacacactgagacaattcgctcaacaggcgaggatgcgacggtggcctcggtgagggcgtcgatgcgatggcggccgctgcggcgtggatgcgacggcaaggacacacgagttgggatggcggtgagagctcgcaagggacggaaagcaggaggattaagaactacgcagcgacgacatctgacggcctcacctacctttcggtctcccgcagcgacggtgtcgttcctcaccgatggattttttagcccgatcctacccctcctaaaccaacggtcagatttaattggtacctggtacctcatagtaccttctcaagaataggaaaaaagtatactactatacttattgctattactgttactccatgtgaagcccatacaacactaataattatagtgacttgagtagcaccataatattctaagtttaaattttcatagattaagccaatgtgaactgttctccatagatcaagttttactgtgatgtactgaactgttttttttttcgtttttaatttctaggagctgaaaaaattaaggcaatgtgttgaccattcgatgttgatccaacggatggcacaaatccccacaccgcacgacacctcggctaacaactggctgagcgtcaggcaaggcaaaggggtccgtcctataaataaaggaaacagaggctgctcctttatagcttcaaggtctgaaatcttccatccccatccaggactttgatgatctcttctcttgagtcttgatccatccatcacccacaataatcctaatcacaagtgggcgtgagagagagggggccagaaggtcaacctttgatttaattagcaggcaggaattaagaggcagctaacagtagcagtagcacacaatcaagctcaaccctcatatatcccgtgatccattgttcagacctgccttattactagctgtagagatcttaattttattgtaaagcaaagctctcacctttatttataactagctgcccttcccttgcatcctattccttccctgcatcagagcagcgagctcgctctccatcccctgcgtgccatgggcaactgctgcggaaccaagattagctccgacgccatctcccggaacgcatctggtaatctagcttcttcaattcgctctcgtatatatttcaccatctagctagctgcataggacgtactaggagtagatagattcttgattcaagtaaaaaagtaaccgctgagtagtgaggcatgtatgattaggaatggagatgttcgtttgtgcctgcctgcaatttgttgatcattcctaattgcttgagtttgttgaaatcgatcctagtaggttaggtagatcatgccgtttccagttccagttgaactgaaataagcgatcggtttcagacagagacaggacgacgcctgcacatactagtagtatatcatcttgtactaatccttgatggactagtatagtatgaaatcattcacttttgtaactaaatattatggtcatctcaatcaatctgagaaagaagttgttatatagatgaggcttctgcattgtgcggtggcgttaactggttggtaaattgacaatgcatgcgtatgatatgagctcattaattggtggtcaggttcaagaagaagaagatcaggaagcaggaggaaggggacggggctgagcagccgggtgtcgtcgtcggtggcggcggtgaccccacggagcgagggcgagatcctgcggtgtgccaacgtgaggagcttcgcgttcaacgagctcaagacggcgacgaggaacttccggcccgacagcgtgctcggcgagggaggcttcggctccgtcttcaagggttgggtggacgagaacaccttcctccccagcaggcccggcaccggcatggtcatcgccgtcaagaagctcaaccaggacggcttccagggccacagggaatggctggtatggattttctttctttctgcataactcttgattgatatactactgtagtatataataacttgcattttaatttgcaggccgaagtgaactaccttgggcaactgtcacacccaaatcttgt

SEQ ID NO: 2562 - DNA, 13922 bp, Oryza sativa
gggatctttatctaaaattatttttagtcccttgctgtaaatcaatctctccccacaataaccctaaaccctaaagtgaggatatatttgcgactacccacaagtgaggatatagagcatatactacaggttaacgagtctcgtggctttccaagtatgctaaggagtatagattgcatgcactggaggtgggagagttgtcctagagcttggaggggccaattcacccgtggtgactacaaagtcccaacaattatccttgaagtggttgcttcacatgacctttggatttggcacgctttctttggtgtcgctggttctaacaacgacatcaatgtgctgaatcagtcccctctattccttgaacaagttagaggggaggctcctcgggttcatttttttgttaacgggaatgagtataacaatgggtattaccttgctgatggtatatacccagattgggctagcttcatgaaatctatatcacttccacaaacagagaagcataaattgtttgctgaacgtcaagaaggggcaagaaaagatgtggagcaggcttttggagtgttacaagcccgtttcaacattgtgcgctgtccagtgaagaagtggaaacggaagagtgttgggaaaatcatgctagcttgtgtgattctccccaatatgattgttgaagatgagagagaggatgcgatatgtgacattgacctcaatagaattcctaggacatcaatagtcctgcctcctgaagtaacttctggtgataatccatgttttactgatgtgctacgtagaaaatctgctattcgtgcttgttctgtgcatacccaactgataactgatttaattgagcatatttggcgtcggtttggacataggcaacaggcataaacatggtagggtaataagcatgtggtttctttgccttttctttgccgtgtgtagattatatcaattaacccttgtgtctaatttatttcaggaacatgctctgctcagtatgtccaaatcatggtgctgcacttctcaaaggtagcttatatgaactaaatttagtactaggccagattacttacagacacattctaatgattctcttttctttcttgtgatgatttacttgaactaaatgtactcctagttcagactactaatagccacagttcagtatttctcttttctttcttatgatgcagtagcatggtgttttgttattgcttttacctgctaaactcacttttaatttacttgttatgcatctgggcatactgcacactgttacgaaatggtcaatgaaattctcaatttttatgacagtgcaactatttctttgtaagatataccaactgcagaaaaatgcatgtactgattactccttttagtgaggtttcactgaaaagagatttcattgtttcatttattcatcaagtgacaaactactcaggatattatatgtgtttttcttctcccattaggttgatgatagctcaggcaatggtaatatgatgcaatgatcctgctatcaagggtctatcttcgatgaagaaatcagtctatcttcgatgaataaatcattctcacttgttggacagcatatttatatgtacttttgcttaatgccctattgttgatgtgacttttggatctgtaaaccgttatgtttattttgctttatcctctattaccttgtcagttctttggaactacagatatctttcattaccatgtccttttgttaagacttgtgttcggactggcatgatattatcgattaatctatggtatttgagttattgttatgtagtaatactgtcttgtaattgttatactatagagattttggttgatatggtatgtgaatatgctattggcacaactggctacaaagatgcaattcactcttgatcacacacattgatatgtgcatgatataatttactatttgattatgaggtgtagccagccaacagactatctattgtactagtagctgttgagattatgggcagcatataatgatttaatttattccataaataaatcatgacattacagatgaaaactagcatgaacgcatcattagatctacacatgtaaactacgcagaataacatgaacagatcaaatatgcgcagcatattgaacacgtaccgaggtgacgaaaagaccggctgcttggtcgaaacttttcacaggtgtctacgaaggcacgaaacacgcgagcgaagaggaaggcgagccgtcgcgaacgaacagggagcagtcgcgcgaagcgcttcccaaaaaccttattgtcgccttctcccggtgcaggacgtcaaaggcagaggttccggagacctgctctcctgatcgctggtgcacgccggcgagcgggatggagtagtctacgagcgacggcgcagtacagagtaggaggcaaaccctagattgattttcgcattttttgcgtgaagacggtgggtcggtttatatagagaagggtcgcttgatcagggcgcccgcacgatctctactgcgcgtaaccgaaccggataagtcgcgcgtaacttatccggactccacgccgtttgcacgcatcggatttttcggaacgtttccaaaacaaaaacgaatccgaatttgcagcaaaacaaaactgcaaaaggaggctgcatctgcgcaagggtgaggagccaatttttcggaccattcgacgcgtacgtcgtgcacgcgcgccgcctgccctgccaggcgaggcgagcgagcgcgcgcgtgtgtttctcctcttctctccaccacacatgcttcaagtggctaggagggcatcctcccttttaaggaggtccccctctcctagaataagcaaggtggtactaaactccacatgcatgccatcccatgaggtgggcttttgtgattttccaaagaattaatcttcgagtgggctaaggcccattcattaattccaacagtagctggctttagcaaatagctattagtcagcaactggctatactattagccttgctctcagggcggtgccgatgcaggctttggtttgccatagtacgagtattgtgctactggttgctactgcagcgttctagtagtagtccatactggagtacgctgcagaggcaggcgtgacagtaagggaagggaatgagagatcctatcatcaaccgcaggagcagtaacacataatgtatcactagtaccttgtaccttgcagacacttgagaatgaaatactactggaggtgggttagctttacggttggttatttaatttagtttggaacttgatgggatgggatctcactctgctttaatcgcactcgcatcccactgctttgctttctcctgatgcatgatctctttccctctcccctgcaggctgcagctcacagcttgcattgtactagtacactgtactactctactccattggactccaatagcactatcacactcgcatttcatctgattgatacagtacttattcactggagtagtatttcccagccaaagttctctatcagtgcccttaagttatagcattagctaatttgggtgttggtgcctggctagaaggagctactctaggtaattaagatgatggctcctctctgctgctgcctcctgcgcgcgcggcggctcctcttcttcttcttcttcttcttcttcttcttcttcgccgtcgccgtcgtcttgttctcctccgtctccgtcgcccagatacctggtgagtctaataatctctatattttattttatggagttgtgggtcagtgagtgagatggtacgtaatgcgtgggcagggttccagagcatcgactgcgggggctccggcaactacaccgacgaggtcgggctggagtggacgggcgacgaggcgtacgtgggcgggggcgcaggcacgacggcgagcatctcgtccatctcggggcaggggcggcggccttacaggacggtgcggtatttcccagcggacgggcgcaagtactgctacagggtgagcgtgaaggccaggacgaggtacctggtgcgtgcgagcttcctgtacggcaacttcgacggcagcagggtgttcccggagttcgacctgtacgtgggcgcctcgcggtggtccaccatcgtcatctacgacgagtccaaggtggtaacgagggagatggtggcgctggctcagtccggaccctccctctccgtttgcttcgccaacgccaccaccggccaccccttcatctccaccctcgagctccgccctctcaacgcctccctctaccacaccgccttcgaggccgccttcttcctctccctcgccgcccgcatcaacttcggcgcccccaccgccgatcccgtccgctaccccgacgacccctacgaccgcgtctgggagtccgacatggcgcgcaggccaaacttcctcgtcgacgccgcgcccggcaccatccgcgtcgccaccgacaaccccgtcttcgtggcctccggcgagcgcccgccgcagaaggtgatgcagaccgcggtggtgggcacgctgggcgcgctcacctacagactggacctcaacggcttcccgggcagcgggtgggcctgctcgtatctggcggagatcgaggacgacgcggccgccacggcgcgaaggttcaagctctacatcccggggctggccgaggtgagcaagccgacggtggacatcggagagaacgcgccggggaagtaccgggtgtaccagccgggctacgacaacatctcgctgccgttcgtgctccccttcgccttccgcaagacggacgactccgccaggggccccatcctcaatgccatggagatctacagctatatccccatactccctgcctcgcccgacgccgtcgccatggacgccctggcggcgcgctaccagcagcagcagcacagctgggcgcgggagggcggcgacccgtgtgttcccgcaccctggtcctggctcacttgcacctcatccagagtcatcgccatgtacgtacgtcgtcactctttcaattattcccgggcgtttccttccttggagtagtaacgtagtacggaacgggtgcagaaatctttcaggaaacaacttgacaggcgccattccaccggagctagcggcgctcccatgcttacaggagatgtacgtaacacaagcgactgactcgctcttaattccattaattaagctgatcgatgagctctcttctctgacgaatttgcagccggcttgacaacaacatgctgacaggcccaattccggacctcagtgcttgtacaaacctgacagtcatgtgagtaactcaattcaccacttgcacgcacttgcaccaggcttatttctgttttcctttttctatagtatatactccttatgtccatattataaactaacaatattgtcgaattgaaattttcttttgcagacacttagagaacaatcaactggagggcggtgtgccgtcatacctaagcggtctgcccaagctcagcgagctgtgagtcttttatatactgtatgtactactatatatcctagtctaggaacatatataatagtaccatataagtgagagatttgttaagaaaatgcatgctgataattaaattataagagaatcggcatggtatgtataaaatgcaggtacctagagaacaacaggctgtctggagtcattcccagggctctgctaagtagaaccattgttttcaagtgagtgatatatatgatgtatgcctataataataatgaaataaaatgaatggtgaaattaattactccaatatatgcgcgcggcatatgtacgtatgtttgcaggtactcagggaacaagcatgtccgagtggggaagcaagaggaggaggagcggaatgtgataattgggatatgtgcgctgatgggaataggcttgttgcttgcagctgccctgtgctatgcctataatgttagtgttagcgggaggaaacaattacaaggtgctagtgcgggtgggaacagcaagagcaagagcatagtcgtgtccgcggagcagaagaagaaggcaacaccagtagcaggaggaggaggaggagaaatagacaacatgatggcggctatggcagcgcggggtccgttggagttcgaggtgagggagctggaggaggcgaccagcaagttcgcgaggaagatcgggtcgggcgggttcggggtggtgtactacgggaggctgggagacgggagggagatcgcggtgaaggtggcgagcagcaacgagtcgatccaagggaagaagcagctggccaacgaggtggcgcttctgtccaggatacaccaccgcaacctggtggcgttcctgggctactgctgggagcgcgacagcagcagctacatgctggtgtacgagtacatgcacaacggcagcctcaaggagcagctgcagatgatgagcatcagctggctccggcggctgcaggtggcggaggacgcggccaaggggatcgagtacctgcactgcggctgcacgccggccatcatccaccgggacatcaagaccagcaacatcctcctggacgcccacatgagggccaaggtgtccgacctgggactctccaagtccaacaaggccaccaactccaccaccaataccatcaccacccacgtgcgcggcaccctcggctacctggacccgcactactacgtctcccagcagctcacccacaagagcgacctctacagcttcggcatcatcctgctcgagctcatctccggccgcccgcccatcctgctcacgcccggcgccggtgccatggccagcctcgggccctgggccaagtcgcactacgagagcggcgacatcgaggccatcgtggacccgtcgctgcgcggccgctaccgcgacgtgcactcggtgtggaaggtggccgagacggcggtgcggtgcatcgacgccgatccccgggggcgcccgtccatgcccgaggtggtcaaggacatccaggaggccatcgcgctggagatgccgtcctcggagtcggagaggcccgccgccagcttcttctctccgggggcgggggcagccggtgcgcgctcctcggcgacggtgcggtcgcacgacctcgtcatggacaacctcatgtacgactccagcttctgcgattccctcaacctgccccgcacgcccagatagagacatgctcgatcgtctctactcctatttttctgtttaattacttcatcacgcgtaaattacgcggctggtattatctttttataggaggctggtattgtttttcacgcttacatttgctatatcatatttatttctatctacagatattctcttaaattgagctatcattgcaaatattattgtttttcaaacatgatatattaactatgaaatgcagagagatgagaaagaataaacaccatggataaaaataaaatattaatttttaacctgccccgcacatccagatagagaaactcatctttactcctagttttatgtttactttattatattaactagcatcattatattttctctcatataataagcatatgtattttcttaatttattatttaaatatattaaaatgacaagttttaaattttgtactaactttaccaaaatactaatgtgtaatattcatactgtgttttatatacgtgatagttattaattatttttaatatcaaattttagttatttctaaattatattcctatatggactatagactcgtcttccaatatttcttattttttattctgaatttttgttacttgtaaattgtatttctatataaactctaagctcttcttccaatattatttatttctaactctgaattttcattatttctaattgtatttctacgtggaatctaaactcatctttcaatactcttgttttttaatttcaaacttcagttacttctaaatagtatttctatatggactctaaaatctacttttaatttttttcccaaaattttagttcattctaaaatcctatatggattctatatttgtgaacttttgaggtcacaactacgatattttcatgttatggagaccgttggtaccaggggtatatgcgaaattaaagtaaaagagacgtatgcaagggtttatacaggttcgggccccttatctgatatgtaatagccctactcctgttggtcgtagccgatgttgctttatattcatcagaatcacacaagtacaatatttgggataacctatctagttgtcgtcgacttggcgacatagataaccaacacgtagtcgacgacagggtagtctttctcctcgagtacgaactcattgagatcagatatggcgctatatccatcttgtcggcctccgcaggcaccattaggtctatctaggcttatctctgatgtcgatgtttgacggcgtgtgttggtgtctattctgacttgtgtgtcgatcggtctgtccctcctcctcctagaaggtcttgtatttatactcatagatgttctcttgttcaagtagaattagggagaccaatatggatacaatacgagtaatccttgtcgttttcatatagaactctactcgtccttcattatccgaaactctttctatatttgagatatgattccatataagacttgtgtatggtgggtcctgccgagcttagtgggtatgtggtatccataaccatgacaatactcttcttctaatatttcttatttttttaattctgaatttctattatttcttaattgtatttctatatggacttgatacccttcttctaatattctatattttttaattccgaatttccgaatttccgaatttctgttatttctaaatggactctgaccaaattttaatttttctatttttaaattcggaatttctattatttctaaattgtataccggcatggacactagtctctttttcaatattccttaatttatttctagactgtaagagcaaatgtggaggtttttttatttattactttaataagttgttaatagaagatttctactggtagtagtattcctactgtactagagaagtatgcaatcaataatgtacagtataactctgttgacttttgaatgactagcaaagttagtactaactaagtacactaatataaaaaaaagacacacatatgcgcgcggtcagtagtcagagttttgggcttagaatgaaggaacggagtgaatggtggatgggcctttattgggccgtagcaggcagaaggaaagggaggcccagctaagggccgaatgggtcaattcacaagcacgcgggcgggcggggggagggatggattagggtttccttccttccctgtcgtccccgccgctccactcccactcccactgacccgagacgccgccatttccgcctcttcttctcttaaacaaaaagccaacccctcccgcccccgcccccgcccccgcccgctaaaccctaaaccccaaatcgctctctccatttcccgccgcctcccctctcgcgatccatatccatccatttctcttggctctccgcccgatcaatcgatccgcccccagatcgcggccgccggtagctagctgcagctgcagatggatatggattcttcctcctccccggtggacaaggtggatcccgacgagtgcaacggctctaaggcttgcgctgactgccacactaccaagactccgctatggcgaggcggacccggaggacccaaggtgaatatcccattcttcttcttcttcctcttcttcttcttcttcttcttcttcttcttcttcttcttcttcttcttcttcgtttggtttctgtgtagtcgtatgttgttttgatctgatccgagatccgatccatgatcccttcttccagtcgctgtgcaacgcatgcgggatccggtatcggaagaggcggcgggcggcgctcggcctggactcttccgccaccgccaccgccaccgacggagcggagcagcagaagaagactaaggccaagaaggaaaaggcacaggaggaggaggtcaccatggagctccacacggtgggcttccgcagcaaggacgctgctgtgttcaagcagcgccggcggatgcgccgcaggaaatgccttggcgaggaggagagggccgccatcctgctcatggcactctcctcgggcgtcatctacgcctgaacctccaaccgaatcaacctctggcgccatggcaggaagaagaagcagcgattccttcccctctctttttttccctccccccggcgctatggcagtcaccgaagctagctaataatcaatcttgtcttgtggtgtagtagctcttgttgttcttgccttaagctgtaacgacgtctgtaatgcgactctttgtctgtgtctctgtactagtactagtagtagtagtttaccgcctaacattcaagtttggtttctctgcaatgtaacaagagaagaagaagaagaagaagaagaagaaaaaaagagctaaagctggagcttgagcttgagctttggttattgatcaatcatccatcctgtctgttcgtgctggtactgctacttctcggttggttgtgcccctgttactgtgactctatagatgatgatgtgcctgcctgtatttcctcctttgatgcgttggtcaagtcacagaggtcaaagggaaaagccagagccattactactacttgtgttctcatttggcgtatataaagtactagtctacatgatcaggtgttactactatctctacttatagaaagcaactgtgactgatggaggagtcattggccctcttcttttctccaacaaaagttggattaagggctctttgaatcaaaggattgagaaaacgtaggaacaggaaaaatataggattttgataggaatgtaagtgtaaaacagaggattgcaaaacgcatgaaaaacacatacgagaaacctaatacgcgcgccggcaacacgcactcccggcccaccgacgcgtgcgcgatttttcttttttctcgctaacatctatcgtcgttttctttttttcttttttgctttttacgcagtttgatgccgtatgggtaggagaaaaaatcataattagttttactagtgaatagtttcctatttttactagtaatttttaattctgaacttaaaattttttaaatttggacttgaaagttttcaaatctcgaggtgaaagtttttaaatctggatttgaaagttttcaaatcttgagtttaaaatttttcaaatctcaagttgaaagttttcaaaattttcaaatctaaacttgaaagtttttgaatctcgagttgaaagttttcaaatctcaagttaaaaattttcaaatttcaagatgtaagttttcaaaattttcaaatctggacttgaaagtttttgaatctcgagttgaaagttttcgaatctgagttgaaagttttcaaaatttgactttaaaaatttaaatctttaagtcgaaagttttcaaatctaactgaaaattttttcaatctattagtaaaaaaatcttcactttttttttctaattactgtcattagcgttaactaaggggttagttacgcgcgcgcggaagtgcgcgtcgccggcgcgtgcgcacgagctagcttcccccaaacacaggaatgaccgtttgattgaaccgtagaaaaaacgtaggaattggatgagagagatagactcaaaggaaacataccaagaggttgaagctcttgctaaatttcctccaaaatctctataggatttgtccattccataggaatttcaaaggattagatatgattcaatcctttgtttcaaagggcttcataggaaattttccattaggattgaaatcctccaaaattcctatgtttttcctccaaatcaaaaaggccctaaattttggatactcgtggcacgcttttcaaactgctaaacagtacgttttgtataaaaactttctatataaaagttgctctaaaatatcatattaatatatttttcaagtttgtaataattaaaactcaattaatcacacggtactaccacctcgttttacgtgaaacacttaatcttcattttcatcttcaggagattcaaacaccaccattgtgcatcgtcaaggaaaccacagatctttggacccattgtcgaccaaaaatccatcattaaatctttagattttactccttccctcccaaaataacttaacctagaatgggatgtgatccatcttaaaacaacgaatttggacaagcgatcattagatatgcatcgtgattcatgcgctaaggtgcttcttttcctactctgacagcctcttcttctccgataccgataaaagcttaaatttcgacagagtacctatgaattaaggtcctggatgggggttggagggggaaggcaaaagaggaggaagtcatcggacttagagggataaccatgggaggtacctacgaattaggggttctggatgagggttggagggggaaggcaaaagaggaggatgttatcgggcttagagggataaccatgggaggtgacggcggtgccacaccgaagccacgagatcaataggtagtggtatgttggtgttggtggcgggagcaaaacagagcaacatattaagaggcactgagcggtggtggtggctgatctggcgacggggagccatctgaataggggcacctcactattgttggattggaggagggaggagggagtagaccagcccaggaaaggggatgcctccctgtgccgttgacgtcttctgcctagccgacaagaccgggtgataacacgctatgcggaggcaacggtgagaggcatcaagcgtcgttcaagaatgcgacaccgaggggaaaagaaaaaaaatgaaaggaattaaggttgggatatatgcacgaatctcaaagtaatccaacggttaaaaaagtatttattatatctattatattattaaaacagctttgaaaagagacaccatgtttgctgtgggggggttagaaatttccacattaatcggagaaaaagaaaaggaagtccaagtaaaaatacaacttaaaaatagctgaaattcagaattaaaaatagacaatattaaaagaagagtccatataaaaacctaatacaagattaatcaaaattcgaaataaaaatataataaaatctgaaattagaaaagaaaatgagagtccaaataggattgcaatttaaaaataaggaatattgagagaagagtatatataagaacccaatacgagtttaattaatattcgaaataaaaataaaaataaaaataaaatccaaaattagaaaaagaaaagaagagttcaagtaagaatacaatttaaaattaacttaaatttgaaattgaaaataagcaatattgaatgaagaatctataaaagaacccaatacgagattaattaaaattcagaataaaaaataaaataatatccaaaataattaaaagagacttcaagtgggaatacaaacaattttgaaacaactgaaattcaaaaattaaaaataaaaattttaaaagaacactatatgttattaattaaaatttgaaaaaaaaataaattctgaaattagaaaaagaaaaaaaagatttcaattaggaataccatttataaataactaaaattggtgatataaaataaatactattgaaaaaaagaccatctaaaacccatgacgcgataaattaagtaagaggcctataaaggagtagagtagtggcggttaatacgacatataaaaactattagtaaaacaacaaatagaatcctagtaatgattaataggagagacgacaggcatgcagtgaagcagatgggcaaggtggttgctggtacttctagaaagaaaaaaaaaccccattgataattatattcgatttgtaaaatctcaatgacaataagaaggagaagca

SEQ ID NO: 2563 - DNA, 1031 bp, Oryza sativa
gcgtcttttataacgctgatccaactacttctcatccatcaatccttacaatcagcttatctctatggagataggaaaataatagttatgggaagttgatccttaggatcagcttatctctataggagctagtaaaacaatagttgagtcggacatgagtcatatacacagattgtacgtatagcccatttcagaagtagaactaattgcagtcgttatctatcaagacccattatgcatgtccaaaattgagatgttacaaggaatgagcgaggttacagttgggaaagaagtccaaatcgaaggaagggcggaatgcaatggtggaagtagagaagagaggagctacctcggttgcagcttggcaaggaacctgagatcgggctgctgcttctggaggacaggggtgacgcgcgccagcagcgacggcttcttggccttggccgggaacagaaaggactgcaggggcaccttggacttggaggcgacgcgcgtcaatggcagcggcggcggggttgtggctccggctccggctccggctgcaggtccgtcggcgtcaggcagggtgacgcccccgtgctgcagcttcttctcgatctgggcctggaggcccttgacgtggtcctggccggcctgcagctcgtcggaaacccggttgttctcctgctgcatgttgagcacctcgccctggaacttggccgcctggtacgacgtgaactctcctcctcctcctccttgttccagtgccgccgtgatctcctcctgcacgtcgcacagggccgcgaacctgcactgcagctcccctcgcagcatcgcgttctgctccgaccacacctgcagctccgtcttgagcgccctcagctgctgctcctgcttctgcttctgcttggtgtcactgttgccgtcggtggccgccggctgcagctgctgcatcagctcgtcgtgcttgcgctggaactcctgcacccgctgcagggacgagctgaacttcatccagaactcgaggttctcctccagcagcgtgtcgatgt

SEQ ID NO: 2564 - DNA, 1906 bp, Oryza sativa
aacttccaaagcggttagtgcacccatcttatctaattaccatgtatttttttgttctgcattaatgctggagaattttcctgatttcctttggtgctagcaaatgttttatttttatttgaattttgaggtcccaagatacatgtattagaaaagaaatctggacaaccagtactatctgcctctatcgtattccagcttgagtgaattgttctgacttcacagttttaatagtttcctttcgtgcattcaggattcacaatttattttctttagatagcctcatatcatattatgctctttcttattgttcagtatatatccctacttttaatctcttagctatttatttgcccatcaatcaaataacgtttattcttcatagcttataagtgtcctaaattttgatggttgatttgaaggactcattcccacctaaaatgtttcaggactccgataagaaactacaaagagcctagctccttccaaattgaaagggattcttcagcaagtcacagcttccaagagtcatcatctcctaatatgtcaaagtcgccgtcacttcagaaaacacacggttttcttgcattccgtaattcagatgcaaatcataactcacacgaatcaccaaatattcaaagccctccttccgaacaaatggcagaaactaggttacctacagttgcttctgagagagctccatccatcaaaaggcaggacagttttgaaatgaaattgcccgatcttcccaaaattgatgtcccactacaccgacaatcttcaaatacttcagatccagaatcaccaatatcaccactattgacttctgatccaaagaatgagcgctcgcactcaaaaactttcagtcgtcctcttgatatgtttgacaattttcatgctgaggagtcaaagaagcagaaaacaaaagctccatcgttttggaggcttgtagaacttagtcttgctgagtatttttatgctctattagggagtgctggtgctgcttgctttggttcatttaatcctcttcttgcttatacaatatctttaatagtggtggcatactatagaattggtgtacgtgatgtgcatgatgaagtcaataagtactgctcattcattgttggcatgggtataataaccgtgctagctaacttcttacagcacttctattttggtataatgggagagaagatgactgaacgtgttagaaggatgatgttttcaggtatgcctcttctgaaatgtgccatggaaagttccattgcgctatttggttcaataccaccattataacatactcttgattgtttatcacatccatatttaaaataatgtctattttgtgattgtgtgtccatgacactacgcttctatagcacagatgattcggcagtagacatctaacatatccactgcaatcagaattcacatttcttagggaacttacattttctgtttactgtattccagcaattttgcgcaatgaagtagggtggtttgatgaagaagaaaacagtgcagacatattatcaatgcgactcgcaaatgatgctacttttgttcgtgctgctttcagcaacaggctttctatattcattcaggatacagcagccatttttgtggcacttcttcttggcatgttgctagaatggcgtgttgctctggttgccctggcaactttgcccatccttgtaatttctgcagttgcgcaggttagttctcatctattttcaacatttcttcaagctggtaatgccgtaagtctatactaatcttacattttcctatatagatgcatcttatactgaacgcttattacatgctactaagatttacaacgttcttttagctatgtcttggtaacagttgaagttttgaactctgtccaactgggctgcaggaa

SEQ ID NO: 2565 - DNA, 5256 bp, Oryza sativa
aattcctgcagccctctcaatggcaataaaaaagggtggcagcgaacgagccataaaggagtacaatggcaaagccgctgatggtttagcgagacgtctagaaagttaaaaatgaacccaaatgataattatattcagtttttaaaatcccaatgacaataaagagaaaaggtagtggatgggccgtagatgagcataatgaccgtgtttgacgagacttctagaaattataaaaagaaacccaatgagataataaaatctaagattcaatttttaaaggtttcaaggagaataaataaaaatagtggtagatcgagcaagcaaataaagaagaatatgacataagtaaggggtagcagctggtgtaacttttaaaaactatattagaaatacgggatgataaggtttgattttttaaagtcttttgacaacgagatatctacttaataatttttaagtaaaatcatactgaaaaatatataattttgtttgggtgctcgccgcgcaattgcgcgggtcatccagctagttttgttatactacttcgtttttttaatcctttgcaattgtttcggttttgtaactcaacttagcaattgcgtgatacgggtaagataatactagtcgtcagatagttgagaaaaatcaatacttagagtaaattgcatccatggtgcatcaacttggtatgtgggtgtaatttggtacaataacttaaaaaatgagcgttctagtgcaacaacttggtaggtaggtgcaatttagtttaagaactttgtaagtgatagtataaatgcaacaacttgcaaggtagatatgattttgatacaataaattaaaaagttatacggcaacttaattatttggagtattttttatataaattcaatttttaagtacttattttgacaatatagtagcgcggatttgtataagtatatttatatttttatcctaataaataataattgaaagtcaattaaagtggatgtaaaaattattatatttcggttgatatttgagaaggtgaagaaaaaaaaaatcttaaaggtaattggatataaattgtactagaacgcacccatttgtcaagttattgtactcagacgttcaattcccaagttcttgcactataccgcacccacctgtcaagttgttgtactgtaggtgcaatttacactaatacttaatattggagtcgtagatgttgtttaagtcgtggaaaaagaaaattcagaaaaatatcatggaaaggaaaatctgtgggaggggaggggaggggacgaggggacagagaccaaaccaaagcaccatgggctgcccccgtcgccgtcatcaattcatcatattctttctttctaactggagtacactagtgctaacactcttaagactaggggataggagtaataaagtacaagtagtagttgctgttgctaattataatccatactaataatcaaacgacctcccctcccttctccttctccttcttcttcttcttcttgttgcaggtcacatgggatagatagatactccttcctccttccccctctcttccaatcctaatcctaatcctaaagaaagaagttggagaaatctcacggcggaatcaatcccacgcgattcgtcgtcgatctggccacggcactccgcttctctcttctcctctactccagcacagcagtatgagtatgaattaggataggagggagggagggagaggaatagcatagcagcagcctgcaggcggaggaattccgcccgatttgatttggatttgggattcttctctttcgttttcgtgtgttttttttttctttgttactacccttcaattcctccctttatttggggccaagccaaagccaaagcaatcaaccccgatttcacgccgcaagattctcttccttctcatgcaccgcctcttaatttcttcttctttcttggggccagaccccaacccccaatcccttgaccaccaagctcctgcttcttgcaatcttgatcgatagtctcctccatcttcttcgtcaagcctctcctccttggatctttcttactacctaggtttcctggtgcaagtgcaacatggttgggcagacggtcatgcggattgtgcgcccctgcttcaagcccgaccaccagctcgccgtcggcggcaccagggatggattgctctggtacaaggacaccgggaggcacgcttgcggcgacttctctatggccctcgtgcaggcaaacaaccttctcgaggatgccagccaggtcgaagctgcccctcttcttctctcccactcctcctccaccacttttgtcggcatctacgatggccatggtggcccggagactgctcatttcatcgcacaacatttcttccccaatctaaagagtatgttcattcctctatttctctcaatactactactactactacaatctaaagagtatgttgcttccctgcagaatttgctacggaacagcaaactgtttcagttgatgtcattcgcaaatcctatgctgccacggaggaagggtttctcaatcttgtaaggaagcaatggctcatcaaaccgcagcttgcctccgttggttcctgctgtttggttggcatcatcaatgaaggagttctttatgtagcaaatactggtgattcccgtgctgttctagggagacttgaaaggggtgttattaaggcggttcagctgtcagccgagcataacgcaagcattgagtctgtaagggaggaattaagacagtttcacccagacgatccacgaatcgtggtcctaaagcacaacgtttggcgtgtcaaaggccttattcaggtagtatttgtttcactttgatcacttctgtatgacagattgtgcctcaaaatattattccatgtgcaccgcactccggtttattaactgagtgggtgcacaatttgtgacgtttcacaatattgctcacctttaccatataatagcgcaagtactcataccttttgccttgccaatttgtgatgtgctcaggtttccagaacgttaggcgatgcttacctaaaaagtactgaatttaaccgagagcctcttttggcgagattccggctttcagaacccttccacaaaccaattctttctccagaaccatccatagaagtacataaactgtgtacagaagaccaatttgtgatatttgcctcagatgggctatgggagcacctgaccaatcaggaggctgtggatatagttaactgtgcgccaagaaatgtaagatgatatcctaactttctctgacaataattttttttcgtggagttctgaattagtttccatgtcagtcatgtctttatcgttgaaatttaagaagaatcaacattaattgttatgtcagacgtgctgagtttatttgttagaacagcaaacatcctagggatattcaacaacatctgtgctgggtcacacataacatgatgttgcttcagatgcttcaagccatatatttagctctaatggaattaatatcttttgaatttataagttccattcgctgatcagttccttaagttcttgtttcaaaccagattaactgtgcgctttcccctgagttcactctgttttctgaattaattcattgacttatgtttatccagggtttgctttattgttgtgtcttttgatttttgttgtatctttgtagaatcgagtatagtatctcgggcaaagtgaatttgccttgctcaggtagatcttcacatgtctcatgttcatattttgcaaccgtgatccccttttctttataatcgctgcgtgctctgaatgttctgatgctaacatcttgttgctaacttttgccccccaaaaaactgtagggtattgcaagaagactaataaaagcggctctgcgagaggcagcaaaaaaaagagaaatgaggtactcagacttgaaaaagattgatcgcggggtcaggagacactttcacgatgatattactgttgtagtactattcctggactctgctctagttggcaagagattctatggtggcccattactttcactgaggggtggtgatggtgcttcaacgcttacacagaaatgatgaagatcatagaggttttctgagtgaataatccatggtatcttggctggttaaagggtggagcatattaattttgattctataatatgtacggatagacttgtacctttgcatgagctcaggaatgcaaatattgatcatattactcctatgcggttggcgaaacctgggagctgcataacttcaggtaccattgcttaatctttcagtggatgaaactcaagcaatttttttttgaaacatggcttgagatgattatatctcatatccttcctttcattttgcagcatctccctccgcctctcaagtctccgttgtactatgtgctagagagggctttggagagtttgaagctggaggtagccctgtgcaatgagagccggacttgtttgctttcagctttggactttgaatgtatgtccatcttcaccgcggcagaagaaagatccattccatctcgttcattcagtattttcgttctgcggtagtacatatatttatataacagagaacacatgcaagtgagaatcacaattttgattgcagcatcgaattgaactgccctatttgtaaagcgttcctttggcaagtctttggattttgagagcaaattagtgatcgtcatccatcagtttgtcactatgtaaagagttgcagcgatgtgagcaaaatatccaatttatagaatttgttagttacttgctctgcccatttttataggaccattttgatttcaaaaggtcgaaatttgaagattttgaccaactagttagtccatgcatattacggtgcaaaagttagtaaccttcgtcccaaaaagagtacaatgaacatggactagtattggttttataactatcattaagaacatattttatgatgagaagttaatactcaagattaccatgaagactttgtgaaattgaaaatacaccttataatgaggtggttttcacacaagttaaacaagtccattgatgataacaaaaacacattggacgcatgctaatataattacgtggtacttgatgtatcaggatttgtcagcaacggacataggatttgccttttacttatactgcattggtaatttagtggaaggaattactaaactcacccaaaaaaaatggaaagaaaattatgcgtcctaatcatcaatcaacata

SEQ ID NO: 2566 - DNA, 2957 bp, Oryza sativa
catgttagtggcccaatcatgttcaactctctcgacatcggtaattgaggcggtggtggtcttgctagagcggccgtggccgttggcgggcgctggtgcctcctttggacatcacccgcacttgtccttgcacgtcgcagtggcccaatatcatctggcccaataatagcccacacaaccctaggctgcgctagtgtcgtcggtccccatcccattcggccaccgatcccaatctcaatctgacgccgccgccggcatccctgactcaccgacgcggctgcaccaggcgccgccgccgccgcctccgccttgatcgtaaggaagtaagtttggagcaccatggctctgcgatcggcggccggtaggctggcgtcgtccagccgccgccgcctcctctctccgcccaccagcatccacacggccttcctccactcccacgccaccagcttcggtacccttctcctcctaaaccctaccctaccacctaactcttcttcttcttcttgtccaaactccttcctcttggttggttcatcaggatacaagcaagtagctgaagaggacaaaagcaaattggtcggtaacgtcttcagcagcgtcgcctccagttacgatctcatgaacgatcttatgagcgttggactacataggttgtggaaggacaggtttgcttccaatctcctcctcctcctcctttttttcatgtcaggcttaccacattcctcttctctattttttaaggctcatctcaaagcttaatccttttcctgggatgaagcatctagatgtggctggtggaacaggtattcttcctttcttaccttcagcattaacatcctaagatgccatgtaccatgcatagcttactgacccacccgactaaaaacatagccttgctagtcaaaagatattagtgtatttgtgttatgtaactcctctgcatttttttggcatgtctaaaacgtcgatgtgctgtgctgtgttccatgtgctaatatccccatttcctgtgcaatactgcaaattatatgaaatgtgcatcaattaggtgacatgttaatttcggaacttttctttgttctaaaaatgcgcgctgtcctaaaataaggtgattttacacctaatgtttcaattactactagtctgttcatgaatgatatttcaacatgtccaagtaaacggttactcccttctcaaaagaatttatctagttgcttgctaatctcgttttgaaattggaaagtaattcatccaatgactctctatgccttcaggggatgttgccttccgtgcgctcgagagaatcaatagcgtgagccatagagctatgcagggtactcttactgatattgaagaagaaacacaaatctatgtttgtgacattaatccaaatatgctgaatgttggaaagaaacgtgcttcagaaagaggtttggattcatgaaatttcttagcatcatgccacctttatttcacatactgcttctgttgtcccatggttgattttgttttctttttatttcaggatacaaagaaggccattgccttagctggatacaaggagatgctgaagctctgagttttgaggatggatctatggatggctatactattgcgtttgggatcagaaatgtgacacacattgaaaaagctctatcagaagcttataggtcggcccataatattgaactaactgactgtatttatatttgatcatgattttcaaatgttgtgtatgtgtagtatgtttggatcaaatcattagatgtgtccaaagcgcttttcttttcttattaatgtctaatctcagcttctatcaaatgctgttagtttcacatggatttacatgtttcagagtcctaaagcgagggggaaggttcctatgcttggaattgagtcatgtggatgttccgctttttaaagagatgtaagtttctttagccaagtatatgtttcttttctacctaatttagaaacacaggtaggatagtttcatataaggtattttccaagtgtcttcttacacatggtgtaaaataaaagagaaaataacagagttaaatcagttgtgaacaattacatttttagctttcataactggtaatcatttctataaagctatcgttcgtagttctataccaagctatgtattaaagcgttgagggttctaaaaatgaaaatattacttgagatgtctcaatggtttaaaggttcccttcttctggggaaaaagaatatttgatgtttcttcctaccaatgcttgcggaaattaacaattctgaggattgtaaaaaacaaaagtaatacttgtggtgatttgtcagtggacagcttaatccaaccggaaaagtttcccttctgttagaaaatatatttgaagcttcttcctgctggttcttgtggaaatttgacgccaaagtttttggcatagttctgttactaacggagagtgaatctgtacacgtgaacaaagctgtgaccaacatttgtgagaccattagaccagaatattttcagcaggacagtttctgtaaaatatgcatagttactagtagtatttaacaaggagtcattcttgaggcagttaaagttttaaatcaacagaaatagcatatctattatgtgtatatagttgccagttacctttccattgatctattgacaagttgttgattcttttggccttttcttcagttatgatgtttattcattttctgtgattccggctgtgggagaactagtggccggtgatcgccagtcataccaatacttggttgagagtatccgccggtttccaaatcaggtaattctggttctttattatccttgcctacttctgagctgccatgttaggattaactattgacaaaacatggatgtacatttgttgcttagaattttggttctaaaaggctttctactgtatgctatccactccagtataggcaactagaaa

SEQ ID NO: 2567 - DNA, 6414 bp, Oryza sativa
ttggcatccttgttttcctcaaggagcgccctgtactccgccaccaggataaccttcttctcttcttcaaccccttctccttcttgtcctttcttctgcttccgcatgccatcggggtcatccactgcagctggagcttcatcgtcacagcctcccaggtcgtcggaggagatgtgacgcagccgtaccaacgaccctctctcccgcgaacatcctcctgctttctcctgtccaacgtccaccgcctgggcctcctcctgcgtcgctgttgatttacccgcaggatcaacgtcagctgttgatttacccgcaggatcaacgtcatcagatgcagcctccgtctggacctggggttcagcaacatcatctatgcctcctgcatcattgtcctcctcctcctccttcccatccgccactgccaatgtgcctcctacaccaccgtgttcagatgactgcaacatctctgatataccactcagtctgcttatggcttcgctgaagttcgagcggatcgtgctctcgtctttgtggaagcagctttcaagagcctgcactctcaccagctcctcttctagcttcttcagcttctcatttactttatctgggtcactcacattctcttcctccagactctgcagacaactctccaactcgctgttctctcgacacagcctgtctatctgtgagctctgcgatgacaccataagctccaaatcaaccaccttgttaacaagttcatcgatatgttctgtgatttctgccaccgagatgctgccgtccctctcaaaatgttccttgatcttctcgagcactgtctgcgtctcaaattcacccagtttgatatgctgtacctcttccatctcaaagccatgattcttcctcacgtttttatcacaaggatctggagaatccggcaaggatttcccatgcccctccattacagccttgagcttctcacgtagaaccttgactctttctgactcgcccattgcctggctagcagatgtcttccgctgttcctgcagtttgacaatggtgtcttcacaagatttaagggctgttgctgtcatcagtgcccgggcttcatcatcctcaatcaccgcactttcatcaaacttatcttggaaatggcacacctgttcctgcatgtcattgatttgcttctcaagatcccagtactttgcaatgccactctcgtacgagcttttgatgaattctttctcggtctgcatcacaagtatctctttctgtagtctgctgatctcctcccgtgcgttgtccttgtcgattggagctgacgtcgtgttcttgttcatcgaccctgcaggctgctctcctcctttcttcttcttcatcaatccgtcaacagtcgacttgtgaattttacgtggatcgactggggtaaatgccttggggatattgtcatcttcctcttctagcattgcatactgcacttggtcagggaaagctgtcgcgatggtatggtttgctttgtgcagttcccctgaaatgatgtcataccggtcagctagacccctgtacgccctgtatacttcttccacttgagtgatcacctccggccgccttttgtagtacatctctgccctttttgaaaaggaatcagcttcctctccaaggagtaagagcatgcacttcactctgtgttccatatctgcatatatatccacaagaccatttcatgggatcagaaacacaaatttctatgatgattttacagcagataagatttcacatacattattggtttcatagcttcaaaaaggccctaattatgtcacgggtatcaacattattttgttttgctagcaagtataactgcaacagaaactgctgaaaacacaggaataaagctcccaaacaggagaaacagtttcctgatatgacaatattctaaagtaaatttaatatatttttaaggcgattgttttccatctagatgtataatgtttctttgtcccctttatcaggttgcatcatatcaattgtacgcatatgcattcacctcagttctggaggttcaggaatttacacattcgatttggtccaaattgatcctcagtcccattcccataagcaatacatgtttaatcttcagatcaacaagcctaagctgattatgattgtgcagatttacccagaaaagtgaagaggttatgtgtattaatttagagatgtgagatctcgtgctactccaaataagaatatctgtagcctcatatcaagaatcacatggatggaaggcttagaataatttcgttattctccccattgaagaacttctaggattgaacaaaccaacaaatctcccatataagtacatacataactcacagaaatcaaatatatgataaaaaagatcaagattatatattggacggtcaccttggagatggctatcaagccatttggactgcttggtgcggatgtggctcgcccaccaccatgaatacgcattgctcgccgcccgctgcagcatcctgcctcctctgtctcttcctccttcaccttctccaaaatccaaagcattagtctttcctgtgcatgaaaactaacacacgagaacagagaagtggcaaatgaaaagagcaagaaaggaggagggaggagatgccattgagaggctcatagccaagtccattcaatggctaaatatagttaagatggtgagaggttaaaggaaaggagaacacacagcagatgcacaaacatgtacataatagaattgcttaaatgcagataggaaaaataataactgcgctgaaatggcagatcaaatgagacaacaggcacacaatactgctacctagctgtgccccacgatggaatggaatagggttctacttctaaattacttgctatattctttcagaaagaagagcgacatttcatattgttccaaaggcaatctgattaattatcaatcttctcacatgagataaataggtaaaggccatttagaattcatgaatttaatgaaaaaaatatcaagcctctgaaattcctgcaaaattcatacatttcgaacaggcttaagataccagcctatatgttggcaggggatttattttttctctttgaataagttgacatacgccagagagacaagtgtcttccatgcatggaacagtgactctgatgttaaactccctttcctgctcctgtcaaagcggcattgcctcgatgagattattgtggaatctttattgtttcacaataatttgcaacccatgcatgagcactttccaaaactcggagctcgccgacaagtagatctttggccatttcttttctgaatggatgcatgctcctagaggcagggccatcaacaatttcaagttgctgcaatatagaaattaaattagattattcaattttactgtttaattgaagttttgcttcactcaagtctttcatgataatttcaatttgtgtccctatttttttagtatagtatgtattcaaatttttaattggtgaattaatctcccaaacactgtaataatcatgaaatatgattactaacttactatattggaacatccatgcctgagttgtatatatgtgtgtgtgtcttacttcctctgatccaaaatataggtcgttttggagttgtgcacaaagagtaataaaagtgactaatgaatttgatggccttaaattatttttgcattggaaaacatgggcaatttattcatgagagaagcagcatttatgtaacagaaaacaatgcattgaaattctggcatgacttaaatttggagcagaattgagagagctaaaaatgacttatattttggattagagggagtattcgtctttgtcaaagaatgcatgtgtataatttgccaagtgcattcctttacatagccacttataatcgtatgaatatgtttctacttaagaacaatagcaacattgttttcatacataccataaaacataagtgctgacagaatgggaaaatgcaaaaggatatttggaattgtaggttacttttttaatagacaaaactcttgttattcttggtgccctcacctcaatagctgcagaatggccctgaatcatttcagcgaagtgcaagagcaacctgcggtgagcatggatttctctctccatattcttcaaaggacatctggcaagcctaccatcactttcagcagcctccatggccatctcttcgagttctaaagacgttgtaatcatgccattggacatcaacagaaactctttagtatctaacctaaaggggctgtcaggctaaatgcaaaacaagaaaaatatgctactagcatagcacctttaagtgacatggcagagaaaacccgaagaaatgcgcgcagaatcagaggaatcccaatgcctttgctctgagaggatttgacttccctgtttccattctttgaatttaaaatacaagcagagaccattttcttatatcatgccaaagctattacagaatgataactttttgactatttttttcgccgggaaggccgaaggaggccatccgaatgtattaagaaggagtaaaaattacaagaaaaaaacatcacaatgcaccaaggtgcatgaccacacaccacgcgctaccacccaagcacaaaccgctgagggtgaagcctagcaccaaacgacccccgctaagcgtggccgaacgccgctaggcctacggcaacaccacagagacaagactctgaaaacgatgccaccacggtggtcacgacatccaggatgccgccatcgcccatctaaaaaagatgtggttttcacccagagaagctcatcaagaaaggaagaggatacccctcgacaacgccccaaggaggttacgacgcccgaagacgtagccgctgccggcccggtgaaccaccggactaggctttcgcctgggaccctacaaccttgactgcaaatcgccgtccaccaactcagaaccaccacacagacaaatggcaacacgtagcttccgccataccacaccaacgcccctccgtcggccgacttcattgaaccacaccgcactgacgcccctccgtcagccgacatcaaccaccgcccctgagagcaaggttgtcagtatcccgattcgtattctagtatcttacgataatacgatcctaccaagccgaaacgataccgatcccacatagtatcctaatattcatagtatctcgatcatactattcattactacacgatcctacaaaattttaggtggtatcccgattctatgatccctacgatactacaaaatattatttaaaataacatggtttcaaataaataatataaataaatatgctcaaatttatataaaaatcagctaaatatatcaaaaccaacgtggtttctctcgataaatatctctatttgcatgacatatatcattactatatttttttaatatagaatggctatatataattaatataaatattaattaaacttaaaaaaagaaaatcccatagtatcccgatactacaatacgatcctacggtacgatattactttgagtaaaacgatactacctattatcccgatcctgacaaccttgcctgagagctggcccaggacccctccgttccaccacccgctggcctcctcgccagctttggacgaaaggagaacccgggactggatggcattgctttggcagcctaggcttcccccgctgacgagctgccgcctcaatccaacccagaaactccccacagagaaggggaggagctccaagaagggcgagggtgccgacctgtcacaccctgaagttctcctcccaagcctaaaatttaatttataaatgaccctaagaaaatgccggtgcaaatctaagagaaaaccctaagaaagtaatacaaataataatcgaatctggcatgtggaatttttcttgagttctacatgtcgaaagtcactaacaggatttttagtggaattttcagagccctagaaataattttaaccaattaaaattgagcaagcaatattttaattccagggaaaatccttttcttcctttttctttttctttttcccccttttcttttcgagtgggccgccggcccattctccttcctcctctcccctccgctgggccggccgaaggccaaggcccagctaggccggccgcctccctccttccacccgggacgccgacaggtgggccccacctgtcgggcccgtctcctacctcgcgcctgcgccgccgcgcccacgcctccgcctcctccgggccacgtcggtcacgcccgcgcatgcgccgcacctcccgcgcccactcccctctctctcccgcccgcgcccgcgcccgagatggccgggattcgattttcgaatcccgcctatctctctcctctcccactcccccacgttggccggcagaatctcgcccct

SEQ ID NO: 2568 - DNA, 1228 bp, Oryza sativa
aagaatttcgaaatagcgggaaaagatatttactcccggttgttgagaacaaccgaaactaaagatatctttagtcccggttgttgagaacaatcggaagtaaatatcttttctttactcccggttgttctcaacaaccgggactaaagatatcaagatatctttagtcccggttgttctcaaaaaccgggagtaaagatcttttctttactcccgtttgttctcaacaaccgggactaaagattattcccggttgttgagaacaaccgggagtaaagatccaggggtatatatattcccagtgcgccctcgtcttcttcaccaacacttaaacgttttcggccgatcgatctctctcggcctctctccttcgccgccactgcctagggcaaatccccgcgccgacgccgccgtatctcgccgtcgtctcgagctcgtcgtcctcgccgccgcctccgcctcctccgctgccgccgcatctctggggtgagagccgccgccgccagatctcccttcatgcatctcgatctctccgatctcgatctctctccgtcgcgccgcccgccacgagacgccgcgccacgacgacgacgcgccacgccgccgccttcgacgccgcgcaacgccgccgccgcatgccaacgccacgccgccgccgccgtcgccacgccgccgccgccttcgccgccgcgcgcgcaacgccgccgccgccacgccacgccgccgccgccacggccccacaacgccacgccgccgccgccgtcgccacgccgccgcgccaaccgccgccccgatgccgccacaccgccgttaacgaacgagaacgagaacgatcgaacgaacgagagcgagaatgaacacgtcaacgtacgttgccgcgacaacgtgaacgagaacgagaacgatcgaacgaacgtgaacgagctagggaacgtgaacaagcgaacgaacgaggacgaacgttaacatgaaatgcaatatatatatatatatatatatatatatacatgtatatatatatatatatatatatatatatatgtgtgtgtgtgtgtgtgtgtgtgtgtgtgtgtgtgtgtgtgtgtgtgtgtgtcggtgacatgggatcaggagtatcatgactagaggtttgaggcagacacaatcgcacacgtggcctggcacccccgagggacgtcgggcccgagggtgatgtgttcgccctcctcttagtccccccgagggggtc

SEQ ID NO: 2569 - DNA, 3049 bp, Oryza sativa
gacttgcctgtgttgatctgcttgtattagaaccgtagaacttggcatggtgtactttatgaggttactaatggttttgaaaataactacagatattagtgcaagtgcatggtgtaaattccttcgtccggatgcatgcacatgcctctgaagttcttaattgtttattataggatctgaatcacctgtcacctgcaagctgattacaggatctaagcgttgtggctacctcaatgaagtatgactaagtttgggcgaggtgcgcataaatgcgactctgcaattttgtagccaaccattaagattgagccagcgcaagtttttgagagggatgctgggatcaataatagtatgtgtgtttatttgcagcgttgttccaacgaaagtaacaagggtgtacatgtttgcatgctagtgttatttgctacctggaagaaaccaaaccttgcagatatcagtgaacttccagacaacttattattgttttcttctttttttttggaaaaattaacttgtgattcttagattcgtattgagagttaacattgtaaatgcgtagggtgaaacagaaaaattttgcttatggtaattgaatagtacatctcctgtacaatatggagtgtaaaatttactgctaccattttgttagttgctagtattatgcacacgtgtcgcactttttgagatatatttgatcattcgtctaattaaaaaaattgtaattaatacttattttgttgtggcttgatttatcattaacatttctttaagaatgacttatatttttgtttgtttgtaaaaaatattgaataagacgaatggtcaaatgtatgaaaaagtcaacggcaatatatatatatatatatatatatatatatatatatatatatatatataggacactcatatggggcaccatggtgcccgggcaccatggtatctaatgcacaaaatcactcaaatttttcaaaattttcaaattgtgagtatatacctagttataataatttgatttatacctttacttatcaacaaaacaactcaaatttaactttatttcacaatccatgattacatacctaacaaattatatgtatggatgctatatacctagaatcaaaatctaacaaaaacaagttcaaattcagttcaaacttgctttaaactagttagtaaagtagttaatgttaatacctaagtaattgaaaaagtttcatactaatttgaattgggtatatactcaatttcaacaatggtgcccgggcaccatggagcaccaaacaaatttactatatatatatatatatatatatatatatatatatatattaaaaaaaggaggtatttcatgaatgtcagtttggatgaaatcgtaggaaaaacatatgaatcaaatgagagatacagtcaaagaaaattttccaataagttaaacttattcaaacttcccttcacattctccttgtatcgagccatcctaaatggttttcacatgagacagtttattttcttcaaatttttgttaaattcctctgtttcgaagaaggcatcaaatggtgtccaattttatttcaaagggctatcttagaagagaggggaaagaattcctatatgattcaactcatacaagcatcctctataaattatcctttgctccagggaggtagcacaagcagcaatggtcagggtgcattccctttgcctgtccaacagggatcccctgtaatactgcagaggcagtagcaaccgttataccgcagaggatatgcatcatcaatacctgtctggcgctgaacttttgcgtgtagtaattcagtttctcaatattaggctcagcttgtttcacttttttttgagatcgaggttacagaagtatataagcagccaagttaatatgaattaataagatggtaggattagaattacgtactctctcgatcatatatagcctctgcttgcatgcagcaggagtatagtatatagttaagacaaagaaaatgtatataaataagattttgcgattaagtaaggaattttatttaggggccaggcggcaacatgacatacatgagacgctaaggtaggtagctagctagctagcagcaaattaaggacttgcatgcaagctaggtagctagtacatggcatatgtagtggtactggtagctcgttgatcaggtgatgaattggatggagataagtttcttctagttgcagttgcagcaggagcagccgcagctggtgccgcacttgcaggtgttgcagccgcagctgccgttctccgcccccatctctgatcctccggaagcagcaccagacctgcaatcgatcatgcattgcccatgtaatggatatatagtgttcatacttatataaaatctatcgatcggagtatgtataattaatcaagcatgggtatacgtacataccccttgttggttgcatcggcaaggaaggtggtcgtggtcgtgggttccacctcagagtacttgcatctgcatatatcgatcgtcaagtttgaattgcatcgatcgatcgatctgcatgtaatatacgtacccgccgcagccgttgccgcactggcagctggagccgcatccgcagttgccaccgcagcacgacatggtgatgatgatgagagcttcttcttccttctctggccttgtcggcaactagctgctgcttacttgtatggagcttctcagttgctggcctgaggagcaatggcaaccgcaccctgccctatttatagccacccacactacacccacggatcatcagtagtgaatgcaatgcatacgcccgcgcgagagagatcgatgtaggagtagcaagcatctaactgcagttgcagaataatcaacagtagtaaaaagaagaaaaaacaatactcagtagtagctagatcgaccactagaatggatgggattggagatgccgcgcgcactagatagcgatagcagctgccatggaatggaaataaggaacggacgacatcatccgagggaccaccatgcgtcttatctcatttgtctcatccatatatata

SEQ ID NO: 2570 - DNA, 1749 bp, Oryza sativa
aatttacgacgctatattatatacatacagttcgatttgcagtttttattcgtcgagacaccgacggacggatcgatcgatcgatcaaacatcaaaagatataaattagtaaaggtgaatgagtggagcatctgtggagtgtcaattcttgttccccctctatctatgtagatctctgtcaatggctacccctatgatattgcaattactagacgatcgtttacttttacaaggcgtatattgattactagcatgcagcatgggagtatatatatggctgaccatcgctcgcatcaccaaaaagttaaactgcgagcagtgacgaggccgatgataaggatatggagaacgatctctcctccattcttttcctgccccaacatatatattcctcctcataacaacaaaggcaacgcaactttgattccaacagttaaagcatcacacaacaggagcaattgatagatacgtctgcgacaattattgtccatcactaatcacgtactgctaaagctgaaattaacactacacacataaagcagggccagtcacatatacaagagctggaaaacgatcgatccatctcttattattactgcattaaaatttgcatatgcgtggttgctaatactatttttttccaacaagtaagagtagagtgttattcttcttgggggcacagatcaacaacaagtagtatgcagacttcaggtaaggtaattgaggaactctgcagcggttgcgatggctcccccagtgatggcgttcttcaccacgttctgcctgtggctgttgctcgccgcagacaccagtgctcctgttacggcgcctccaaccatcgcgttcttctgctcaattgcatacacacacatcccaaggaaatgcaagttaacatccagatcgatcgtgcacactgcacagacagcagccagtatatattcatgaacagatgagtacattttccaaaactacagatgctttaatcaaactatcacaaaactatatatttaagagtgcgtctgccagatttagtactaaattatcaccaaactacaaatttaacatcaattttattataaaactgtagcttttgtaactttcagaaaaacaacaggctattgatttaaactttaaaatctgtagttctttgataaattcattacaaaatctgtagtttcgtggtacaagtcattaaatttatagttttgtgatgcacaacattaaatttgtagctttgcgatagtttggtccaagtattttgagatttactccgaccaaattaatcaaacaccatatgcgtatattacctagtccctgtgaccacggattctttcgattccatactccatgcccacatatacacccgcaatagtacctgaatatgtgtttcttccattgttagattaacaaaaatacaacacatgcgcttgagtacgttgacagtagtattttgttagttttgagcaaagctgagttaatagaaaatcaagtactccctccgtttcacaatgtaagactttctagcattgctcatatacatatagacgttaatgaatctaaacacatacatatgtctagattcattaacatctaaatgaatatgggcaatgctaaaaagtcttacattgtgaaacggaggaagtaggagattatatatgcagatgagttgattatttaattataccccaatatgcgccttccttgcaaattttcttgagctgcatacatataaattcaggagcgcaagat

SEQ ID NO: 2571 - DNA, 5524 bp, Oryza sativa
atgtattatgtacagcgccaatcttgaggaagccgtcgacggtgcggttgaggaagggatggcccatgtcgacggcgaggtcgaacctcggcgacgtcaggctgccggagaagccgctgtgagccatatgctgttcgttgctcgatcgatctcgtcgtcttctattgtgtatacaatcacaaataatatagccagccaattaagttgaagcagtcgccaactccggcatgcactgcacaccttccgcccgggatcgcttacctcttcaattcccttcctctgcactctctctctctctctctctctctctctctcgcatagtccatatcccacgcaattctttctgtttctgggcacacaagtaggagtaatacgcaacacatgggactcccatacacaacaagatggttcacctcgacaacaaagttttcatgtatttatgcattccttgctggttacctttgcgcaagggcacaagaatgaaacatcacaatatcaaacaaaaaccggcctacactgcctcccaaaaaaaaaaaacaaaaacaaattaagaagatgccctacacaactaacggagatttacacatttccccgtgcttttcttgttttaataatatccgggaatgcaggaaacttggaaaacaaaaccagagactataattccactattcaaaaacttggttcccctctctccaaatgacctctttctaatctcattctcaacctgcgctttcctctcattttcttccttttttcaagaaatgctacactaatagcaaattcctgtatcagcgcttcccaatggagaaagctcccccgtgttattcctgagcaatcacaacagtctgctaagtgacttgataagcagcttgatgttccgccttgtcgcgtcgtcaccggtgaaaccagagatgtctgagctgatactctgcgaagtaaccaaggacgggtacagcaaatacatttcagtctgatgatctgactgagaaataaccaaaactgacctaaagaaagttaaaagagtatatatatgcaaacctcaatattcttcagagtaaagataagggtgaaaatagactgcttaataagatcggtgttctcaggggtaagcatggaagacttcagccttctgcagggtagcacaagaaaagtttatcatcacatttatctttggtacattatataatatgatgcagtgtatatttagagaggtctatttgaatactagtataatcttgtagactctttcataataagaaagtcatagcttgatggtttatatcaaattctccaatttatatcattacttatcatgacttacctcaagcaagatgttataactcatagttgtataaataatatgtattaggccacaatgctttccagaagtaccttaaatcaccggatgcatcagccagacctttagctataatctcgacatccttcaccagatcactatcacgaacctcagaaagcagaggttgaatttcttcagctaatgcttcaatctgttccatcactaacatttaaatggatgagtactactattcaggaacatttttcgattttgcacccaaaaaaaaaggattcggcagagctgcacatatggaggaagtaccacccacaaccttttttttttctttctcaaaagcatgtgacataaacaagaaacctaacaacatatcccccctaaatggaggtcccctctcttgacagtgctacatgcatgccaaccagtgcagctatgtgataggacaaaaattgaccataccctggaacattcagtggtcaaccaacgtctgacttaagtatggacaggatggatcatttttttcttggtatatcatacacaaatagatcatatactttggtacacaaccaatttgaaccatatacaagacataaaaaaaaaacatgccaatagttgagttgtacataaaggcatgaaaacaaatgaatgaaggctgaaaatttatttgcaagtaataatcacgataattacatgatttatggcttcatatgcatgatacattgacatgttaggaaaaactgtcaggtataaaggatgagactccagtggtactaactgccagagtaaccactcttttcaatatttaaaaggtacacaggatcaggaaacgctgttgcacttccaagcatggttacgaaaatttcaccataggggtaaagcatatgaaccatgaaatcttattgagtggcagtgagaaaaaaaataggttgcaaagagatctgattaactaaataggacaaattataaatatttctccggatatggaaactatatacaaaagcagaacgatgagaaaaatgtacccgtgaaagaagaggctgcgcttcttccattattgatgctactttttcagccaacttgtagcttttgtgaacaccaatttcctccatatctcttcctagacgagtaaatattccaaccagtgcgtctaagcttactccttgttgtcctttcatcctctctttgtcacagagaattaaaccttctttggaacagtctgggtcaagaggaccaactgaaggtgtagggagtggatcttttggtgttatatcaatcagtgtctccattagaagaccagactgattcacctcaaccactgaattgcggggcacaataattttatcatcttcaacctatcatacaagagatagcaaatattcagcccagggggaattatacagtaagaaatgcacatatgtagacaataggcaagaccaaaatgaaggtgctcttgttgcccaacttactaaaaggagtgatgattgaaaggtaaactcaacctatttgtgtaactggaaagtatccgtaagagaaccaatgagccctgaagcttagtgaaacagcataaatgcaaattaatgacacattgcattgcacaaactaaaccatggattcttttcagaaagttgttctatgaattaataggcatttagggcaaagtcaatgcaaagtcttgctttcaaataagtcgcacacctgcaacaccaactttatattgaaaatgtgaagtctgagtaagtgagtagtggaaaactctaagcatctaaaaggaggacatgacccctcccatccatgaatcatgaatcatgacaagttacaataccaggaatttgctgttcagattaccagcttaggtaaatcgagtggctacacagccaggttaaaataaactagccagcaagagtaaagatctcagcttttccgaatgaacaaaatttgagcaactaactactctagatccaatattttttttagaaaaaaaaaactactctagatgcaattaatttcagcatcagtaagcaatggcaatcttctttagaaggaaatggcatatatctgcatagaatttgacatgcatgaagcagtcatttgattctgattgattaggttagcatcaaatttcagttgataattagaaagaaggcgaagcagttagcaagaaaatgcgttaaaattaaacacaagaatatgcattgccattttgacaagttacatggtttgagtgccaattgtatgagagagtaatataagtaaggtgataagaagtagtcctatggtgcatgtactagatctgccatcttccattttggtttgttgaaggaatgcaaaaggatgcataaaaaaggaagaggatggtgtaagtagggggtacctcaacataagcatcgatgctcttgagggaagagtcgacgcggacgacgttgccgacggtgacaccgcggatgcggacgggggtgccgacgcaaatcccgcaggcctgggtgaactcgaagacggcttggtacttgcggaagcgggcgcggagctggaatccccggagccaggcgagggcgagggcgagcagcgcggccccggagaccatgaagaggccgacgccgccctcccagacgctgcgcttgccgaagccgtagtcacccagggggtggagcgtgcggcgccatagcgcgaggagcgggttgccgccgccctcggcctcgggtgtgggagaagggtcgcccgaggcggaggcggagcagatagcgagggaattgcggcggcggggcctgggattgggagtgggagcgagggtggtgggacgagggttcgaagagagggcgatgaatgggggagggagaaaggatttggtggtggccatggcgatgatgacgaatttagtggatggatgaatagggggattggaagaggcgatgccgatgcgtcaccttggatgattgagcggttccatcgtcggcgattggaggcggcggatcggaggtctccggcggcggcggcggtggctgatggcgattcgatcctctttggctggacgcccctccccgtctcgtcaactaatcacatcacatcacctccaccacacactcctccaaacctttacacaagatttcacattatttttactattattattttagaaaatatttcttggtgaaagaaaatatactgctaaccttgtgtattaactcatctgttctaaaataaatcaacttttgtatacaaatttagacattatcaacgctctaggagccatcgaatttaggtttgttcattgcaaaccatccaacccagcaaccaaaaccaaatcagtacaagcgggttacactggttttctcggttatagatcaaacatgtacgatttgacaacgtggtggattgaataacggttttaacccaccggctataggtgcggcggaggtgttacttttaatctctccgttgttatagcaaggtcgtctcttctcctccaacaaaacaaggactatttgttattgtctccggtatagttactgtttgttgcatcaccatgtgcacatgttccacgtggttttttttccctctttgtttttgcttgtgcccatgcttcacactctatatatattattactctactttttttaaaaaaagaatggttatatataatagtattacaatactaccatacaattctacgatttgatactactttaaggatactgcctagaatcttgatactaacaactttggtattcctagcaattcaaaacacaatatgacggagcgtggggctcctcaccgggagaccgcgcaggcccccctttgccggttcggccgggggccctgggtgagattctaagctcctagtctgtggaaagttcgcgagaatggaaaaagcacaagacacgggcgatgtatacaggttcgggccgctgagaagcgtaataccctactcctgtgttctggtggatctgtgtatgaagaagctacaaagagctggagagccagagagctcttattctaaaaaccctcttctcccttttttttttctcgtgggatctcctctccagatcatccccccttccagccccctctcttaagtgggcaaggtcctccttttatatctcaaggggataccacatgcaccacttctccttctctctctttttgggtgggggcccatcctatctatagtaaaacttggcttgccttctcttggaagctgaaacactgcctgttttt

SEQ ID NO: 2572 - DNA, 1154 bp, Oryza sativa
ttcctgcagccctggtagtgtatgtagcagtttcctccttaaaacttaagtgtttttcccggtacttgggaggcaccaataggtactgataccacctaatgttaatcttttaaacctcttggcacctcccaagaatccttaggaactcaagataaaaaagttaacttataaaagtttgcagaagggaatcagttttttttagacgtatgagtaacattataatgcttattgattattttgctgttccatgttattgattgctgctcataaagtttgaatttagaatggtcaaacctcctcccgagcttgcagtttctgtttgtcaagctagtacttttttttttctgttgttagatgattcctaattatattctttctttcttttttaagtggtggccatattttgtcagtagcatttggcagcaacatacctgctcggttgattagcttattttgcagttaaaattagattcttacagccaatattctggcatataagaactactgagaaggatttggatgaagaatcatgaagatacagctaatcgtaaccaatctaaaaatttttcaagttcaacttttgttttaaataaaaatgaaattagctaattttgtttctcctcgcccttattaactgcttaaagtcagttacctctgtggtgccctgtggaatgagctgtttaaacaaactagtattattgagttctatcctctctgatctgtagtttcctcatgcagatgtgtgatatgttgttttctcaattatgtctgagactgccatcttcaaatgtgatgcatatgggtgggcttcaatcccttggtcaactttttggttgtacaactaagaacatcgagagccatctggaaactcttgcgtcgcatcaaaatgttggaaacaagaacttttgcaggagtgagacattgcaagacataagcgtaaatcaaactgctcaaaccactttactctccgagacatcaatggcagcactacttctgagaggccttgcgatagctcctatgcagcttgtagcacgcgtaccaacttcattgtttttctggccattgatgcaacttgaaggggcagctagcgatgatattgcattgggtattgctgttggtagcacaggtagaggcaatctccctggtgctacgtc

SEQ ID NO: 2573 - DNA, 6142 bp, Oryza sativa
agctagcatcccaaggtggaattagtggagatgaagaaggactaaaatgctcttattgaaaaaaatagtaaaagtgataggtaggtaaagggtattgaagaaataaaacttctcgttttacacactgagagtaggtaggacaaaattcatactctagaagttgagttttttttacggagggagtatatcttatggtactaaactatataagtttatagaaactgataggtaaagtttgaaatgtttgacataaaagaaacctaaaacgataaataatttgaaatggatggagtactgtattttcatgggaaatggagcttgtagactagtagaaatagagtctcgatttaaacctgaattttgaatagaaaatggcccacgcaatagtgtaccaatagtaagctagagaaacccaaggtaaatatggttgaagttgaaagtgtaccaaacacaaccttgtacaaaactgcgtgcggtgcataattaatcaagccggtgatgccaagcgtgcaccgacaaccagtttgtttcttattttaagaaaatcaacacggtcgtctcagatcgcatgtttgatccgtgttataattaattaaggggttagctagctcattaattaacaaccgcttgtttgcatgattgttgcatcccctgtacaatatactccaactttatcatattttaacaaaacaattagtagtattacttagtactaaggcactagtagtaattatataccatcagatatatagacagtactttgatggacttaagcattaattaagacatagtagtacttaaaaagatgtaatgatcttaaacgagctcatcggctggcgcggctcgttttgaacatgagtttgagctggcctaactgtttagaataaaggtcacatccacgttgacaagtcagaaaagggtaaaaggcagctgcgcggccaagattgcaatcaaattaaggttaaaactggataaactctcccaggctccctcaaaaatcatacagtactatttcagtggctgcaatgttttaatttctagtagcaattataagtggatacgatgttcggtttcaaaaaaaaaaagtggatacgatgttatatacagtagtgttcctgtctgaatagcgattttttttttgaaataatgaatagcgacttttccgacctgttttggcgcatgatgccaattcaattggtgtcaccggagtaggttccaaagtttacctccccagaattattgtaacaccactaatgtatgtgaacacacatgtttttatagactcgttagaatttctactagtatgacgaagctagaaattcttgtgggaaaatgtccgttttgagaatatacgttcataagtctggaaacaatcctaactaccggaagaaaaaagggtgaatgttaaatagacttaacgcctttattaattaatatttattattacaaaaaggcacgcatggtagttgaagaagaaatcagtgtagaaagcgaagactaaattgaggaaggcaagtggtttgaggaatgctacgagcgaaaagatttggagtataaataaacagagagcgatggagccggtcgttccaagctgaagcctccactcacttgctctgcccaccggcgccggcgccgtcgccgccctatcctgtcctacctatggggcacggcctgagctgcagccgcgacaccgacgagtacgacctgttccgcgcggcgcagctgggcgacatccacgccctctccgccctcctcgccgccgaccccgcgctcgcccgccgcgccacagtctacgaccgcttcaccgctcttcacatcgccgccgccaacggccgcctccaggtactgtccatgttgctggatcgcgacggcgacgtggacgtcctgagccgcaagaagcagacgccgctgatggtggcggccatgcgtggcaacaccgagtgcgtggtcaggctcctccgcggcggcgccaacgtcctgaccttcgactcgccgcgcgccaggacgtgcctccaccacgccgcctactacggccacgccgagtgcctgcaggccatcctcggcgccgcggcgcaggcgcagggccccgtggccgcctcctggggtttcgcgcgcttcgtcaacgtgagggacgagcggggcgccacgccgctgcacctggctgcgaggcacgcccgcgcgtcctgcgtgcgcctgctgctcgacaagggcgccatcgtgtcggcgccaaccgccgtctacggattccccgggagcacggctctgcacctggcggcacgcgccggcagcatggagtgcatcagggagctgctggcctggggggcggaccggctccagagggactcggcggggcggatcgcgtacgcggtggcgatgaggcgggggcacagggcgtgcgcggcgctgctgaacccggcggcggcggagcccatagtgtggccgtccccgctcaagttcatcggcgagctggaggcggacgccaaggcacttctggaggcggcgctgatggaggccaacagggagagggagaagaggatcctgcacggcagcgacatcaacatcaagggcggcgacgaggaggaggagagcgaggatgaggaggaggcgtgcaacatctgcttcgagcaggcgtgcagcatggaggtgaaggagtgcgggcaccagatgtgcgcggcgtgcacgctggccatctgctgccacagcaagcccaaccccaagaccctcctcctccacccgcccgcctgccccttctgccgcaccaccatctcccgcctcgtcgtcgccaccaccaactccaacaagaccaacagccgccgccggtcgaggagcagaagcagcagcttcaagggggggctctcgtcggccatggggtcgttttccaggataggccgcggctccgggagattggtggtggacggcagcagcgtaggagagctcgccgacaagcctgaccacgacttctcttctgtcgccgccgctgctgctatttgtgacacatgaccctccctctattcattttttgtgcagttacaccttactagcactagagctttgggtaatcaatcaatcctcccacaagctcaagctaggttattcattatagcaaacaggaattggatattgggattggattgcatttgtattgtcttgtgttgcattcaatttgtagtatatacttgtttttggcttgtcatggtaaataatatttactccctatttattgtacgattatcaaactcatactcaactacactaaatactgcagtagtataacaaggccaacaccagtggatgtgcatggttgcacaaacattgtactagtactaccaaagctatgagatctccatagaggtactatatatcttaatgtttccctacaaatcagcaggtgagtctatcacccacctcacctgtactgtactgtacttaacgctaattacttctctaattagtaccatgaccagggatagctagcatgcatgtgtctcccggcgttggcttttgtatcatgtagagtagtataattaagtttatgaccaagacagatttcctcctgaaaattaaattactggacaaacttgacggtttcacacagaaactgcaatacacaatgtgcaatgcaatcgccaagtgtcaatgcagtgtaagcaacacgttaaagctcatagaccgtacctacttgtgtgcctttccggtgttataaaaattaagaagccttcctccttattacacgttccattaccatcatttgaccagaaagattgatgagccgatcaaacaaagatactgctgcggctgctagccaagccttccatgcataagatggataggaagttgattcagggaaaacttcaccagtcaatttggcttcaggaacgtggtgctagtgcttagaattggaattggaattggaagaggaagaggtcgagtggagtgccaccaacctgttggtctcggacgcacgcacgcacttccacttccacatcaattagttagggaaagggcagtttcaatttccggattacgatagcagccggcaagtacacaagatatttacaaggcttcctcctatcattgagcaatatagtatacaatacaacaacctacaataatattttactgaaagaaagaaagaaatatgtcacctttgctagtggaggcagaggaaaggaaacaagtgtatgtgcaaatcttccaacaaattgcgtgcttagaccggacaacttacctgtcaagaggacaagcagacagcaacacatatgtttgacataatcccaaccaaaccaatggaagaaaaaccggctcaacgccatcaggtgtacttgccagtcttacgttccattccagcttcatctaacaaggacaaacacactctggtcactgccaagttgggcatgccatacccatatagtatggccttgtttggatccttcgggctattaaatagcctgaagcatccaaacagggcctatgtcatcaaactgatagaggcatcaacacggcaagatcttgtcaatatttctatgtttgaacggtcctcaagaggtgcactactactagtgtgtgtcccattcaactggacatactgtatctgagagccccataggggtgggtatattctgcttcaaatcatcggtaaactacaacggcgaagaaccacatgtcagccttcctgatagggttgttcaagaacaacattgaagcatgttgggttgcacggatattcacagtctatttccttcacctctctccgatcaaagaaccagtcgcccaccgcttcagccacagtctgttcaccagaattgaagcagatgtgagtatatgacatgtcattgatcgcagaagcaaatgaatcagcaggactgcaaagaatataaatattggtcgacaaccagtaagttaagtactaccctctgatcagacttgatttcagcattctacatcttgctggcattcagaagccatgacgacattgcaataagactacaccatcaaactctaaaacgatgcaatatctaaccaccaaagtctgtaagttcaaatcctacgggggacatgccaacctatagttctataaacaagatcatatcattccgcatgtgttaccttattgtttattctcgaagcagatggggagtgccaagccaaagacttcatggattggcaatgtataaagcatgaatcaatgaacatgccccagccccttttcttcttgaattcacttatagcatcaagcagtgattttctaaaacctgaaaaaaatatttctcgagatggtaaggtgccaaagtgacagcggatggaaggtaaagtcatccagaaggcatgaagcagtagagcacatgtcatgagtttatcatattacaaccttgtagaatttcaagctgtttcgtattacacttggtaatatccattctgcaatcttgccacagattttgagggtcagatccgtctggagtcaagacatgctctacctgaaaaggacaacaaattttttatcacactaatattggagctgctaacagaacatggaacctgccaacagatacggataatggtacctgccaaacatcatatgctggattgagaataaacattggggtggtgatgcctttcgccacttcttgtgggaaaaagcactacaaggcacgattaaggattgctacttagcacataacagcttgaaaagtactgaataaaaaaggtgatgatattaatacaagaaacagtatcataaaaacaactaaaggattacctgccctggttccatatctgaactacaaccagggaaccgtttccgcaaatcctgcaacaaatcaacagcaaacataagaatcatacaattaaaaaaaaacaaaaaaagggtatacgcagagaaaagtgcagacagcgacctgttgacgagcaacatcattatagaagccccgcatataccttctcccagaaatgtcttccctgtaatgagaaaagttaaaggaacagtaaaatgcaagttttaagggctggctatacttgtgttttgctaatggccaatgccccagaagaagtgataagctatcctatgaatatgttgaccccaaaagtggaagtgtgaattatgggttattgggcacattgttggatgatcagcagtaaacacatg

SEQ ID NO: 2574 - DNA, 3337 bp, Oryza sativa
aattcctgcagccctcccttcgctaacttgcaagtactgtaaatgaatggttaaaataatatgaaacacattaaaatgaggagatcaaaagatcaaagcataaaaatcataaaagtgggtgtaaatcatccacaataagggcttaaagagattggttgtcagctacaggtacaagatatagaaaaatgacgaggaacacttgtagtacattattttagaggaatattgtggcgatcaggtgagcatgatcaataattgacagggctttgcaagtgaagacaacattcatgctgaaagtgaattattttccctgtatcaatacatattctagtgtggtgcgtaaaagcagccagaccgatccaatactgcgacaaacaataagatactagtaattcataagtcaaaaggttctagcagtgagtatgaataataatcgggcatcctattttaattggaaggaagaggaaacctgtttagcacgggctagacccttgggtagaagttcagccatgacggcctcccagatgcgctggcctctgaagaagaaagtggcgccatactgtagagaatgacggcgcagtacagtagaacaagtaagaaaatgtggtgaagtgaagtggggagtgtagggtatggtgactagtacagtgtataggaataggaggttggttggtgcaaataaacctggtgttcatcttggacatttccagataaggaggcaccatcacaatacctgatcttgaccttgttccagttgtaaaaatctgcatcactatgtatgtgtgaagtgaagtactccaatagcaagtagtagtaagtagaagtgcaaagaggtgagagagagcgattggatttgacctgggttctgggccttgtcgtcgctcaggatgccgacgaactcgacccgggtttccatgtaagcagatgagccaagactggttttcttgcgatgatcacaggacgtgcgattcctgcaccagctcccgccctctaggtggaggagccatttgttagatccgtcgccgaagcctggcagccagtggtacccaggcggggtcccgtcgaggcagacagcgcccttctccttggcgccgtggactagggtgaggtcgacgagcgtggggaggcggtggccgtaggacggggaaggggaaggggtgccgagcgagcgggggtgtacgaggaggaggaagaggagggcgacggcgaggagcacaagggcgaatgcggcggcgtggcggagaaggcggcggcggtggagcgccggcgcggagaagagaggcggcatgactgagactagttgttgttgttggatctgttgaggattccgtcgtcgtcatttctaatttctaaagccagcgggatccaggatccgggatgtatacaataataatcgcaaatgtagtacaaaaataaataatctcgctggtcttctcttccttcgccgactgatcgaagcgccgccgcctcctaagccaccgccgccgtctcctccagtccctccgcctctgatatcctcccttacagatggggccagccgcttggtggagctgaagcccaatcacatgaatgtattccttctgaccctttccttttttttctttttcaaaatttgatatcgtacatctaaaatgttgtccacctcttaaaccaaaacggtttattataaaatataaattaatttatacgtaaaacttttatatatttattaagaaagatttgggaaataccatcacaaatatacatgagttgcaagataccattatacgtgacaatgatatgtggggcttcaatgacacatacgatgatttttccaatttcgtgattggccctatttattcttagcaagttaaaagtcaaatataaaaaaactacgttgaaaatatatttaaattaatttcaaattaagattaaaaattcaaatttgcttttgctcattaggcctaccgatggagccatgaaattttggttatttgctggtggacatttatcccattaaaacgagctatggaatcgtctcgtttctcccgaccagttggattgcttctgcctcatcccttcttgtcgtccacgccgccatctccttggtcatccgcaacaacgaggagctcgagaagctgctgtctgggggtgaccatcgcccatggcggagtgctgcccaacatcaacctggtgctcctcccaaagagggccgcggagaaggccaacaaggaggccaagtcgccaaagaagaaccccgccaccgccaagtcccccaagaaggccgtcgccgccgccgagtagagtagagtagagtagagtagagtagagtagagtctgaatcgggtttcttcttcttctgctgtatgtaatgctgccgttagatctgatagtggtggggtggtattggtcctagctttgtactccttgcattccttggctaatggaagttccttccttacttttgctcccacatctgtcttgttcttggaaacgcattccgtgttctatttctgcaaaacgggattcttatgtgcttgcttgctacgtccggagtccctggactagcagtaacactgtgcttgagattgttggattggacaatttattaacagtctctgtccgagtccaaaatatgtggatttcacagggttccgattgtcaaaaacgacccgcttctcaaatcagtatttgattcggggatagatctagggtttaaagccaatgctgaataggagaccaaagctggtgccttacgcggcgactcccttcgggattctgtcccatccttcatctactgcccgtgcccgtgcctcttcctcctcctgccgctccaaactcttcattggcggtgcaaatttcctgcctacctgcttcgaattcgatatacattattgtgcaaacattgtctttggttgaattagtgttagctctaattcgctgcaaccacgcaagcctagtgctaatacttgtaccgctctgtcttgttttgatttgcaggtctttcttacgatacaaatgagactgctctcaaggatgctttctctcagcatggccatattattcaaggtacatctcaaaccatctgttcctttccgatgctatcaggtttctgaatctgtgtgtgtgaaccgacagcgtcctctccctgattgattaatgtgttgtgcagtgaaggtaatatgccacccagtgacagggaaatccaaagggtatggctttgtcaagtttgcctcagaagatgaagctgctgcagcattgcacaagatggggggtgaggtaggtttgctctcttgtggtgctagacaggcacaagtcaggatgttttgctataatatgcattactggggtgcaggaa

SEQ ID NO: 2575 - DNA, 1978 bp, Oryza sativa
cccaaactctaattaagatatgtatgtacatactgcatgatttaaaattaataaaaattgtaatcatcatatgtacttagcgtaggaattatattaaattaaatgctaaaaactctaattaacatatgtaaatgccacatgcatgattttaaccttttaaaaattcgaatagtcatatataagtagcatatgaaagatagtaaattaaattgtgaaaaactctaatatatgaatgatagttttaaaaatatattaaatttaatacttttaaaaattctccagtcaattataattagcatatgaatgatagtaaattaaatgttaaaaactctaattaacatatgaaattgccacttgcgtgatttaaaacttttaaaaatactctagtcaattataattagcatatgaatgctagtaaattaaatgttaaaaactctaattaacatacatatgaaattgccacctgtgtgatttaaaacttttaaaaattgtaagtatcacatataactagcatatacatgatttaaacttgttgaaacctctaataatcgtgcgtaattaacatatgccatacatcaattgatttatatggataatcaatacatccaaaatagtttacatcgtgtacacaataattacggcacgtactttctcctcactattgttccctccttgtgatcgctgcgtgagtaaggggtgtcttcatttgataggaggatgctagggtcaatcgtcaccgtgaaagagggttgcccatccaactgatcgtaatcctcgtcagtcttgtcctcaactccgacgatttttcttttgcctgggagaaccacttgacgcttaggctcatcaggccctctgcccttctttcctttgctagacatgtccttcacgaaaaagacttgcgttacatcattggcaaggacaaaaggttcgtccgagtatccaaccttgttaaggtcaacagttgtcatcccactgtcatcaatcattacgcctccaccagtcaacctaacccattggcaccggaacagaggaaccttgagaggaccatagtcaagttcccatatgtcctcgatggcaccgtaatacgtggcagttgttccatcgtgtcccatggcatcgacacgaacagcgctgttttggttcgtgctcttcatgtcttgggctctcgtgtagaatgtgtacccattgatctcatatccctggaatgtcgcgatcgacccagacggtcccctcgccaggaaggcaagttgttggttgatcgactcgttacccatgagatgttgtcgtagccacgcggggaaagtatcaatgtgatgccgtgtaatccatgcatcggacttaccgatgttccttgcgcgaactagagccaagtgctcctcgatgtaaggagctaccaatgaagagtgttgcagaacagtgaaatgggctttacggaataaattgttgtctaccgtcgttcttgctttccttccgagagttccctttccccgtagtctcccttcatggcgtgattcaggtaccccgattgggcgaaggtcttcgataaattctatgcaaaattcgatgacctcctctgttccataacccttggcgatgcttgcctctggacgagcacggttacgaacatacttcttcagaacgcccatgtacctctcgaaaggaaacatgttgtgtaggtacataggcccaagaatacggatctctttcacaaggtgacaaagcagatgcgtcattatattgaaaaatgaaggtggaaatatcaactcaaaactgacgagacattgcaccacttcattctgaagggcttctaatctatccggatcgatgaccttctgcgaaattgcgttcatgaatgcacatatctttgttattgttgtccggacattgtctggaaggataccccttattacaactggtagcagttgtgtcatcaacacgtgacagtcatgagactttaggtttgtgaacttcttctcct

SEQ ID NO: 2576 - DNA, 1658 bp, Oryza sativa
gttttcttgaagttggtgctgcagctcttctagttggagatatggaggcgaagattaatgatcaacaatggaaatattcttttatccaggactttcctgatattgatctgttgcaaccttcaacttctacagcaagtacttttgcatcatcacagagtcacttgaaagcaataactgcctcaaaacgcatgaaatcaggccctaatcaagtttggtaggttttttaaagtgatgtatagatgtctctgcatcagtttgcatgaaacatattcacactgctttacattctattttcatttcttttttttttcttgaaaagaagaccccttgacatatcgatgctcttcaagaatttaccctggaaaatttgctgaacgtttctggttgtaattataattctttttgggattattgcttttgacaccagtggtgtatactaattgttttatgtatatgtccttatgagtaaaatcgtcatcactaaaccagttattggacataatgtttatgttttttttgaaatcaacgataaatgacaatttcttatctatgggaccatctacttcttatgtaggatgaacatacctgcaaatactttccagcctcgagcacgtcccctttttcagtataggcactacaggtacttttcttgtttcatttattcactctacataatccagggcagcatttgaaatgcttatataaggccggtttcagtgttgcattacagaaattgaactgtaagtgtttatattacagacatacagattgatgtagacaatgaaaagaagaaacaaccagtgcttaattgacaaacctatggagacacaaattatattttgtcaaatgattctctctctctctctctctctctctcgctgcccctatatcaatttgccatattaattgtagatgatatgatgttcttctataatcaacagtactcgtttgagatatatataactgttcttgaatatgagtttgtctctttatctattttttatggtcatgtttaacaatgcgcttgaatgtcttgcttattgtgttacccacttttaccagtgagcagcaacctttaaaattgaaccctgccgaaatttccgaagtcatagctgaagtttgctcagaaacaacttcaaactcaaatcagttcagtgctccatcaagattgaccacccagagtcgccaaccttcagcagatgtggcattcagtgtccttatcaaacttgttatcgacatgtaaataacattacaccctattcatttcattttgttttgtttcattgtcctccattcacacacctgtaaatgttcgtgatgtatttcatttacactggaatccttgatagtgtggctgcgtagtttcttttagggcttttactgatagctcaattgttggcaccattacttattcttatatcatgtctcaatgaatcatttattacctgaataaaatatttttatagttgaggcagcatttagagtataaaacacatactgtatctcgctcccattgaattagtagttcaagtaattaattgctgttcctttgtgtacatagtaatgttgtgagctacttcaggagatacacagtgtagatatcgatatttctgagtaaatatgaacacatctcagttaaaatagttgagattatcttg

SEQ ID NO: 2577 - DNA, 750 bp, Oryza sativa
gcttaatttattctataccttaaaaaatatgtacgtgttacctccatattttaatataatatagatgtttagaataaactaattaggtaaaaaccaaattagctcctttggatgggaggattttcaaaagaaaaatgaaggatttgtatccttaggattttttttcctatggagtttatttggtttgtacgatttgggcttgcaaaattcctgtatatggaatcattcctatatctcagttcttttcaaaagaatttagggtttctttgaagaaacacgaattttgaaaacactggccgaggtaagaaaaaaaaggatgggagtgccgtcacatctcagatcttatggatagaaaaaacacagaaaaactataggaatgactatttggatggaacacaggaaaacacacaagaattagaagagagatagacacatatgagtttttccaagaggtttaatctcatgttggaaatcctccaaaattcatatgaattgaggcaattctaaggaatttcaaaggaatttaggagagccatttcttcattccaaaggaccccttttataggaatatatctaattaatccttcaaaattcctttgttccaaaggaacccaacctcatgttatttttccccactggtggagaaaccatctttcgtcggtcggccgatttccacaatagtcccggatgcaataaaaaccggggctaaagatgatctttagtcccggttcaaaatggggggcgcaggaa

SEQ ID NO: 2578 - DNA, 5839 bp, Oryza sativa
tgccttgttagtacccgtcatctatttcccttgtatgtccaaaactgttaaaaagaactccttttatcacagaaaaaaagtatgggaagctattcttccttctctcagtacttcagtatccaagaagcacaaatatgaatcagaagctgagcaaggaacggcgccgccgcctctcaaactttgccctccgcttcatatcagtcttgattggcatcataagcaacctttcggtatccagttctgactgcagggaggatttcagccttttgaggtgcccaatgcatagtgcgtgatctgaagctgtgctgtggaagtcttgctcaatgtgcaggtctatcctctcatacttggaatgccattttgcttggagataaggcaaggatctccaaggaggcagaggcatagagttctgcttaagcgaccattttgcagcatctaccataacatgcaagaactgtttcagtctgggaagagtgccaacatagaccaccggaagtgaattgagcagactgtcataagaatcaacagccctggctatttcaaagtggctcctgaagtcgatatcaatgatcagacgatattcagtatcactattcatgatgacatcgatatactcatgatcacctagtcaccgaaaaaaaaacaaacagataagttacacagttcaattccaaggagagattgtaaagatgtactgttagttatgattttgagacttgttaggcaagtacctccaggtatcttgtcgaatccctgccattttgatacgcaaacagctgcatcatatcccgaatatctcaagagcttcacaagtaaatgacggatgcagctggcactgcattgacctcttttgaaagccagaaggtctgactcatggatcgagaataacagcgagtggaccatggagagtagctcgttttctttctcatcgccgccttgcttgtagatctgaaatggaacacatagataaaacggtgagttatgacagatgaagcataatagtaatagtaatatttaaagttgtatccaacagtaagctatccagtatccaattatgaatttagataggaggagtagcagttacacaaataggcttgctaataataaattgagaggtagaaattggtagcgctagttaatggcagggcaggaaatgaaggatgcataatgaaaccctcgagtagcagctagcgtaggcatcataggggcagatttaatcgtcgttgcaatttcacgggacagaagcgccaaaaactagtaggatcatgggatgataaaatgataagaaacgagctaggcagtggtaagttgtaatgagaaattgaaagtagagtaatacccaattggaattagaagggttcccttgtgagaattttgatgcgcaattgagggggaaaagatatgcaaattacaggagaggagagggaaatcctgtcgagttgttcaaggcagaggagagaggggtatgtattgcatacagaaatgttatcggcgaggtggtcggagagggcggagtcggagtcgctgctggcgcgggaatcggcgcctccggtgccgccgttctcaaggaagtcggtgacgagcatggccaaatccatctcgctctcgtggctgtggctcccgaacccgtctcctcctcctccggctcctttggtccggagccagaggtctccgacggccacgggcgagccaccggagggagaggcggggaccctggcaggcggcggcctccggcgaggagtgaccgctgccggcggcgacaggcccaactccttggcgagcagcatcatccttcaattccttggggccttggattggaggaggagaaatttgagagaaatgatggctcagcggggtgggggacgagaaattgacgagatctcgcgaaaaggaattactagtatgttatggggaaggaagaaagaatgggcaaggcaacgccagcgcatcgcggcggattgtcggttggttttctttttcttatttatagctgacaggtgggcccgcagagcagcggcgggaagcggtttataccgtttcgatttggcgtttgctcctccgctccgctatccactgctgccatcctggccgttggttggattcatgggattcaatcccatcacatctgcgcttctctttttactcacattaaccattagcttagctgtcaattttttaggtaggagtactttattttggaagcaataatactccctccatctacttttgataagtatatttctaaatctgaaaaatttatttttgataggcatatttcaatccaacaaactattatcttaatgactttcttagatttaacgggcaactctccattctttcacacaaaattgactacatggacatcgagaaatgtaaatattaatgaatcgtttgtttacgaggaataactagtactagcatgcttgtttacgaggaataactagtactagcatatttaaatggatgataagtagaattatttatccttggtctgtgtgctaagatgaaatatgactatcaaaagtatatgaagggagtagtactccctccgtactcgtaaaggaagtcgtttaggacagcgacacggtctccaaaacacaactttgactttatatttctataaaaatatttattgaaaagtgatatatgtatacttttatgaaagtagttttcaagataaatctattcatataagttttacattttcaaactcaacaacttgagagttatttatgatttatattcctaatgtttgacttgaacattgtactaaacgacttcctttacaagtacggagggagtatgtagtaagtagtatatgcaagttcgttaaattaaattagagggtggatagtataaacgggaattattgagtactccctccgtactcgtaaagaaagtggttttggatagtgacacagtctccaaaacaaaattttaacttcttgtttctataaaaaatatttattgaaaagtgatatatgtatacttttatgaaattattttttaaaataaatctattcatataattatttacatttttaaactcaacaactaacaacttgagagttattaatgatttatatttctaatctttgacttaaaaattgttataaacgactttctaccgatggagtactagtagtagatggattaggtgggccggggggacaatgattaattagtcgattgccattaagattttaactatgggatcctaagattagggagagtatatggatctcgtcggtctgtctgcttgcacgtgcctgcgggtaactaattaagctgattcatttctttcttgccgcacaagattaagcatttctttcttgccgcacaagagtaagttaggagtagctagtttcgttagttataagtataaaactatatatatagctgactatgtatactaaaatataagaaattttgtttatgtagttattatagtatatattttgggacggataggtccgatcggaggtagtacgtacatatagtaacagttaggagtgtacaacatagtgattagtaatcatagttagatcatgacctttcgaaccggccgttcaggtacttccttcgtccaaaacaatacaatattatttaggtggtgttacattttaatttagattagtttttttttacggaaaaagtatatagctagctagctctagctgtgtttaatcacacatcggtcagtgtctttttaattagaagctctagagttttggtacagttcgtatatgtgtagtgcacaccaaagataagtagagataagtaggcagtcctactatctaaagaaaaacccacttgacagtttatttttaacatgatagtaattttggaagaaaaaataaattagaagtggaataagcggaaaaagaaacgggtttgcccacccttgcacccctaggattgaggcgcttcttacgaattgataattttcaatgggtcatatcgagaaacaaccatacatggctagaattctatataatttttagtttttcctttaaataaaaatacctcacaaacttttgttttacacacgtatctctgttgaaatcttatgtttttctctttttttttatcaaggggccagatcccatttttatttttattagtagaatgcatgaagacaagagagttttgacactacaaaagcatcgacaaaagaagatttgctcaagcacgctagcagagtttccaacagagaaacagacggggcacttttgccctttgcagcccccccccccccccccccccgcacccaaaaaaaaagtaaaaataaaaataaaaaaaatagagctacaaaaagttccagtaatgacaaccatttccagcagcaaaaagtcttcggttcaggttcttcttgctccaatcctgtagatcatgaagctcaacacagccgtttccagtttgcccttccatattgagagaatgggagttgaagacttcatttgtatgattaattaaatattagctaatttttttaaaaaatggtttaatttgatttttttaagcaactttcgtatagaaactttttttgcaaaaaacacaccgtttagctatttgaaaagcgtgcgcgcggaaaacgagggagaggggttgagaaacacagtctaaacttgtcttcgcaactgaactccccacaactatggctgtgtttagttcagcgcaaagtttgaattttggttgaaattggagatgatgtgactgaaaagttatgtgtgtatgacaggttgatgtgatggaaaaggactgaagtttggatctaaacacagcctgtctttctcgcttttcctcggaaatctgcagaatggcccatgaagacataaaagaacaggcatggtgtaagatttcagtggaatcagcaggaatgatttgatcaaaacaagctttatttctaattttcctaattgcccagaaaactacatcgacccctacaagcagcaactgctttgtttgtttttcacagctttgtaaccaagttccacgcacttgctgtaaatttacaattagtttcagattaaaggcacagattattatgtcccatgtgaacattgttaaagagcattaaaaaataagtgatgaatttgtttcctttatgtcacagaatgggcagttatcagtcctttgttctaacctcttcttttcaagttgtgacactgtttttacattaactagaggaataccttaatttttaagggtattttgataatccaaatcttcatgtgtggaaaacccacattctgtagtttcggagctttatagaaggatttcagagtgaagtttccacttcttgtcaattcaactggatttcatctttttgatccgtcagaggttaattgttacgagcatttttttttattttactctaactaggatcttaggtttttcctccgtttttctcagtctagtcttttaaaggacagagtcttaggatatatgatcgagaaagagaggagtaataaagaaacaaaagttggggtgttcaatctcgttgacataatgacatactcttaggctctgttcgtttcctggagttcccaactcccccatctcattttccgcgcgcacgcttttcaaactgctaaacggtgtgttttttgcaaaaagtttatatacgaaagttgcttaaaaattatattgatccatttttttaaaaaaaattagcaaataattaattaaccacgtgctaatggactgcttcgttttccgtaccggagggatgggttcccaactcaaccaaaagaacagagcctaaatttgttcccaagcctcagaatgcagataatactagtttggttttcgatcgaaacggatggtcgggctgcag

SEQ ID NO: 2579 - DNA, 1274 bp, Oryza sativa
tcctgcaccccatgggaacatgagaactctttatatctttgcttccaaaatcaacagaggtataaacctaatacttttatccaaaagatatgctaaattcttgttaaatatgatatgcgaacaagtctttaaccgagttggttagttgattcaagtagcacttctcaactcctaggttgactcccatcgtttgtccgatgccaaagtacaggtcgatggtcgttatcagatgagctacagtaccgctatataggggtggggctgaggttcggggttttctcaacctgcgtgagaagatctttttctatgcaaaatatagcaacttatttgcctatcttctatgcaaaatatagcaacttattcgcagatatcaaaactattatctgcttcatgctagaaaaaaactcaaaattttttcttctgttgtattgtttagatcacatgttttaagctatttgttaacttccaacatatttagtttatggtcataattaagtagataatttgcaggtttgtggtggcgcagttggctagcgcgtaggtctcatagctaatctgagttatcctgaggtcgagagttcgagcctctctccccccaatttcctttattttttcctttcaagatctttttgttctcttcgaatataaccaagcttcttgggagataccttttttttctatctgaagatttcttttctctggatataagcaagtcaacgtaagccgtagcccgtaggcccgtgtaagagcctctcatctgcgccacatttgcagcgtgagtttctcactgtcaaccaaaccaaccttcctaacaagttccttcaaaagagaaccgaaactgccacccgaaaatggttcagtttactagcagcacacatctcataagattctcaaatcacctgctatacaggcataccaattgtttaggacaagaaagaaacataagacaagtcagattaaatagatactgggacacacaccaggctggaaaaagaagagggaataatcaagacttgtcttggtcatagttgcatgcttttctcaatgttcacatgcactccgcatatgttcctttcttttcccacaaatcttctccttttctttagactacttcagcagtaacatcttaaaaagaaaaggatacacattgtcatttctttctgatgaaaagaatctcccgtttttaaccacatacctaacaagtgcggggcaccagaaaaaggctgaagcctcaagatatcttgttcacatcacagcaacataaaatattgtaa

SEQ ID NO: 2580 - DNA, 617 bp, Oryza sativa
tgcgtcgataggggatagcacgatcctcaactctatatatctgcccccgccgctatctttacgtcgttgggtgtcgcttacatgattctgtcgagaacggtcccgtgggtctatcgcgcggtgagacccaccctcgtgagcttaatcattcatctgcaattttgcccgttctctatctcgctcttgtttgtgttcttcgattggcaaacagggattagccttatcagcgaggtcatacgagtttcgacacgggtgattaccagaggagacgtggtgcttctattgcgaggctgacgagcgtgcgctttcaagaagctggatcgattcttgtttcgactaccgccgaatcgatgtatatcacacccttttgaaagatcggaaaccctactgcacatcacatgccaaggaccagacgaccttagggcatctccaacagtctctacagccaaattttggccattcaagcacaaaagagagatccaacagactgaccaaccggatggccaaactcgctcgctggctagctagatttggccagccaaaacacctcgcggcggcggtctctagatctggcaacccgaggggagctcaacggcgctcagctgctgggagtggtc

SEQ ID NO: 2581 - DNA, 18946 bp, Oryza sativa
gacatgacaggcgtgtgaccagtcacagaccggtcactctcgtccaccacgcgtgagtttggcaagctgcatgtctgcccttcttcatacaatgacttccttacaatggttgggatgaagcctggcatatatctgaccgggaccgacgtgccatcttcaggagctggcacgccgtctccggctagggacaagtgcctggaggctctcatcaatccgacgggacggggcgaggcgtgtaacaggccacctgccaccacctaacccgcgatctgaccggtctgtgaccggtcacacgctgcgcccggtcacggaccggataagcgagcgcgctgagctgcattacatgcggcgtgacgcgctcatccaacccgcaatatatgcggttaggtgagccccgctgtgctcacctaacccatatacgtggcgccaaacccacagggggtcggggcgccccggccctcggggtcgaaacgggagcagtccgacccctcggggagacaaagggaggggcggccacatcaccctcgggcccgacccccccgagggggtcaggccacgtgggtgatcgcggctgcccaagcctctagtcatgatactcccggtcccatgtcaccgacagtagcccccggcgttatgccagggcgatcgcccccccccccccccgaaggaagcgctcgggcgtgacgccactccttaggcctggtgacaggtggggccggtctctacaggcgggcagaaacccagcggtcgcaaatcgcgcacatcggcaacggaaaaccgactgtctataatgagcggtctcttcaagaccgctacattactcgagtagcacgcgaatcgggacgagccggttcgttttgcctggagatatgatgatggcgcttcggtcggcgagcgtagttaacgcgcgcacgatatgttccatctcaactgccacagccgcgcatccacctcgtgcgccgcaaacgggcgagcggaattagtggcgacgtgggcgcgagaaacgagggggcgagatagtgggcgcgggaagcgaggagccgggcatagcgttggcaagggtataaagacgccgaggaagagattcgcttccttcctctcgtcattattccccttgccttcgccgcttgcgccctaactccttgtttcctgtgccctaccctcgccgcactcactcgttttcaagctccttctccgccggcgtcatggcacggggctccgcaccgctcgacggtagcgtgctgccgccttcccgcatcgtgagcgagaggcaggccgggctgccgcgccgattcatgccggcatctgccgccggccgggaggtggtcgagctgggcgagggacgcccggcaccacactacccgaggcggtccgtcttcttcctccctttcgcaatggcagggctggtcccgccattctcttctttcttcatggatgttctggagttttatgacctccagatggcgcaccttacccccaacgcgataatgacgttggccatcttcgcgcacctgtgcgagatgtttatcgaggtgcacccatctcttcggctgtctcggtggttcttcaccgtacagccagtgtcgccgccgtcggtagttggtggctgctacttccagccgcgggggccggcgctgagccgctacattccctgcgtcctccgcaagaagtgggacgactggaagagtgactggttctacacccccctcgccgacgaagcgcgcctccaacttccgagccagcccccagcgcaggagaaacaaacgcgtcgcaatctggaaggtgccagcgccgagagggccgcactggatcagcgggccgctgagctcgaggcacgggcaagggagctggatgcgagggcgcgtagcggcggggcggccacgggcgacggcgatctagccgcccgcctcgcagctgccgaacacaccatcgccgagctgcagggcgcgctggactcgtccgccggggaggtcgaggccctccgcttggcaggcgaggtagggcccggcatgcttcgggacgccgtctcccgtctagaccgcgccgggcggcaggcgggcctctggggcgggcggatcgcgaaatatgccgccaaccaggggggcctcgcccagcgcctctcagagatggccgggactctccagcggctccccgaggagctcgaggagacgatcaagtcatcctcgagagacctcgcccggggggcagtggagcttgtactggcaagctaccaggccagggacccggacttctccccgtgggcggcgctggacgagttccctcccggaaccgaggacgacgcgcgcgcgcaggtccgggacgccgccgaccacatcgtccacagcttcgagggtacggcccctcggctcgcgttcgccctcgactccgacgtggagggcggcgacggtggtgtggacgacagcaacgacgaggccggcgacccgggagcctcgaagtgagcccccaggcccccgccaatcttaaatagtttttcctttcttcttccgaggccttcgggcccccttcttgtacaaactaatttaatctgcaatcaaataaagaggaaatttttgtgtcagctctgtttgttgtgtgtatgagacgaggatggtctgtgccgtggtccttctgtgtcttggtttgaacgagggctcatgcccaggtcccagcctcaaatggcgcgggtcggggctagtgcctggggagatccacgtgtcgagactggccaggccgggaacgtggtgaccgagggttatggatgacccgattgtgggcctttgccgattcccccccggagttcaccacgccccggggcacggctcggttctgggccccgtttggcgatttccgccggcccgggccaccgagggcagggtcgagcacgagcatgctaattcaagccaagactctttgaaaggaaacaatggcacagacacagtccttaggaaatcgaaaatgcttttattgaaatacggaagagaaaaaagataagtatatgcatgtggtagcccccggccaaccctgcacgcccagggggggtgcggggttggcccgagcacgagacctgacacccgacccctactaggggtagaaacgacgaaggtgttcgatgttccacgggttaggcagctctgtgccgtcgcccgtggccagccgaacggagcccggccgggggacgccgatcactcgatacggaccctcccacattggtgagagcttgctcagtccagcacgcgtttggacgcggcgtaggacgaggtcgtcgacgcagagtgatcgggcccggacgtggcgctgatggtagcgccgcaggctctgctggtagcgcgcggctcggagggccgcgcgccgccttcgctcttccaagtagtcgaggtcatctctgcgaagctgatcttgatcagcctcgcagtacttggtggcccgaggggacctcagggtgagctcggatgggagaaccgcctccgcgccgtagacgaggaagaaaggcgtttccccggttgctcggcttggcgtggttcggttcgcccagagaaccgctggcaactcctcgatccacgagtcgccgtgcttcttgaggatgttgaaggtcttggttttgaggcccttgaggatttccgcgttggcgcgctccacttggccattgcttctggggtgggcgggggaggcgaagcagagtttgatgcccatgtcttcgcagtagtcaccgaagagttcactagtgaattgggtgccgttatccgtaataatacggttaggcaccccaaaccgggctgtgatgcccttgatgaatttaagtgcggagtgcttatcgatcttgatgaccggataagcctcgggccacttagtgaacttgtcgatagcgacatacagatactcgaacccgcccggggcccgtctaaacggacccaggatatcgagcccccagacggcgaacggccatgaaagaggtattgtctgcagggcctgggccggctgatgggtttgcttggcgtggaactggcacgccctgcaccgccggaccaggtcgaccgcatcgttgagagccgtcggccaatagaaaccctggcgaaaggccttgccaaccaaggtgcgtgaggcagagtgggctccgcactcgccttcatggatatcggcaagaagctcgacgccttgttcccgaggaatgcacttcaggaggactccgttagccgcgcgccgatagagggtcccttccaccagtacgtagcgcttggagatgcactggacgcgttcactcccttcgcggtcctcgggtagagtcttatctgcgaggtacgcctggatctcagcgatccaagcaatcaatctaagggagctgggagcgctcccctcgggtcccgaggcctggactccgacgggcctcgggggccgttcaggcgcgtccgtctcccctagggggtcgggtcgcgccgatggctgggcaagcctttcttaaaaggcgcccggtggggtctgggctcacgaggaggcgagccttgagagttcgtcggcgaccgtgttatcccgtctgggcacgtgccgaagctctatcccgtcaaaatggcgctccatacgccgcacatggcgcacgtaagcatccatctgcgggtcagagcactggtactccttggagacctggttaacgaccaactgagagtcgcctaacaccaggaggcggcggatccccagtccagccgccactctgagtcccgcaaggagtccctcgtactctgccatatttgttggttgcccgaaagtcgaggcggaccaggtatttgaggacatctccgctcggcgaggtcaacgtgacccccgcaccggcgccctgaagagacagggagccgtcgaactgcatcacccaataggcggtgtgaggcagctgcgaggggcccgagctggcctcggggacggagatgggctcaggggccggggtccactctgccacaaagtcggcgagggcctggctcttgactgcgtggcgtggttcaaagcgcaaatcgaactcagagagttcgattgcccatttcaccacccgtccagtaccctctcggttatgcaagatttggccgagggggtaagacgtaaccaccgtgacccgatgcgcctgaaaataatggcgcaacttcctcgaagccatcagaatagcgtaaagcatcttctgggcctgagggtatcgagtcttagcgtcccggagggcctcgctaacgaagtagacgggccgctgcacctttcggcggggccgatcttcttcactaggggccgtatctccagggcgctcttcgtccgagaggcctcgcggggcgcactcggcttctgtgccgacgacctcggggtcggagggcgataggcgcggccttcccgcagtggccccggagccatcctaggggtcgggggcgcctggcaccgtcggacaagcgggcggagggccagctccggccgtcggggtccttgggccaccgttcggctcgggggcctctcctccctgctctctcccgggtcgagtcgacacaaggtggggatgcgcggagcgagggtcgtcctcgtcacgctccgagaggccgcgcggggcgcactcggcttctgtgccgacgacctcggggtcagaaggcgacatgcgcggccttcccgcagtggccccgtggccatcctgggggtcgggggcgcctggcaccttcggacaagcgggcggagggccagctccggccgtcgggggccttggtccaccgttcggctcgggggcctctcctccctgctctctcccgggtcgagttgacacagggtggggatgcgcggagcgagggtcgtcctcgtcgcgctccacgaccaacgccgcgctgaccacctgcggggttgccgccaggtaaagtagcaacggctcatctagctccggggcgatcaggactgggggagaactgaggtacgccttcaactgagtgagggcccgttcagcctcctccgtccagataaacggcccggagcgtttgagaagcttaaataggggtagcgccttctctcccagcctcgatatgaatcgactgagggcggccatacagccagtgacacattgcacatccctaagcttgctgggggggcacatccgctctatagctcgtaccttctcggggttggcctcaatgcctcgggcagagaccaagaacccgagaagcttgcccgcaggcacgccgaacacgcacttgtcggggttcagctttatgcgggcggtgcggagactttcgaaagtttccgctagatccgagagtaaggtctcttggttgcatgttttcacaaccaagtcatcaacataggcctcaacattacgtcctatttggctacccaaagaaattcgagtagtacgttgaaaagtaggacctgcattctttaacccgaaaggcattgtcgtataacaataagttcctatgggggtaatgaatgcagttttttcctcatcctccctagccatgcgaatctgatgataaccagagtatgcatctagaaaacacaaaaggtcgcaccccgcggtggagtcgacaatctgatctatgcgtggcagggggtaagggtccttaggacatgccttgttaaggtcggtgtagtcgatgcacatccgaagcttgccgttcgccttgggaacgacgaccgggttcgccaaccactccggatggataacctctcggatgaatccggcctccagaagtcgcgccacctcctcgcggatgaaggcttgacgttccggggcctgccgccgcactttctgacggaccggccttgcgcccggccgtacggcgagacggtgctcaatcacctccctggggaccccgggcatgtccgccggtctccatgcaaagacgtcagcgtttgcccgcaggaaggagacgagcgcgtcttcctatttgccgtccagcagaccaccgattcgtgtggtcttggacgggccgtcgcccagggcaacctccttgaccgggacctcgtcgcacgtggccatccgctgcctcggggcggcggggacggaggtgccgagcctctcgtcgccaccctcgggcttggacgcggcggcgaggtggtccgcgcgctgctccatacaagcaagcgcgactttgaggtcgccatggacagagatggggccaacggggcccggcatcttcatctggaggtaggcgtagtggaccgccgccatgaacttcaccaacgcgggcctccccaggaccgcgttgtagggcagactgaggtccgccacatcgaagttcacccgctccgtgcggaagttggcggatccaccgaaggtgaccgggaggtcgatatgacctagcggccaagtgtgccccggcgtcacaccgataatcggctgggacggccggagcaccatccccggggccttgatggcgtcaaaggctgtgggggaaaggatgttgagggctgctcccccgtctatgaggacacgccccaacttcacgttgcaaacggtgggggaaaccaccatcgcgatctgtcctccccgggcaacgcacggcgggtggtcggtctggtcgaaggtgagggcaacctccgaccaccgcgcccgccgcatcgcctcatgggtaggggccgcggccagaagctctcgcttcatggccttgaggctccggcgagaaacgtgagcgcatgctcccccatcgacggtggcgatggtggccccaggctcctggaaccctaggtcatcgtcgccatcgtcaatgtcctcggcgggggccttctgcttggcctcacttcgccggttgccagagggagccgctggggccttgccctcacggcgctcctgcctcctctcctcctcccacttcctcgttcgctcagccaaacttttgaccgcgcggcagtccacgaggtcgtggagggaggtgttgtgcacggtgcaccacttgccggtcgggcgctccctgctgggagcgccggcctccttctttttgtcgctcgcaggcctcccctttcgggtggcccgcgaagcgccctcgatggcgaggacgtgaccctcgtcgtcggaatgggccgacctcttcttcctcctcccgtcccgccgccctgaccgagcggcggatccgggggcggctgaagctgccacaccggaaccggtggagttccaggtccatgcctcctccttgcgagccacacggtccgcgagctgaaaaagctccgcagtggtctggggctccttggaggcgatcttctcgagcatgcggttgtgccgcacgccccccctgaacgcgtagatcaccgcgtgtgcagggatacatggtatggtgttgcggacttgacaaaaccgctgaatgtacgagcgaagagactcatcgtcccctcgctgtaccgcgtgcaagtccgcttcttcacctgggcgcggatatgtgccctggaagttcatggtgaactgctggcacaaatcctcccaagagtggaccgacgcgggtggcaagttcattagccaaccccgcgcctgtcctctcagggccatggggaagaaattcgccatgaccctgtcgtcacccctggcggcctcgatcccagtcatgtagatctggagaaactcggcggggttgacgcttccgtcgtatatttcggtgatggtgggccggaaccttgggggccaacggacgttccgaaggctcgccacaaaggctcgacagccggcaccgccaaccggggacacggggggctggcctccgtgcccggaccgaagtggcgctccggacgaggaagcgccctccgatgcgtgggcagcacggcgatcattgcgccggcgctcgatattgaggcgggcatccggcccctcacgcacatcttcttgggtcggaggcattgacgagggaatggcggacgaacggcgggcaacggccgccgctcgccgcgccctccgcctcgacgatacggagccggcagtagcagcaccagtggccttggtggcggaggaccgcccgccggcgcctaaacgctgctgcgccgtcatgaccaagttggccacgtcatctagccaacgtcgagttggagtctctggatcagggacgacgggcgggtgacgcaggagcgcgcccgcagcctggagcgcgccctggggcgtcgtgccatcaccgtagatgaggagacgacgctccccgtctcgccgtccttctccatcgctcgtggacggcgaagtcgcggatctttcgaccccctcgagcgcctcctcccgcctaagacttcggcgagagggggcggcggagtacgagctcgacgacgcgggttctgctcgctgtcgtcaccgctagcgctcggagagaggttgtgcgcttttgctcgttcggccattgggctgaacgggaaaagcttggcgcacacgaaagaggatgagagcttagaaaaacacacgcgccccctacctggcgcgccagatgacggagcgtggggctcctcaccgggagaccgcgcgggcccccctttgccggttcggccgggggcgctaagtgagcttctaaactcttgatctgtggaatggttcgcgagagagcaaacgctcaagacacgggcgatgtagacaggttcgggccgctgagaagcgtaataccctactcctgtgttctggcggatctgtctctgaaggagttacaaagagctggaaagcaagagccttctaactctagagaccctctccctactctttttccccgtcctttctacgagctcccctttctccttctttctttttttcccctttttcttggtaggcatggtcctccttttatatctcaaggggatactacatataccatttctacctacccttcttttgggtggggacccatcctactttgagcaagatttggctcgtacttttatctgacaccgggatagccctgtcctccctcattaatgggcggagatttgcaatggctgctgtttgaatgaccctccgatgggatgggtcataccaacctccactccgtcggaagcaggtgcaacgtggaagcacggttgtttgccgatgacatgacaggcgtgtgaccagtcacagaccggtcactctcgtccaccacgcgtcagtttggcaagctgcatatctgcccttcttcatacaatgacttccttacaatggttgggatgaagcctggcatatatctgaccgggaccgacgtgccatcttcaggagctggcacgccgtctccggctagggacaagtgcctggaggctctcatcaatccgacgggacggggcgaggcgtgtaacaggccacctgccaccacctaacccgcgatctgaccggtctgtgaccggtcacacgctgcgcccggtcacggaccggataagcgagcgcgctgcgctgcattacatgcggcgtgacgcgctcgtccaacccgcaataaatgcggttaggtgagccccgctgtgctcacctaacccatatacgtggcgccaaacccacagggggtcggggcgccctggccctcggggtcgaaacgggagcagtccgacccctcggggagacaaagggaggggcggccacatcaccctcgggcccgacccccccgagggggtcaggccacgtgggtgatcgcggctgcccaagcctctagtcatgatactcccggtcccatgtcaccgacacataccttcagggaatttccgcagatggtgagggcagtgatgttggagaggataggcagggcactacagatgtaaaggccggtgagcctaccggcgccggcaggaatgtagaacgagctagggctgccgccgtagtggtaggagcggaggcgattgcgttgtaggagaaccaatctcgagatcttcacactccactatggtgaagaaccgctgcgttggtgcccagatggagacatcgcgaagtctgtgcagtagagcaccttgaggacgcggagaacgggccgacaaaaggagaccatgccaacgagcaattcgtcggtgatgcggatggagttgaggtggatagtcgtgaggtgggcgaagggcggggggcggggagacccaatagaacaatcgagcggagaagttgatctcgcggagcgtgtggctctgaaggagcggattcagatagtggaaggagaaggtgatcctgtccctcgccgaactgctgcgtaggtggatgtagaggtgtttgacagtggactgctcggcgccgacgaggaagcgccagacgaactcgcctctcgtcaggcttatgtagtggtcgacgacaaggaagaagatcttgaggtgcctcgccgaccgctccaccaggcacttgagcttctccaactgggtgtcgggggctgaactcgacttgcacagagtgccccaccaaccgccgctgcacggcgtcacgccactacggggagagcaccgacgtgtggatgacatcgtcaagcggaggagatcaagtatctgctcgtgcattcccgccggaatcctctcgaagtggttcactggacatcagaaaccttgcacaccgtcgatgattctaatccattgccgtaccgcccctggttgccgaccacctcccgctccgccactctctcccttttccatcttctcaatgaaactacacgtaatgaaattgtgtgttgtccattttgctttcgaagcagaggccacaggggattaggccatttaaatggctggcgactggagaggatgtgccttgccagctacgcaaaatggacctggagctttgaccgggtgatgactgctgggcccacctgcaagtgaaagatagcaaatgagatacaaaggttgcgttcgaatattataagattcacattaaatacatgcacgtaaaataagaaatctatcagcgtataattaattgacttttaattactacaaggaaaatgctttacatacgaccacgagcgtccgactctcgtacaaccacggcgacggcatatgtgacatccgcgagctgacctattaggttgtgatccgaatctcaatctcattgggccttccaaaagcctagtcacaaccgtggctaattacgatgtctggccgggtccctggaatcagcaacaatactaccaacagattcctcgtgtgcgtggaaatcaccgtcttacatgagcttttaatggatcttcttcatgtgctaattttcaattcttttcttagtttcttctattcatcattacattgtacaagtctgtccagataatttgtttgtatgttacggctgtgagagtataagtgggttttcacatgctattggaatgcttatggccctcagttaattgtgcatagcttaattgtttgacataagcacaatcgataattggtaagctagttatatgaactgatcttggtggttatagtatataaaagagtaaaaaaagaacttgctttacctagttatatgaactgatattggtaacatctactacactgaaaataatactagaatgttgagatcaagttgacagttagtggattcagcatttcagattgacctaaagctccggcagaagcagcgtgtgaccatgttgacatgatatggtggtttggacttgtacatgggcctatgtatatgatatgagagtgttatgggcttgtggcgtaggtccaatctacagcatcactttacgccgtcgccgtttcagtcgtacgctagtcgtataacttcatcggattatataggtcacttattacaaacttgaaaatggatatatttgatattttaaaacaactttcatatagaaagtattcacataaaacacatcgtttaatagtttgataagcgtgctagtggaaaccaagataaaatctttatcttcatattgtcacaggtaaccaacacaaacaaaattttagcatagtttaatccttaagatattatttaagatatactttctcagtctcaaaataaaccaacctcgtaggtacgagattggttcatgacggagggagtattaacaagatactataatgacttggtaaagtggaaaaatatctcgatcatgtcaacgataacaatgacttatggcacccgcaatggttatctataggctctctacaagagatccatgtcagcatatttttctacttggaagagattaaatgaagagaaagagtaaagctatctactaacttagagatagtctatagagaaaaacgaggcaatggatgagatagctatagatacccatgtagacatactattgaggtggtttactattaatctagtctattgctgagatataaatgttttatagagagcaccttactttaccattgcgggtgctcttagttcatgtccaaaattttttgaaacaaatgcatgcgttgtgtaaaagattttaaaaaaaactcgatgttacaaacaaaatttcagagcttttcttggagtgtccatggcggagcgcataaattggctttttcccgtgatattcacgcaagcagaaatttgttagacacatacacaagttgccaattttgagcatgcagtaccacaaaccataatcaagaggagcataacatgagggcatagtaaaactgcagagttaaattaacataagggtcaaaacagtttgccttcaacagtaataccgttcacacaagtaaagcaattcatcgcccctcacaaaaaacttaaattaagacatcacggacaggaataagcaaacactgcagccattctcaagagggaggcgaagaacattccaaatgccaacgggctatcagtcacaaggacccactctaggctcctttgggatcagacggcagcgaagtcggcgatgcagatggcactccatcattcacaccattggcagcaccttcctgggacagaccttcaatcaatggaaacataagtttttgaacataatggaaatggaaacataagttagtcaaaattctgaacaatatgtaatcgatttggtaaaaactagctagcctgttgttatgcattggagaaaatgaagtagaacttaactaaggggtaaaactgtcatagatcacctgctggcgattttcatttcacaaagattctatggtaaaacaaaacttatcaagtatttgtgagaacttaccaaactagaaatgtatagtaaaacaaaacttatcaagtactagtactttctcaaactttcctggggaatatatggacataaaacagcaaaacaggtaaacaaaaatggcaaatgcaaaagtcaaaacaggtaaacatccaaaaaaaattttgtagctctgcttgcgcaagagatgtgcacataagtgtcaaaaatgccaaatccaaaagtcaagatatatagaagatggtcactatacattctagaccaaaatttgtccaaatctatcgaactctaggaaccaaacagccaagcaagcaactcaaatgaacgccgttccgctgagaattcacaactgcatagttatcatgaaaaacataggcattacacacatgccacatacacacgacacaccaatcaacatgacacatcaaacacacgaattaaccgatcaagccatgacattgaacgcaaaagcagatataattgatgatataatctgtagctgctcaacactgacacgagcaattggatccgtactgcaaaccagaacattgacaggaaaatgtgaagcttgcggaatcgcattacctgcggagagcgcgggtgggagtttccatggaagaacgctttcagaagagtcgcgggcctcgtactccacgaccttcctcgcgcgcacgtcgacgcccaagatatgcttcttcaggaagaagtacagcacgtccgggttcatggggtggacgaacgcgttcctgagttgaggggccttctccggcagctcggtcgccttgtagctctcgctggcccagatgtcggcgaagctcaccgtgtactcaggcgcccactccgcggtctctggattaaccagcgtgcgcatggagacctcgggagcggcgccgtggcttggagagctcacctccacacacctgaacttgccgtcgatcagctgcacgatgcggccggtggcgagcactctctcggcgcagtagccgcagccatcgtcatcgtcttcgtcttcagattggaggtcgtcctccttgtcctccagtggaacgtacttcatgtccggctcatcggcgaacggatcgcacaagaggaggcccgccgcggtgtccacccaccagagcttgccgtcgtgacagatgatgtcatagaaggtccagatccagctcggcagtgggttgccgacgtccttctcctcccactcgccggtcacggacgagaagcagagcagggtggcctcgtcatcgccgacgatggtctggagctcgacgaccatgtagttcccccggcctcctcctggcgcggcgatgacaccgaggtcgttgttgaagatgaggcgctccgggtcggggacgtgggaggcggtggcggcggcgacgtcgcagacgaagtagagcgggcgcgggatgaggctgacgcggaacgtgcgctcgttgccgtcgcggtcggtccaggaccgcaggtcgccggagtcgtcgggggacggtggcggcggcgcgacgaggaggacgagccccgcggaggggtcgagcgcgaggacgaagggggacttgcacctggcgcaggggtccacctcggccggcgagacgcgccgggacaccgagagcaccgcgacgcgcggcggcgcggcgagggagagggcgacgtcggctccctgcggcaggacggggtcgtcgccgccgccgcacacccgcggctcgcagctcaggatcacccacgacggaggcgccattcgggcttggtgcgagttggagagcggcgagccggcgatcgatgaggaggagtactagtagaagctagggtttgaggaggggatgagatgagcaaatcgaatcaatgggaaagattggtgggacgagtttgaatcaatccttggtttttgtggcgtggcggagaccagaaatgcagagctggagcctggaggatgcatgggtgatcttccttttttcttttggcacttgccgtttcggtgtgtgcggggaggggcagctcggggaaaaggcagacgagccgcatcgacgtgaacggaaatattcgccgcaagctccggaccactgcccgtgtctactacgcatatcatcacaggtcgtaacctcatgacacgaacatggtgtcgtcgtcctccccgtcgtcgcctaatactggcttgaactcgaccaccatgtagttccccccgcctcctgggccctggcgcggcgatgacgccgaggtcatcgttcaaggtgggctcccccggtaggggacgcgggtggcggtgccggcggcgacgtccaagacgaactgacgaagtagtactagtacgggacccagggcatgcagcggctcgtcggagtccggaggggatgggggcttggacgaggacaagccccgcggaggggtcgagcgcgcgaggacggagcgagacacgcggggacacggtgagcaccgactcgcgcggcgagctcgagggagacgtcggcggcgcgctgcattcgtgcgtgcgtgagccgagcgagacgtgactcgtgtagcaacgtgagctttgctgctgccggcgtgccgagctagtcggcgtacgtgagtcggacgtcgcgcgcggcagcaccaccgccacgccagcggccgcgctgcttcgaccagctgaacacaaatgagcagcgcacgaaaccttccgctaggttttaggtccacgagccagtgagagagattagggtaagaaaagaaacaaaatgccaaaagagatgcacgtcgtcgcatgcaacatgacgcgaacaaaatactttctactaggcatagcatagcttaacccttgagatttcttaacaacatactagaacgataattacttcacaatgtgaaaaaaattgattcaccggatacaataagcactccagaaaaattcaaacaaatgcatgccttggtgaacaatctaatgatttcgtaatctgtgtttaggagcgtttagtatttttttaaaaaaaaacagaacaatttaatcccttttcgtcaagatgtagattgaatttatggcttgcaattttttttctaaactactacacgggaacccgccttgatggggatcaaaaagaagagcagcaaatggagaccaggtgtgcaggcagggcaacttgacaagtactgtgtgattttcactcaaagttgattccaggttccaactttgaggatgcagcagcagaaacaataatcaagaggagcataaaaaaaggcaaattaaacctgcaaagttaatttaattatccaggcatgcgatcaacatactactcgagtactagcgcaataagtgcaacagtactatccgacataagcacaacaaatcatgaaaaggaatagcagcattctacagtcattctcaagaggcaggcgaagagaactccaaaatgccaacatttgaaagatccaatgcaaaatgcctacatccaactggttatcacacgcacaggtagcttcttcacttgagctttgtggttccctggacgaaacaagaacaacccactctaggatccattgggatcagatggcggggaagccagtgacgcagatctcacaccactcgaattattggcagcaccctccttagacaaaccttcaatcaaagaaaacacaagtttgtcaaatactaacgaacatgcatgtttgagtgacaggaagtggtactaataatcttgccctaaaagtgcatttgcatggtttgataaaaactagacaaatttctgttattataggataaaatgaagaggaagcgataactgatagaacaacttgatttgagtgacaggaattgaagtggtaataatcttgccctaaaaagtgctatatggttgtcaatattcacatatatgaataagagaatatgaagagcaagaggaaataataatctgagactgcagcaagaagttggtgcaaatgttaggaataacaacatacagcaaaataaactactagcagtaacgtttaagtgatgaatgaaaaagaaaacatgaattgatgtttgtagatgtatccatcttcaatacaatgtgtacaattgtgtatattgttctcaatgataggtctttgtgtcttaacaccttattagtacattcagaaaaattcagggcaacataaatgttctttacatgaacaaaaatgaatgtattgcaatttcagcgtatggatgcaagatgtgtaattatacatgacacatatcacacggttcatgcagtcactttcagtagatagtgggtatgaattaagcagcagaactgaactttttatcatactgagtaatgcatatttatgtgcaaattaatgtttgtgaaaacgaacaccataaataaagttctagacattgtcaaaatttaatgaatttcaggaaccatcaagatcaacatatgaatggccaaatagatatgcaagaaactcaaatgaacaccaatcaacatggaacactgaacacaaaaactaactaatcaaaccatgagattataaacgcgcgcaaaacggacaaaatagctagaacatactgctagtagtataaaattcatcaatactgtcactacacgaccaataggagcaatactttgaaaccgcagtaccatgtcccgttctaattagcagattcgagaacattgacaagacgagcactagtaatatcaaggaagtgtcgagcgcacagaacaattacctgcggagagcgcgggcgggagctccattggaagaaggccgtaagaaaacacacgggcgttctccggcacggtcatcttgtgtgtctcgtactccaggacctccttcgcgcgcaggtcgacgccgacgagctggtccttcacgaagaagtacaccatgtcggggttcttggggtggacgagcgcgagcaccggggccttctccggcagcccagccgccttgtagctctcgctggcccagatgtcggcgaagctcacggcgtactcaagcgtccacaccttggt

SEQ ID NO: 2582 - DNA, 616 bp, Oryza sativa
catcattaacatccgcgattcttgcccttaccctttgagcctatatgtgtattgctgaaaatattgatagctcgtaatggatgctttagactgtatttgattcattccgagctgcattcttaagaggaaaattctgtcaaacaaaagacccatctgatttgttttactttagatccttctgccccctgttaaaacaaaggaggttttgtgtgatgaatgatgatcctcagctcttactgaagaacaatttgtttggtttgcaggtagcgataaaagaggtgccaagacaccacccccggtgaattcagctgcaaaggcgaagagatggctgtgagtctgaagagaaatactaagaaagtttcacttcaagctgagggggtacaagcctttgccaaggctgaaacattcttccaagtcaccggtgaactttagctcctgtttatgctgaaaagtctcatcttcataggaaaccccatttttcagacttcagagtagggcaacatctaggttacattctttgtaacgattgggactttttaggaggttacaaagattgaaccttggaagatgggaaggcgaaacagcggctatgtacttgtcttgcgttctgatatgc

SEQ ID NO: 2583 - DNA, 11849 bp, Oryza sativa
tccttctgtttctttaaaacgagtggattctgcttcttttgttaaacagtttcctagacagttctctctaggcccttctactcccaagcctgtttcagttatgtctcctgaatctcagtctgcttttaaagtcagagctgataagttggctgcattgaaatcgtatcgcagatctaagggtctttgtttcacctgtggagagagatggagcagggagcacaaatgcagtccatcagttcaattacacattgttcaggagttattggaggctctacaacaggatgattcacatcaggaacttgctgactctgattctgttgagacagttgtgatggctttgtcacagcaagctttctctggcactgaatctgtcacttctttcagattaagaggttgggttcagggtattgaggttctgatgttagtagactctgggagttctcattcctttttggatgtttctctgacctccaaactaaaagggattagacctttactcaaatcggtatctgtcaaagttgctgatggtggcattttgtcctgttcttcttttatcccagcttgtacttggtgtactcaaggccaatattatcaaactgaattcaagatacttccattgggggcttatgatgtgattttaggcatggactggttagcttccttggggcaaatgcatgttgactggtttgctaaatggatggaatttgttaaagatggccatccagttaaattatagggtattcaggctcttactgatcaatgccattctatccagggagatcagttacaggggatgcttaagttgggctctattatgcatgttcttcaaattcatcaagtaattccttctcctgcagtctcttctgttcctggtttgcagtctgtgttgcaggaatttcagtctgtctttgaagaacccactaccttaccccccaggcgagcttgtgatcatcacattcctcttctccctcattttaagcctgtttttattcgaccttatcggcataaccctgctcaaaaagatgagattgagaaacaggttaaagatatgttgctttctggtgttattcaacctagtaacagtgcttactcatctcctgctctgttagtgaaaaagaaagatggaacttggaggctttgtattgattataggaagttgaatgctattactgttaaagggaaatttccattgcctgtgattgatgaactcttagatgaattgtctgggtcaaagttcttttctaagttggatctcagggcaggttatcaccagattagattggttgccggagatgaacataaaactgcttttcagactcattctggtcattatgaatatagagtgatgtcttttggtctcactggggctcctgccacttttcagggagctatgaatgatactttagctcctgtattgaggaaatttgccttggtcttcttcgatgatatattggtttacagccctgatctttcctctcatttgagccatctcaggcaagtgctgcaattactttgtcagcatcaatggaaagttaaactctctaagtgctcttttgctcagcctcagctttcttacttaggtcacatcatcagtgacaagggagttactactgatcagtctaagattgaagaggttgtcaattggaaagtgcccacaactgttaagaaattaaggggtttcttgggtttagctgggtattacagaaaatttgttaaaaattttggcatcattagtaagcccttaactcaactgctgagaaaggatgttccctttgtttggtcccctgcagctgaccaggcttttctgtccttgaagcaagctttagtttcagcacctgtcctagccttgccagatttctctttgcctttcattgtggagacagatgctagtgatgggggcattggggtagttttatctcagcagggtcatccaattgcttttgttagcaaggctttgggtgttaagactaaaggattatctgcctatgagaaagagtatttggctattttactggctgttgatcattggagatcttatctgcagcaaggtgaatttgttatattaactgatcaccatagccttatgcatctcaatgaacaaagattaaatactccttggtaacacaaagcttttactaaactgttagggttgcagtttaagatttgttataggaaagggtccagcaattcagcagctgatgccctttctaggaaatataatgatgactccagtgaattgcaattggtttctagctgtgctcctgtgtggcttaaggaagtcactgatggttatcttgaggataacttctctgcccaacttttgactgatctttctctgaaggccaatgctcgaccacctttttctttatgcaatggtgtgttgaaatataaaggcagggtatggctgggtaacaatcttgagatgcaaaataaagttattgctgctcttcatcacagtcctatgggtggtcattctggctttcctattacttatcagcggatcaaagctttgtttgcttggcctcgcatgaaacaacagattcagcgttcgattaaaggctgtcaaatctgtttgcaagctaaacctgacagatccaagtatccaggtttattacaacctcttccagtccctgatggtgcatggcaaattatttctatggattttatagaaggtttacctaaatctggtcgatttgactgtattttggtggtggttgataagttctccaagtactctcactttgttcctctatctcatccattttctgctgtggatgtgtcccaagcttttatgtgtaatgtgtataagttgcatggtttgccttctgtgataatttctgatagagataagatcttcaccagtcagttttgggattagttatttactcgttctggtactcagttgcatctcagtacggcttatcacccacaaacagatggtcaaatggaacgtgtgaatcaatgtctggaaatttatttacgctgttttgttcatgttgtgcctaccaaatggagctcttggttatatcttgctgagttctggtttaatacttcttatcattcagctttgtcaaagaccccttttgaagtgttgtatggctatcctcctggtcattttggtattcgtgaagatgcttgtagtatccctgatttgactgaatggctcacagagcgaaggttgatgactcaattgttgaagcagcacttgggcagagctcaacaacaaatgaaacagtatgccgacaagaagagaagcttttgggaattttcagtgggtgattgggtttttctcaagcttcagccttatgtgcaatcttcagtcgctaggagagctaatcacaagttgtgctttcgttattttgggcctttccagatcctgagtaaagttgggttagtggcatacaagttacagttacctcctgatagcaccattcatcctgtttttcatgtttctcaacttaaatctgctgttggattctctccttctgttcaacctcagcttcctgccttatctcatctgaaggtgccggtggctgtgcttgacagtcgtcagtctcatcgaggtaactctgtggttccacaagttttagttcgatggtctggtgatgttgctggacaggaaaccttggaagatcatgtggagctgcaacagcgttttcctggtgctccggcttgggggcaagccttgtctcaaggggaggggattgtcagctctgctggagtacctgatctgctacaaggtgctgctctgaaggagggtgtcaagcagacttccaaggacaggccagcaagaatgattaaacgtaatccaagggtgtttggaccaaagtgggcttaaggcccaggccagctgtaagggtgtgagttgcatgtggagtgtgaattggtgagagagcgatataactaactctgtaatattctgtttcactcggtaagaaagaaggcggtgatggcggcggcggtgccaatcctgtcggattagtagacgatatcagttcttgagaaagtttgtgtgttcttagttagagtagctaacagaggaaatcgattcgacgaagagagatggcgaggaggattggtaatacgagtttgaatcaatccgcgtgggtttttctcgcgtggtgctgtggagagggtagagaggccggcgtgcagcgctggagaggaggattggtgatcgttctctttttctttttggcagttgccgttttggtgtctgcagagaaagcaagtcgtcgaaaggcagcggcgaaacgcccgaccagctcgtgtctacgctacgctcctgcgcgcgatgcaacctagtccgaccggtgtgtggcagcgtggggaatcaggcgcgtcggggcggtgcgaaaagagttcgttcgttcgttcgatcgtgcattcgtgcgtgcgtgagccgagcgagacgtgactcgtgtagccacatgagctttgccggtgccggcgtgccgagctgcttcctgcgcaccgagctagtcggctacgtgagtgggacgtcgcggcaggcagcaacactgccacgccagcggccgctctgcttcgaccagctgaacacaaatgagcagcgcacgaaagcttccgctagctaggtccacgaacaaaaaccaaatgagatgcatgtggtcgcaggcaacgtgacacgaacaaaatactttctactaggcagtaggcatagcatagcttaacccttaagatttcttaataacatactgcaatgagaattacttcgtactccctccgtcccacaatataagggattttgagtttttacttgttacgtttgatcactcgtcttattcaaaatttttttaaatataaaaaatgaaaagttgtgcttaaaatactgtggataataaagtaagtcataaataaaataaataataatttcaaaaaattttgaataagatgagtggtcaaacgttgcaaacaaaaacttaaaaatctcttatattatgggacggagggagtatgatatgaaaaatacttcttcaccggatacaataaccactccagaaaaattcaaacaaatgcatgccttagtgaacaatctaatgttttcgtaatctgttttttaggagcgtttagtattttttttaaaaaaaaatcagaacagtttatctcttattgtcaagatgtagattgatgaatttgtggcttgcaattttttttctgaactacacgggaacctgccttgttggggatcaaaaagaagagctggaaatggagaccatgtgtgcaggcagggcaacttgacaagtactgagtgattttcactcaaagttgattccaggttccaactttgaggatgcaacagcagaaacaataatcaagaggagcataacaaaaagacaaattaaacctgcaaagttaatttaattatccaggcatgctattaacatactactcgagtactaccgcaataagtgcaacattatccgacataagcataacaaatcatgaaaaggaatagcagcattctacagtcattctcaagaggcaggcgaagagaactccaaaatgcgaacatttgaaagatccaaaatgcctacatccaactggttatcacacgcagaggtagcaccctccttagacaaacctttaatcaaagaaaacacaagttagtcaaaatactaacgaacatgcatgtttgagtgacaggaagtggtactaataatcttgccctaaaagtgcatttgcatggtttgataaaaactacacaaatttctgttattataggataaaaagaagaggaagcgataactgatagaacaacttgatttgagtgataggaattgaagtggtaataatcttgccctaaaaagtgccatatggttatcaggaaataatattcacatatatgaataagagaatatgaagagcaagaggaaataataatctgagactgctgcaagaagttggtgcaaatgtcaggaataacaggatacagcaaaagaaactactagcaggaaggtttaagtgatgaatgtaaaagaaaacatgaattgatgtttttatatgtatccatcttcaataccatgtgtacaattgtgcatattgctctcagtgataggtcttagtgtcttaccaccttgttagtacattcagaaaaattcagggcaacataaatgttctttacatgaacaaaatgaatgtattgcaatttcagcgtatggatgcaagatgcgtaattatacatgacacatattacacggttcatgcggacagtgggtatgaattaagcagcagaactgaactttttatcataccgagtaatgcatatatatatgtgcaaatgtttatgcaaacaaacaccataaataaaagttctagaccaaatttgtcaaaatttaatgaatttcaggaaccatcaagatcaacatatgaatggccaaataggtaggcaagaaactcaaatgaactccaattatttgggattaaacgcaaactgaacacaccaattcatcaaaatttactgaacgcgcatactgctcagaattcacaacaggtcggtaccatgaaaagcagtcttatatacacacggcacagacacatcaatcaacatggaacactgaacacaaaaactagccaatcaaaccatgagatcaaatgcgcgcaaagcggacataatagctaggacatactggtataaagttgctcaatactgtcactacacgaccaataggagcagtacttgaaagttgaaaccacactaccctagtactatgtcccgttctaattagcagatttaagaacattgacaagatgagcactagtagtatcaaggaagtgttgagcgcacgaaacaattacctgcggagagcgcgggcgggagcaccattggaagaaggccgtaaggaaacacacgggcgttctccggcacggtcatcttgtgggtctcatactccaggacctccttcgcgcgcaggtcgacgccgacgagcggaagaaaatttggtgagactgaagtcttacgctcccgcgaaaaacttaatctcttgtgcgacacgtgttctgttacaatctcaaagcagataactccctcaaaccctcttaacgatacaacctaacgccgttagcacgcgagaagacagacgcagcgcgcgcggctacggggagatggacgagcgcggcgcgggagatgaaccggtgctcctccatggagtgctggcggcccggcgccgatgagttagaaccattttgagttttcactttgtcagacacaagcatcagcttctctgcaagttctgttgtcttgttattttgtgtttttgcatatggatattataagacatcttctaatctaatctgatgaaattctgaactgagtgctcaagtttgttcttcttgttctacttcactgttggagcttgttatcttaattcccaatttatataatcaccaatagtcaagtttattatcggagcttcaatagtagagctctgtacttaatttatctaatcaccatatgagctcactgtatgtatggtgcagatgcaactgttaggaatcattgccgtatcgttcaatgtcttaggccgctgccgcagccgcggcatatgccaccatgcactgtccctcaggcatcgccggcgtgggagcttcagcctcatgtcgctaccctagctaccgcagggccaccggcgtcggggctttcaccgccaccactattgttcctcaggcatcaccggcgtcgggccgtcagcactccatcgaggagtcatatctctcatcgtgctcgtccatctccccgcagctgcgccatgcccgtcgtcttctcgtgtgctaagtgctaacgacgacgtgccgtatcgttaaggaggtttgagggagttatctgctttgagattgtgacaggacacgtgtcgcacaagagattaagtctttcgcaggagcgtaagacttcagtcttaccaaattttcttccccgacgagctggtcctccacgaagaagtacaccacgtcggggttcttggggtggacgagcgcgagcaccggggccttctccggcagcccagccgccttgtagctctcgctggcccagaggtcggcgaagctcacggcgtactcaagcgtccacaccttggtccctgcctccctggatcaaccagcgtgtgcatggagaccttggtagtagcaccggcaccgtcgcttgcagagcctatgtccacgcacctgaacttgccgtcgctcagccgcacgcagcggcgggagacgaacgctctctcggcgcagtagtcgcagccgtggcagtcctcgtcgtgttctggcgggagctcgaccctggggagcgggacgtactccatgtgcggctcgtcgacgaacgggtcgcagaagaggaggcccgccgcggtgtccacccagtagagcttgccggcgtaggaaccgacgtcgaagcatctccagatccagcggggcagggggttgttgacgggcttcttctcccacaggccggtctcggacgagaagcagaggagggtggccttgtcgccgccaacgatgaacttgaactcgacgaccaggtactttcccccacctcctggcgcggcgatgatgctcagatcgttgttgaagacgcatccctcagggtcggggaggtagtaggcggtgcgggcggcgatgtcgcagacgaagtagcgctgggtcggcatggtggtgacgtggtacgtgtgcaccttgccgtcggcgtcggtgaaggaccgcagctcaccgggaccaggtcctgggggcggcggcgcgaggaggaggacgagccccgcagaggggtcgatcgcgatgacgaaggacttccacttggcaaaggggctcaccttggccggcgtgatgcgccgggacacggcgagcttcgagacgcgcggcggcgcggcgagctcgagggcgaggtcggcgccctccggtagggggatcccgccgccgccgccgtcgccgtcgccgcacgcgtacacctcccggctcaggatcacccacgacgtcgacggcagaagaggaggccccattcgagctcgctcagatgacgccgcacagctgcttggtgcgagctccgggagatggggggagagagagagagagagagagagaggagaggagaggactaggactagtagaagaggcggaggagctagggtttttgaggagagaaggccaggaggaggagcggtgaccggcgagctttcgcgattgccgtttcgtggctgcgtgcggagaggggcggagagccgaagaggagaaagggaggcgacgtgaacggaaagattcgcggcgaaaggtgtggcaggctcgccgcagcctttgtcagttggtgattgaacgcgcccaaccaatccgcgtcgtctaccacactactactcctgcgatgcgatgcgagcaaggcccggcgctgcgtgcgcccggtgcatcagtgcatggcagcgagaggaccgtggaccggtgaagagcgagcgagacgctcgcgactcgcgagtgcacgaattcgcaggggaaaggcgcgcgatgcggggagttcgtgcgcgcgcgcgggcgggagaggctgtcgcggtctcagctagctccgcggcatgcgtgatcgcctgctcggcccagtagaaatcttcccccagttctggacctcgtgtcaggacaccggtggccattgtggtggcccatacaacatggcccgcatggcgttctggatcaatctcagcccaacgccgaacagacacggcccatgttcaacgagcagcccacaccacaacgccttctcggttccgcagcggcgccaagcacaacagattcgccgagagacagcacggcgtgccacggagacttcagggtcactccagcacgggctcctacaccgaaccaaacccatcccaagcatctggaacaccagagaccccagatggcatcgtagaaacaacagctcaaaacacggtcgcaacacaacactgctctggtttccatctccacatgacctcttcgatgcgaacaactcgaaatccaacctccaaagcgcctgaaccgaaaggcgacgcgctggccgagacaaaccccccatacacttgctgctgtccaatctaatcactccagtaaacaaaaccctcgtgccactgtcgtatccatcgcgcaaccgacagcagcgagccccattgatgagcgcccgcgcattgaaaacgcatagaagctcttgacacggcgccaaacccggctcctgtgagattcgaacagcttgccaaatgccaatccaaactgcgacgtgtactgtaatggtacagcaacgggcagcatggagtagtcgaatgattgatccgtataaaaatggcgcatcatttttgttgaggataaaaggttcagaagcaaacagcaaacatggattagtactagtagtactcgtaataaagaggtcagattcattcattcactcgtttgcattagtatttccatctctcctgctgagttgaagagcaggaaatacttgatccaaccaccccatgggccatcaccatgagccttgaacaatactcctagcttatctcaggagaaaaggcaaagtagcagtactaattacagtacacacctacatttgattccgtcacagacttttcttctctcgatggacagcagacgagcgatctgccctaccggcatcaatggcacggtccacatacagcaaggacaaccaagaacaccgggcacccaccagcttactgtcctccattgccggactggagtgcacagctccagagttaaccgtgctgtcggaggccggcgtcggcggcgagcaaattcagcgctcaaaatcagcaactatagaattttggacacgactgggttatgattgcagctttcctacctagctacagctctacaagccatgggagaagattcatggaagcagctattggcctattgtcatcttcttctcttttgggggtttttacctttacacgctgctcccttgatcggaggtgtcctcgtagtagtatggcgacagcttgccgtccttctccagccttggccttgtggcctcggcgcgcacttcttgcagcatcttgaccaccctgcgcatcgccgggcggttgatcggtagggagctcgagcagaggagggcgatgttcagcaccctgttgatctcatccttgaaggtcatgtcgagtttgctgtcgaggacatgttctacccccttctgatcaattgtgctgcacacccacttcaccaggtccttctcgccgaactctggatcgactggcggtttccctgtcacgagctcaagaagaaccactccgaagctgtatatgtcgctcttctcattgacgcggagtgtgtatgcatactctgcacaaaacaagtacatcagattcacaattctaaaggactaactgaaacttacatctaaaataattagtgagacttaccaggtgcaatgtaaccacatgaacccgcgatcactgacatcgacttggggccccggacagtggcttctaccactttggcaaccccaaagtctgcaacacgggcaccgaattcagcatccaagaggatgttgttcgacttgacatccctatggacgatcgcagggacgtagtcatggtgaagataggataacccctccgctgcatccagagcaatcttgtaccgcgtcgaccaatccagcaaaccagccttgctgctgtgtagcacatctcctaggctaccattgggcatgtactcgtacaccagcaacttggtgtcattgtgcgtgcagctacaccagagcttgacaatgttcttgtggcgaatcttgccaagagtcttcacctccgcctcaaagctgttgtcagctgtggatccttcacccccgttctcaacatccgtccccttctttaaccccc

SEQ ID NO: 2584 - DNA, 639 bp, Oryza sativa
tttgccttgcctgctggctagtgaatcacctcacctagctacctgcagctacgcccacgaaggcgcaggggcctcctccgatctattcccgcgcgcgaggtggcgacggctcaacgcgcgggggcggagatggcgtggaggcgacggaggtcacgcggtgggctaaatccggtggctaccgacgatgtggaggacgatggcgacagtgcgaaggacggcggtggtcatagggtatgcgaacggagggaggcagctccggcgcatctctcctccatgccatcgtcgacacttggccagcagcaagtgagccgatgcaagagaggagccgtcaaggagatgggaggaggaatgtatgtggggcccacagttggccagtgacttttggcttgtcaagtttggctagtggagggttctgacttagccatctggttggagaggctgttgaaggatatattttggctggaatggctaaaatttggcttagagagtcatttggagaagctgttggagatgctcttatgctgtgttcggctatttatattgggaactagtcattcacgcacgtaaaacgaagcaaggcattagcgcatggttaattaattattaactttaaacaaatggattgatatgatttttttt

SEQ ID NO: 2585 - DNA, 541 bp, Oryza sativa
acaacctgtatataaatgttgttagccttctgaacgattacatgaagagaagtgcaaactacgcaagaacaagttggatcaaaccttgctggcttggtctggagtttctggcattgtagctacacggcattgctgagcatttaggacttccatcagctcccagggttttgctttatcgggcctttcttctgaaattctaggctttatatcgatgcttctagatgctggatcaccaccattctattaaatccataattaagtcagattgtgtttcaattgctaacagtaaggtaagcaaagaggcattaaacagatgaaactttgggaaatctttcgtctgtggattaccataccattataggagatggctttgcaggagaattcctgtcgatgtgatccatccgaccaatattaggagaaatgcccgcaacaacaggagcaccagagacctgtaaatgcaatattcaaggtcatggattttctaaaactagacccacaacaataacaagcagcaaagagtgtgcaggaaccttcatagaag

SEQ ID NO: 2586 - DNA, 706 bp, Oryza sativa
ttcctgcagccctgcctaagtagacatgccatgaagatgaaacttatcagagtgtgagacgtgatattcttgcaatggaattacatcatgagtgcttccatctggcatggcctggacttttggtgagaattcaacaatgtattcgcagatggagaggaggcagtccatctccctgttccacatcgccttcttctcaggaggcagtggctgcaacctgtggcaggttccaaacacagttgctgcagccaagaacaagcacagaggtcaacccactgttgcctgcatcaaagaccaacttaacagaagattcatctgcaattctcagaactaccatatagattggtgatggcattggagatggccacagccgtgcagacacccttcccactcccagacatgtcctctccaagaagcagcttggtgtacttctccttcatcagctccatctctgaacaacacccatcaatcaaccaccagaaacaccagaggacactaccagaaatcaaaacaggttggcatatctataccttcatcctccagggacttctcgttcacaacttgctgcagcttcttcatgctgagcttgctcaccgatggcgagaggcgtggtgccgtggacgtcgtgcggctcatgcttctccctcgtggcggcgatggcgtatagtgctcctgctcctcgccaccgccattgtcggagaacgacgac

SEQ ID NO: 2587 - DNA, 4730 bp, Oryza sativa
ttcctgcagcccgtgactgaaaagtgacaacaccatatatttttcatctaccatataactacactggttttttttattacaattggtcaatattctaataatgacttccacacttcagctcttccaagggcttgcgtaagtcctaagcacttcgaagaatagaagcacctccaatttcaacaatgagcggtgttcattatctgcttgcatgttcaaaacaattgatagggacacaagtaaatgctgcttacattattagaaagttacatatagagtcacagcaatgcatttctgtaagtaattgtttggaacaaaatcagataacaactatgagctggaattacgccatacaattcaatttcaagtagatgcacaaattgctgatgctctctttttacattattaaatgcagaacaaagctggcttaacaaacatagataggaaaataatacataccgcaaaacctttgccctttgtgattccagtaacatccacaaattgtccgggcacaaaatggcgaactgtgattgttgttccaagaggaataagtgcatcttcagtaacaggaaactcccttagttttctctttagagggactccttgtgctctgaagtggcccacttcaggttttgttagatgtttttccttcttttggcctgctccaagctgataaataccaggaaaagagttccagaagttaggaacagatcttgcaaaatggaaggcaatggaccaaagttaacgatcaataactctagagatttaccaacaagtttacgtttgggccaataaaataaagtctaagagcacacgtttattacgttatgtatctgaactattcacggtggagaagagtcatctacaggtaaagcaaatacaagacatgtactccttgatgccaaaatcccagaaccaggtgcctgatctataaataagttgttgtgatgaatttcggaagtggcagggcctcagaggtaaaacaatgctactataaaatttcaacattgtcatttctacacatttttctatccacaacgggaatagacatttgcagaaaattgctacatggttttcatttcttttgcagggatatgcttcagttactgtttacagtacatctcaatgaattaccaaccaggtattggagaggccctacaatgtgtgatcagatttatattatttcctccgtttcatattataagactttagcattgtgcacattcatatactgtctagattcattaacatctatatgaacgtgggcaatactagaaaggcttataatatgaaacggagggagtatatatcatttcatgtctaaatcgaacctcaacactcttggaagccgaaaaatctccctctaaattattatgactccaacggaagagtgaagaaacactactttcatttttgaccccagcacttaataatttccagcgaaacgaactcagctgatccactggctcgcgatgtcatcgaaacaagagttcacacagagatcagaaacgcgtagcacctgaagcgcgaagaacccctccttctcggcggtcttgacctggcagacgacgttgtcgtcgacccagaggacggtgatgggcaccttggcgccccacttgtcccacatcgccgacatgccgcacttgacgccgatcacgccggtccgccgcgagtccgggcccatcacccccgcccgagcctctatgatccgtccccctcccgatccctcgccgccgccgccgccgcccccggcggcggcgtcgtcgtcgtcggggtgggagacgaggggctcggcggagaaggggcggcagcaagggggcaggcgtgggcccgcgatggagaggtggcggaggcgcgcgaggaggcccctcgagacggccgccatggtggaggcgggtgcggcggcggcgaggctggagatggtggtggtggtgggtttacgcggcggcgaggaggaaggttgggtagggtttagtgagcttcggaggccgaggggaaatggcccagtgggccggcggaggcggagcacaagcacgggcccacttgcaggtgggcttcttacggcttgaggctttcctctctctgaccgtctctgcgttccttcgaactcttttcagaatcacactacaattttttccaaatgtaggtgttcgcaagacgcgtactctcactaatataaatacaaacacaaacatttttagaagactaacccgacgtatcttgatattgacgaagttatcatgggtgtcttactgtctacaaagacttgttcgacaacgatcttttttactatacagcatcaacaggaacagtgttttgtatttagggcaattgtatttctacccttgctttatgtctcaattgtgattttacccctgctttttagggtttgtgattttgcccctgcttttttaaaacgaagcaaccgtctacctctggtttggacggtagtttggtgggcccgggatttccgaattaaacgaagaaagaaaatgctattataatttgtgaatgactattctaccctttttcaatgaaacaaccaaatccccaaacctttgctgtcccgatccaatcgaaaaccctagcttgctgggttgcaagcggcggcggcggccgcttacgcaacaagcggcgacgcgcggcagggaggagtggcggctcgggccagcgcgcggtggagtcgggcgcgggcaggcgcggcgcggcggccccgaggagcggcggctccgtcggcgcgtcggcgtttgctcggctaaaaactctgggttattacatcctttctataagttgtgagagcaggctgcaaaaacaaatagggcagccagctctgaggtgatctggtgatgtggtcattacttcttccacgaaattgtatgatattgttgctgcttactgctcgatccgtcgatatagatttgagctcttccagagttctccagccagtttacatctgagaaggatgtggtcagatggacagatgattctatcgtcggacaagtctcacagttggtgtttaatatgtttctgaatgcgagccagagggagattctgcaggtatttgggattgctttgggttccagatttgtaagtaaagtatagtaggcagctgaagttgtttgtttctgttgaagctaggaggacagttcttgtattttgctgaatttgatgctccgatagggctgcacctattagcgtctgaagtttggggcaattgtgtttctgcccttgctgtcaaaattttgtcaaaaatattgtgttctggcatcgtttataaactgtgttcaaattattgcgaaaattctatcaaaattgtccaaaatattgtgttatgtcaacttttataaaaattttaaacatttaggtcccgtatgaaattcgcacaaaattaacttgaaacatgtatcctgtgcaagccaaaacatgtccaggggtatatttatctattcatcacacatttaacaccgttaccattagttaacagagtaggggcaggtggttgcttcgtttaaaaaaaaaacaggggcaaaatcacaaaccctaaaaagcaggggtaaaataacaattgagatgcaaagcaagggcagaaacacaattgcccctttgtatttctagctgcagcagcgtagcggctgcatatagcagccgaacatgcccaaatacaatgtctattactgaaggaataaatagctgtaaatgcaaacacctgtctcaagtctagtgttcaaaattttgttagaacccaagttttgtttggaaacaagtactcgcaattttcgactaaaaaaatatagctttttttttaacttgttactaggaaacaactgttaattgcctcactcaacacctttttgggttgatagcaacactttgcttatggtgatgctcaaattttaacgaagcaccaaaaaagatcaaacatgaaacatatttaaattcaaaagaaacagcttactattgtttcgtttatacttataagtagaatttaaattttaaaacctaattttgaaattgattttgtgattttttttaatcgtgatttattttcaacatttgcttttgtatcaccaaggacatgtaaataaaagttttttatacgagtgttttttttctatgactaagtataaggataagcgaaacaatggagccattaatgttgagcttatttctgagaagatttcatttatcagatgtgattcgcatcaacaattcaacttgtaagatagatcaactactcttcaggcctgaccgagcaatcagtggatgaatatataacagacggcattcagatgacgatcacttacatcagcaagtattcttctgatgcccaaagcaagtatgaaacacaactagaaatatattgtcgtcgacacgtattgacttattgcataactacactattctacagaaccgaaacaatctaagaactgccctccgtcaaggctcattgcctgttaaacagcaagctgttttaaccaatgaacagaactacagcctacaagaataacagtcttcaacaggtgaatgcaagacaccgagataaacttgatcacatctacaaactgccttgatgaagcacactgcgtaacatctacagtcacctgacctagttctcattggcaccaatacgagaaagaaagcctttgaaaatcatgtttatgtgatacgatgagccaacctcttcaggtctcaaagaaccgaagctccaccattgcctcctgatgcttaggaga

SEQ ID NO: 2588 - DNA, 611 bp, Oryza sativa
tatattgcagtgaaaacgacgctatataattgacaatctgaaggcaacctcttcatatcttctttcccactagcacacaacacacgaaaatggaagcctattcattggtaatacgtaatctagatttgagattatgtagaacattcttcactacaattttacattttggcagcaaaccaaatatgatcaaatgcaattttaccttaccaaatatttggtcgtgaagaaaaatttggcactaacaatccaaatatgccctaaaaattaataaaatatttgtacggtaacaaaatatttgtacggtaacaatccaaatatgccctaaaaaataataaaattgtattttaccagtcttggagattttaatcttgtatagttttcaatataaaaagatttgataactattgatatttatacaaaaatatagagcacagtacaaaatcgcccttgcggagggcggcaagggggccgcctgcaaaattccatgccccctcgccgcccatttgcaggcggccccccgcacagtagaaaatcgccctcgcggagggcggcaagggggccgcctgcaaaattccatgccccccctcgccgcccatttgcaggcggccccc

SEQ ID NO: 2589 - DNA, 645 bp, Oryza sativa
ttcttaatcgaaacagctgccttagcacataaccctggggacagagcaacaggaacatcactggtttcttcaccaccaccaaaacattttggctctccactattctgctgcaatagtacatgataactcaatccagactcggagccaactgaagccaggtcagctgataatgacaatggcacatcccagtaaaccccgtttttatcaatgaataatccaggccaagatgcttctaatgtaatattttgatgaggaagctggaatcaatgaagaaatcttcagttttaatccaaaaaatttagtaacaactatcattagttaagtaaactgattgttccataaagaaggatgaaattttccatgagtcaagtcaaaccttcataactagatacctaatcaatataggaacataatgtgttctattgagaatcccagtgtaagcaccatgaatacccacaaatagctaatatataccaaatagcataaaaagtatccagataatttgccttgtgtcgaaatattgctttgccccgatcccccttcttcagattgtacagctccagtagcaaagtggtatctggtgtaatcaagagttctgtgccaacacctagagacataacatcatgcaggtgccttttgatatca

SEQ ID NO: 2590 - DNA, 694 bp, Oryza sativa
actttctctgctaatactttgtttcttggtaggattcaaagcctcatctcattgttgccccaaatgctggtatagctgcatatcctagttggattccaactattgtaagtataaatgttcttgattagcaacctcctcccattttggatatgagcatgattggctatgaatttccttgtgatactaccactcttaacttcacaaagttgacattgttccagctagtttcatgctaaagcatacatctggaacttaaagtgtattcttcacaaatcgcaaatcatccctttatctcagttgatgatattcaagtaaaaatcgatgcgtttaattggtcatcttttcttctctaacccagacaattttcaacagacatgttatctatggaagaaagtgttagcattatattgtcctcatgtgaacttaaattaaaaatacaccacactatgacagctttaactgatgattgccagtataacacagtatactctatgtcttagcttgtaacagacttccattttttgtgctcattctattcaattttcattgaaggaaataattaggaaagttgggattcctgcaattttcacggacttctgtgaagaagctgcacatctagcttcgtcctgcattacctccataactggtcaacccctcagagtcccagtatgtgttctgttcttggctgcaggaa

SEQ ID NO: 2591 - DNA, 718 bp, Oryza sativa
aattcctgcagccccaattcaggctaggttttgtgttccttgaaaccagacagtaacctttgattggccttctctttttaagaaatgagttttgagtggtgtatgtttcttgctctagacctgtagatcatcatgttaggccatgtttagttcccacgcaaaaactttttatcctgtcacattgaatgtttgtacacatgcatggagtatttttttttaccttgtcacatcgaatatttgtatacatgcatggagtattaaatatagacgaaaaaagaaactaattacacagatttgtgtgtaaattgcaagacgaatcttttgaacctaattgtgtcatgatttgacaatgtggtgctgcagtaaacatttgctaatgacggattaattaggcttaataaatttgtttcacaggttacagacggactctgtaatttattttattattagactacgtttaatacttcaaatgtgtgtccgtatatccgcgacacgctaaaatttttcaccctcagaactagaaaggccttccttatatccttgccttaccttatatccttggaaataaggtgtaactgtagtgaagttgatcaattgaaaattctacggtgatcgtctctggagtttcctatggttatggtacctataaatcacgctaacaaatgtaattaaatattgtttcactgaattgcgacgaaccgatcaatgtgttacttga

SEQ ID NO: 2592 - DNA, 698 bp, Oryza sativa
ttccagtatttccataaaattgagatctatttaatggcactactaattagtctaaataggatctttcttttggtcttttgtttaggttttcgattgtttgcgtatagttgcggttaccggattttcgtcgatcgcgggttttctcgaagattcgtgaagcttcgtgcagaccttgagcaaggcaagtcaccctctgaccaattgctcctataattggaaaatcattattattttgtttgcaacttgcattattagaatcacacactcaacttgcttggcctcggtatgcgtgccaaaccgacggacctacccagtagtcgcactaattcatgtaggttgtgctaccctgatttccttgtcgctccacctttgtggtacctcagtatccgtgctatctgagcgcgtataccaaatatcccacatacaccgttgtttgtcgaaaacttgggaaatgggttcgagaagccttgaaaacccgacatgtggtgtcggcgtgtttgaaaataaaatggattgtgaaaactcgcgatgcgggggttgtgcctgtgtggcactgtcccgtattcgcatataaggaccgattcctgtggaaaattcatccgagcatataacaagtgcgaccacacgcgtgcaatgggacgcccctggctgagtaattagctaatcgggggagccatgatgccaagagacatgtgggc

SEQ ID NO: 2593 - DNA, 618 bp, Oryza sativa
atggtaattgcagaagaaaatgctaagggaacaaaattgtaccttcagtttagaaagtgtttcttgtgcagcaaactttctagcggcttttgaattccgatttgctgcagtacaaatgataattttgctctttatgttaacttctactttgacatggtactctccatcagctttcataggtttcggaaggcctaactcaaatccatgacactgacaaagctctcgaagttctctcatcggattagtgtgcatgttggcgaaggtcaatactggctttagaagcataagcattaccttccaaacatagttcaggttgaagcctgaatctaaaagcactgcgccaatacaagattcaacaatatcaccaagagcctgtattgttgtagataaaacttataagcttttgccataaaaaaaatcaatcaatcaattacatataactaattgcttacagaaaagatcacaatcatggtaatgagctatgattaataattctctaatacacttgcaattattgataacacttttgctcattttgtagaacttataaatctcccctatcatattgaatattaaacagtatcctcgaggagtactccttccgtcccataaaaagcc

SEQ ID NO: 2594 - DNA, 671 bp, Oryza sativa
tgctccaatctctttctctctcctcctcctccacctggatctccctctctctcctccaagaacaggggcggcgaagcagctaagccggatttcgtggttggtggcctctccccttccaccaccaggctcgccccgccgctgccgcgaggtgcccggccgcctgtttcttctctccggtgcatttcgatctgattcccccgtccgatttcgtgtccgtcctgcttcacacccggatggttcgaatcgattcttaaggaggtgaggcgtttaatttgttgttgagctacgtgtaaatccccccctttacatatgcgtggagagattggagcgggcgtatggagcttcgctgagctcacggcttcttcgggataggcgggggaggagggggtgatggtgccatggttggcatgaagcttcgtttctcattttccatggtgttggaatgcagcttctcagcttgagcaatttgagggaaatattgtcaaacccagggagcgttttctcagagcagtgattataatttttcggtttattagcattctttttttaagtatacaacttcctattttcatgtaactatatattttcaaggattgttactgtttaatttgacatcacggctgcatggatccatttcctcctagatagttgcagcttcaactcaatctgct

SEQ ID NO: 2595 - DNA, 680 bp, Oryza sativa
cattggtggaacaacaacgaaccatatccatttgaaaatatgaaagcaaaacaaaagagtaaatagatcacatgaatttgtgtcagggtaatcttcatacagaatggccttctagttctagctttctaggtataaaagcacaagctgatgaaaaaggaagatgtgattcacctgttgttgaagagaaacaatcacatcaggacaaacatcacagaatgtctctaaatcagggcgtcgagagaagaagaaatcttgtgcaagctgagaagcaccacgtaagaacaatgatcctgaggatatatctaaccgggcgcttacccttgtcaaatccaggagaagcctctgaaaattcccgtgttgagctgtaaaattaacagacgcaaagaggtctgcaaaggcagcaaacttgttcctctcatcaaaatatttaaaggcattggattttagtatttcattttgcatggacattctttttgagcaatccccaaaagaaccactggctactgcacctgaacaaaaagaaagtagaaatagttattttgtgcacagctgataacacgtaaatctaatagagagggttacagaattaaaaatataattaattcatgtacccatgcaactataggtgttcatgattcttcaatggacatagctcccaacacttggcagtaaatcataca

SEQ ID NO: 2596 - DNA, 5493 bp, Oryza sativa
ggagcttgaccggagttcttgtcttcggcgacattacctgagacgccgagagctcgtcgggcccgagtatcctccaaggccaccatgacccgttccgtcgccggggatcatcgtgtgggtgcggtgacggaacggtgacgtaaatcctggacgacgacggatgcgacgacggtgatggggattggttgagggcgagccggcggcggggatcggtggcggcgagacgacggatgcgacgaaggcggagcggcggcagtcgagggtggcggcgacgacggatgcgacgacggcggagcggcggcagtcgagggcggcggcgacgacggatgcgacgatgggtgacggcggagtggcggcagtcgagggcggcggcgacggtggtggcgcggggatcggtggcggcgagacgacggatgcgacgacggcggagctgcggcagtcgagggcggcaacgacggcggtggtgccgcgtgagagggagagattagggttggggagcggcgcgcggttggggaggggcggggacgcgtgagagcgagagaaagggggcggagaggatggcgcggtggagaggtggagacgatcctgagcgttggattttacacagagatgatctggaccgttccatgagtaatgaaagaatgagtgatgagtgaaacaccttgttgaactatagagtaagatatatgagtgcaagttagatatttattatctcaatttatgtgattaatgaacctgataattacataatggaaataaatggaatgataataattttcacatctgatctgaataataaaatctcatccactcgaattcatgtttgaacggtctaaataaatgggagcgataatggttttgattttgacatccaaataacatttttgtccgtctaagtctacatccggttgaatttgagaatataattagttacctttttttgtcgcaataccattaatagttagcaaaatatatcaatttagtatcaaatattctaaattatctcatgtaagtgcttacattgttattattgtatagttgaaaacttgaaatgaaactacttaggtattcgattcggaccaaaatagattactaactgattctagttcacatattctccacacatcatatttgtattctcacttgacacacattcgattcattttccaatccgtctcaacttatatcgtgtatgatatagtttagccattatccaatttgaaattgaccgatcacacccctatctagacctagtcgactaactcgacgaggtaagcagtggcaagatgtggtcaatgatatggtcttcggcttgaggttgttgatggcttcttatgcatgatagttcggtacttcggtgatttcttgagttgtgtttagttcctgaaatttgggagaagtttggggaaagttggtagtttggaaaaaagttaggagtttatgtgagtaggaaagttttggatgtgatgtgaggtgatgaaaagttgggagtttggagaaagtttgatgtgaactaaacagggccttggtgtcttgaccttacagggtattcgtatctctaagttcctgtactcttgaggtactcgtagagagaattttgatcagctcatgacaagtcatggtcatatctaacttggtcttgtaaaatcataccctatttggtggccaatatatataacatatttgaggagctttaaaattctaaaaagcagtcgattggcaatcagcttcgatatgagaatataacaaagctaaatttctcagcttttggcttctaatttattttctaaattttacaacaaaaacctcgtgagcaagtcatcagcactccatcggtataggccgttttcgtgagcattgggtacgaagttgaccctctaacctccttgaccaagcgttgcacgaccaaggctgatgtagggaggtggagcacccttggggcccataatgggatcttttttttttgcggggtccataatagggtctttgatctacacacgagacaattcgtggtaggagccgatatggctctgatatgatttgttggctctcgatacaaataacacacacgaaccttgggacaaacacctgatgtttcaaccacacgttcgcgtgtgtgattcatagacaagagccaacaagtagtattagagccaagtcagctcctaccgtcgaccgccaatccgctatgagagtgtgtgggactttccccaacccaccttcccctctatgccggcctcgtcactgcgatggcggtggccgtgagatggtcatgcagcgttccacgacactccgcggttgacgacacgcgccatcccacgcatcccgctcagagtgcacacgacccggattccatatgcgcgccatgagcgctccgcgacccgcgtgtgccgtcgtagcgcgcgactcggactcggactcggacgcgctaccgctgccaccacgcagggtgctcggctgcccaacgagaacagaaaagagctaactaatcatgccaatattaatttgtagatcaacgttggtcacggagcaggtgggcagaacaagaagcggagcctgtcgaggcgtcggtacttgatgccgacggcgagcacggccatgacggcggcccagatcagcacgtccatggcgagcgacgtccccgactgcgacgtgacgaacgtgagcacgaggctggagtaggacaccaggaacggccactgcacggcgcgcgaccgcggcggcacgccggtgagcagcgccagcgtgagcagcatcgagctcccgaacccggcccagctcgccgccatgaacagccagtaccgccgccggtgcttgtcccgcatgatcgggtcgccggcgccgtcgtcctgccagtaccctcccgggatgttcgtccccagctggtacgtcagcgccgtgatcagcgtcgccaccaccagcagcgtgtcgttcttgttcgccccgaaccccggcgcgtgactgcggccgccgcccgccgccgccggcggcgacactgccgttctcccgccggtggttgtcgcccagctccccgccgacctccgccaggtggccggcgcggccgtcctcaactgctccggcgtccatcttacctcaccacgccggcccctaactcaatgtccagctgcaaagcttaattagatcggagaaagaacagtaaaatttttgcagcaatttagacgaagccaatacttcttgtctactaagatcttcttttctactcctatcttgtgttcttgttttcaaacatgctgagtgcatatgcacacaaacacacgcaccgccatatatagaggagaaatttcatagttaaatcacgtactttcttgatcgctgccaatcggtttgggaggtaatttctctgaaggagatgggaagcacagcacggagttgctagtccactcaagtcttctgtccgacgaccttgagctccgtggatatcgcgcgttcaggtaaaaaggacctggagctctggtccgatcgggcgaagactgaactattcagtctctcctcgtcaacgccaagtccacgtggagtctactacatgctgggttctgcttatcatattaatccatttttaaagtattttaaatcataccgaatgcaagttccgttttccactctacctcctcccgaacacactcgtacggctgcgtttgttgcaccagactgagagaggaaaaaatatatctgttttctgttttcccgcactgacgcttatgctaaacgatgtgtttttttataaaattcttttaagagaattagtttaaaaaaggagaacagctactttagtccctaaaatttctttatagaatcagtttagtcctaaccttttaaatagtctaaagaaatccttaaactttgtcataaggcctagaatactccttaggtccaccaaaatcatcatatggatatgccatgtcatcattcatgcaaaatctatgatgaattgtctaatttaaccttatgtatatcatagaaaaataaatataaaagtgaattagacatagccataggaaaaaaatactctttttttcaccctttagaggtatatttttgctcttacatataccatgtattttttttaactttttccttttgttttttattttcctgtgcgtaagggtaaattggacaaatcatatagattttgcataggaatgtgacatggcatgtctgacggagctcgtggctcctcaccgggagaccgcgcaggcccccctttgccagttcggccgggggcttagggtgagatctcaagctctctctgtatgtgggaagatcgcgtgcccggaagaaacgcgagacacggacgatgtatacaggttcgggccgctgggaagcgtaataccctactcctgtgtttttagtggatctgtgtatgagggagctacaaagtattcacttcctttcccctctgccttccaaaagggaaaaagtccccccactaaatgggcaaggtcctccttttatatctcaaggggataccacatgcacctttctctttccaaactggactgttctttttctctttaatgggcggagatcggtacggtttccatccgggagcccttctgatgggacagcccacacctacccccacctcccccgaagacagagatgacgcgggaccgtggctgtctgtcgatgacgcgaccagtgccagaccggtcattcttgtccaccacgcgtcagcttaacaacgtgcatgtttgcccttcttcgtgtaacaccttgcctgtaatggttaggatgaagcctggtataaatctgaccagggctaacgtgccatctctaagagataacacgctagctccggcttgagacgagtgcctagaggctttcgtcttgacgggatggggcaaggtgtgcgtcagaccgccagtcgccacctaacccgtgatctgaccggtctgtgactggtcacagaccggataaaggaacgcgctgtactgcgttgcatgcagcgtgacacgcttgaccagactgcaataaatgctgttaggtgagcacagctgtgctcacttatcccatatatgtggcgcagacttccttaaggggtcggggtgcctcggccctcggggccggggcaagcgcaacccgaccccccctcgggggaaatcaggaggagggcggacacctcaccctcgggcccgacgtccccgaaggtgccaggccatgtgggcgattgcgtctgcctcaagcctctggtcatgatactcccggtcccatatcaccgacaatgtccatgtggtgattttggtgggaccaaggactatatcagtccacatgataaatttaaaggacttgtttggacaatatgaaatattaaggactaaaatgacccaggagcgaaactttaaggaccatattagctattctccctttaaaaaatcataatatttatttttttaaaaaatataaaataattaatacttaattaattatacgctaatggtttaaatcgttttacatatttctcaaatttctttt

SEQ ID NO: 2597 - DNA, 3270 bp, Oryza sativa
ctaaccacagccaaagtggcgaagcgcaaatctgtaacttacacatacggctctggatcccctggacgtggctacaaatacatattcgcttcgtccaaaaaaaaaacagaaatcttagaggatgaaacatgaagcatattctaatacgataaatatagataaacatatatctatattcgtcatactagaatatgtctcatccccaacatatattcatcatactagaatatgtctcatccctaacgaatatgtctcatccctaactaggttagatgcttttgggacggaggaagtaattacatatactgaacagtgaacatccacaactcagttttatgcactaaaacaagatactaacagtagaacgaggacaggagcagttttatgcgcgaaaacaagatactaacagtagaacgaggacaggagagaagggagagaaaaacgaaatgtttcaacaaattgcgacggttactgaccaacttaagcaactattataatgcaaagaccaaactcctcgttcttacaacactcactcaacgatacatcacaagatataaacaggggcgagcgagcaaggcaggaggcactagagtgacaccaagcgattatacttaattacttatatataaaccatgcattccagacacaccattcatcatcacatacaccaccatggcacaagaccagaacgcaaccccctcctccaggcaggagatcaggatacattcccgacttcacagcaaaattaaatcaggaaggaatacttcgctctaagctcaaccagatctaggagtcccatgttcttccaggctgctgcctaggctgcgaggacgattatcactatgagcaggaccaccccgaatataaccagcaacaagcatatctgcaacataaaatgagaatcgaacaatgtttcacatgttgaagtgagtgccagtgaaatatattaatgagtgctaaaggagtctaaaagtaccagcgaagagttcgacttctgagttttagcagccttagagagttggccttttgcttgtgtagtcgctataacagcattctcgatatgggtgtcaatgtcatctgcagtataggaggagatacacaatcagatataacataccagatatatgagcagcctcgtgcttcaacgtatcaaatagcacataatcccatctatcatccccaacggtaccacataccaatcatttgtccttgatcgtggactagaacagcaagatctttgaagatttcatttacttcagtaatttggtgctgaatttcttgtattccctgatccctctcctcaatgacggcctcattgaacacgatctcattatccaagaagactaattcttgcctacagtaaagaaaaaaattgaggttatcatgttcacacatttgcaaaggagtgaatttgttcattcatttcaaaacaagtgaatactttatagaaatgttcgaaaacaaatagtccaaagcataaccaaatagtactatcaattcaccttcttgattctagaagcgccgtgcgtgctcagccaacttatcagcaccattgttcacctcgctcgagttatagctgcaaagaacaagccatcctagattactcatatgttgacaacatactggaaaaactttgacaatatattatcatagaccagcctcaaaaatatgttgttattattattacagaaaattaacatataatgaatgtgaggtacaaaattttgcaatgatctaaagtaccattgaatggagataattttaagaaaataatgttttgctgttttacttggaagacccaagaagacaggctacacttgaaagtggttttattattctgagttctatgaataagacaaacttcatcgcaagtttagtcagaaaatgaatttatgatattgaaagctagggcctgggggctgagaaagtggaccatgaacaaaacgctagatatttaagggtaaaacaggcagagaaacttatacgctacagtagatcaaaacagcaatacgaactatttggataggatcaaatatgaatgctcatcctgtaaatgcgcaccagaaggtattgtattaggttggaataaaccagggcattaactattagggtcatcaagcacttggcagattaaaagcactaatccagtgttattattattccatttacctcagaaaacataatccagtgttaagtccagtcaaactgaaaatatttttttcatgaaatttttttaaaacttgacgtagaataatttatttgttcaagagagagtatgcaacaaaattattctgcagagtaagtaaaatgtaacaggatgctgtagcattagtacactaccaagaaaatgataaacaatatgccatgaattatattattgtagtaagtgcacttttgttcaaaaacataagatgccaggaagaaaaataagcaagtatttacagaaagaagtacaccagctgactagcaaactacctttgtggcaagcccgcttgagaaatgaagggtgcataagcagcttctctttctaccgctaaccgttgagctttctgaaattctttcagaactgcttggaaatcctttgctagcttcgcatcagcaatctttttgctggcctgtagttccaaacgaggtcatcaacacacattgtgtaatacatcagcaaaaatggaacatagaaatgttccttaaaatagtaatgatcatagattcataggcaatcaatactacataaagcagctcatataagaaatgcaaatgctacatttgatctctacatgattctaaaatctgcttgtagattatttctccagtggcatggcaacacacttgaaaatatcatgactggagcatattgagtatttaagaaaaccattcggttgatgtgctgaggcaaatcactgttcacagtagtcaggcaaaactaagactgatacagataaaaaatgcccaaattagaagtgatgtttccagtcagaatataaggactgggtaggttcagtttccaaaccaatatgcattattacactcttctgtactttgaaggaaaatgtcaaaattgaaggttttctggttcaaaaagtagcatcacatgttgcaattccatttcattttgatgcaaaaggtgaagagtactgaaataattctggtttcaaacatacaagatagaaacagttccaattctgttttgagaaaaaagcaacttggacaaagatgcaagagaatacttacgctgacttcgacacgatgatcagcctcgctagcttgttt

SEQ ID NO: 2598 - DNA, 524 bp, Oryza sativa
agcctgttactttgaaagatgggactgttgtcctgcagtttgaagtgaggcttcagaatggccttgagtgtggaggtgcatatcttaagtacattcgtcctcacgatgctgcatgggatgccaaggagtttgataatgagactccttacacattatgtttggtcctgacaaatgtggatcaactaacaaggtgcatttcatccttaagcacaagaaccccaagactggcaagtatgttgaacaccacctcaagttcccaccttctgtcccatatgataagctctctcatgtctacacggctatcttgaagcctgataatgaggtgagaattttggttgatggggaagagaagaagaaggcaaacttcctttctgctgatgattttgagccatcacttatcccatccaagaccattcctgatcctgatgacaaaaagccagaagactgggatgagagagctaaaatccctgatccagatgctgtgaagcctgatgactgggatgaggatgcccccatggaaattg

SEQ ID NO: 2599 - DNA, 636 bp, Oryza sativa
aaggaggacgagaaggaagaggaagagaaggatggagctgctgccccacgccggaggtcccgaagggagacatgagacacaacataagcctttgattttgacgtcttatcgcggccattttggcggctgcttttttcctttttcgagaacttgggcttttatgttttttgagtgtataataggagattcatgtcgcctatgctccctgcagatgatgatttggtacccctgcttaaatggttagaacttcacggacagtagaagttagtcatgttgggtttatttgtgtgctgtgcctgacatataatcactttcttgatcacctagtgattattttctcgtagatagttgaaacatcaagagtctctttcagaagtgtgaggttcagtgcaagctagttattatctttgctgcatttcctattcttttgctgtgtaagttactaccacttgcaatttccaatcatcattgcagcaatagaagttgcgggcatattagcatcgcagcaatagaaatcgctagtctccgatagcgtcttaaagcgttggttttcgactagcgtcagaatagagagaaaagcgggcaactagaaagcggaagcgggctaagaacagacttcaatatcatgaaagcggc

SEQ ID NO: 2600 - DNA, 5336 bp, Oryza sativa
ttcctgcacccctccaaaacacaactttaacttcttgtttctacaaaaatatttattaaaaagtgatatatgtatacttttatgaaagtatttttcaagacaaatctatacatatattttttacattttcaaactcaagagagttattcatgatttatattcctaaggtttgactaaacgacttcctttatgagtatggagggagtagtttttaacaaatttgtagacatttcattttatcataatgtatttcattaattttgttttgtattatatatagtcttagatcattaattacaaactagatgacatttccgatttagtgttggattccaatgtagcgatatgacatttttcaccaaattttaataagttttgatatagttttgtcgtgaattctcaaaaaacattcaaaactccgctcagaatatacttttcgtcccacgtcgaaacatcaaaattacatgatttttggtgggttttggtcgaaaacataaaccctggttaatactgaccccggtgaccatttatcctggcttcgcccctccgtatacgtatattggactgttggactggaggggcgcgcatcagccacccccgacggtgaagcggcgtcctgactcctgacactcatttggcagctacaacctgctggcggccattcatgtcatggtcatgggaactgggagcaggtgggcagaaccagaagcggagcctgtcgaggcggcggtacttgatgccgacggtgagcacggccatgacggcgccccagatcaccacgtccatggcgagcggcgtccgcgactgcgacgtgatgaacgtgagcacgaggctggagtaggacaccaggaacggccactgcacggcgcgcgacctcgacggcacgccggtgagcagccccagcgtgagcagcatcgagctcccgaacccggcccagctcgctgccatgaacagccagtaccgccgccggttcttgtcccgcatgatcgggtcgccggcggcgtggctcccgtcggcggcgtcgtcctgccagtacccgcccgggacgttcgtccccagctggtacgtcagcgccgtgatcagcgtcgccaccaccagcagcgtgtcgttcttgttcgcctcgaaccccggcgcgtgactgcggcgcccgccgccgttctcccgccgccggttgtcacccagctcagcgtcgtcgacaccgttcttctgccggctggtctcacccagctcagcgtcgtcgacaccgttttgccggctgttgtcacacagctcgccgccggcgcggccgtcctcaactgcgccggtgtccatcttacctaaccactcttaagcctatgtcaaagtgcaaaacttagatcagagaaagaacagtaaaattctagcaggaatttgatgacgccaatgcttcgcaagaatcacaaagcctgtgttcttgttgtgtcaaacatgctatgcatacgcacacaaaaacacacatttatactggaaattttcttagttaggctatgtttagttcccacacaaaaatttataccctatcacattaaacgtttgaacacatatatgaaatattaaatataagctaaaaaaataacaaattgcacagattgcgactaatatgcgagatgaatcttttaagcctaattgctccatgatttgacaatgttgtgctacagtaaatatttactaatgacggagtaattaggcttaataaattcgtctcgctgtttgctgacggattctataattagtttttctattagtgcctgaacaccccatacgacaccatatataatacctgatgtgacacgccaaaactttacacccctgattaaaacacccccttaattactttgcttatctctaacaatcattgagaggtaatttctcagaagcagatgggaagcacaaggagtggctcgtttagggcctgtttagttcactaaaagaaaatttctgggtgtcacatcggatgtttgtccagatatcggaaggagttttcagacataaatgaaaaaactaatttcagaactcccctgtaaaccgcgagacaaatcttttgagcctaattaatccggcattagtacatgtgggttattattgtactagcacttatagctaatcatggattaattaggctcaaaagattcgtctcgtgatttcccccctaactgtgtaattagtttttttaatctatatttaatgctccatacatgtgtctacatattgatgtgatatttttggaaaaaaaatttggaactggccttacttgtccgagagctgcaactctagtcgagcgaggacttctatgctctaactagtcagtcgtcatcaagttgccgtggaatttatgcagttagaagttagaacaaacagaagctgatgtagtggatatcttattcaaaacctaaatcaacgcatcccctctcccccatttcacacctcggaatccctctgattatcttagtcaattcaaaataatctgaacttggatttccttatctgacagagaattcaggaatatccaacttgtcatcacagcttatctcatcttatgtacaactgtaacctccgttgtataatatatgacgaagttgaattttctcttaaaccattgctgaagcatatctcatttcatcacgattaatggctaagattgcatcgataatgccatgggatcctggtggctgctgcttcctcaagttattagctatatcagctttgtgggcaagctacattttccaggccatcggattgttgttggacagttgagtgatagttctatccttcacaagccaaacatttcgatttgcttgagctgtcttttgggatgctcgctctgttggcaagctgagaaatgaagtccacatttctaaagctttatgacagatagagggtttgtaatgtcaaaagttcacttgccgtaaacttgtagacaagtcgaatttgaaggagagatttgaacgagaggagattgaatttgtaggagagggggattctcaggagttattgggtttagggatggcaataggttaggtcaggcacgagcatagcaaatccatacttggcttgagactcacgtgcccgtgtccgacccacgcctgcgaagtctcttgggcaaaaccccatgcccgttgggcacgggcatgcccaacggatacccattgggtatcacagtaaatatcttaaccccatgcccgtgcattgccgtgtcgccagccgccgcctgctcccatgcgccgccacctgtgccctggcgccgccgcgtcgccatccacagcagtgccgccagccatcgccttcgcccgtgcgccaccacatcgacgcctgcgcttgtgcgccgctgcgtcacgctgccaatagcctcccgcttccttcccgtgctccaccgtcgccgtgtgaagacactggagaagagtagaagactgagagagtgagaggtggcagtggggaggaggataaggttaggggcttggggattttcaggctagggttttattgagtgaatatatattgatgctgtatacaaataggtcaaatgagctattgggtcataagagaaaggttaaactattgaaggtctcaaggatatacatggactaaaaaaaattaatttttggctcaagctgtcaagcatgggttacccgcgagtgaagtataaaacccgtatgcttctaataaattcgcaggtatcgggtgggatatgcccaatgataaaaataggtacccactcccatatccattggttcgagtatcatgaatacgcgaacctacattggattgcactttgcacccttggctgttcggaactgcgaaggtcacattggtgtgtttcaaacggagtctcttttcgaattaattttgcccgtccgtgcttgggctcgtgacctgagaaattgtgtccaatgggctgtcgcccacgctcttcgccagcttggtccatgggctctctctctctctctctctctctctctctctctctctctctctctctctcattcatcctggaggaatggcactaattcgatcaagccaatctatgtaaccgcataaacccatttgcataaccactcggaatcgatggactcactgggggggcaggcagtgtgtgtgatgatgcgaatccaggaggagcctgcagcggcaagcaatgcaaaaacgaagcgaataaccaaccttgagtgtccgtgctgctgccaccgcccactgaagtggctgctcgtctctacggagtaggagtatgtgggatgtggcctacgcctatggtttttttggtcggtccagctagcctagctcatatgccctcgtccacccatgtaaaccgcgacggaagcatggcacaatccggcacaccaactcgtcgattcttccggcaaattcttgcttgcgtgaggcccgatcgagcatcgaccgacactagctaccaacatgtcctaacaacaaactgtcagtacacaacagcaatagttagtgatcgatactggtcgcattgttatcttgtactctagaatgtcatggtcaaatatcaaatatttgtccaaaatcgttcgtttcgtttgacctctgacgacctcagccgagttttgtgctatccatatttagttttcttcttcttcttcttcttcttcttcagcagcgaagccggtgacagtcacgcttttatttacaggagtattttttacccgtcctctacatctaattagatatgtacagtattttaaaattgaaaacttagctcctaaaacaacacaatccaaaattcgctctttttaaattagaaccatagccacttaaataacacaatctaaaattcgcttatatagagatttgaattcaatatcttaggatgctacttaggttaccgcaatcactagactttgcctttgacaataacgctagccgtgctgcacaatcacacgaagttagttaaattaagccaatcattgggctcaaatccgtgtccctttcctcgaaggcgaaaaggagttgttgataaaggcttcgatgctgcacacgacctttcttctgcagcaaactataccttgcctccatttgcaccaagaccagagcacgcacgcttgccactctatatactggcacacctcgcggccatggcgagacacactcctcgctcgccagcaaactgctgcttgcgaccgcgacaatggcgtccaccggcgcgctgcttctgttgctcttgtttgtgcttgcgtgcggcggcaatggcggcgcggccgccgcggtgttctccgggtgttcgttcgagagccaggaggaggccgaggcgttcgaggccgcgctgctgcagcaggcgtgcttcaacgtgacggcgttcg

SEQ ID NO: 2601 - DNA, 2635 bp, Oryza sativa
attgcatacgtcttagagtgattgtcaaaataaaagagtttagtaaaaatgttaattagttatgtaaaaaaaattgtcttatagagtaactgacatgctacagggatataaatatatttgtattacttagcaagcatagcagtgcagaatatggtcaagagaataaatcagggatcatgaacggttcaaatgtgccatcaatggggctatcctatatttcctgaaagagtcatccactgtttttcctttttgatagtagtcaatgacacaacgacaaaatgttcaatgggataaaagagtaccaataggattaaactgtttttttaccatcatgtttttacagtgagtaacgagaccaaaactccaattggttaattagtacgtaccaattagagaaatcttcaaaaaatgaaccaaaactccccgcgattaccttccacaattccaccttttcttctctacacaagcctgaaacagagtaaacatttgttttcacatggaaaaaattccatcaagcagttggccataatgagaaagagcatccaatcaagctatgtatcatttttgcactgcactaaatatcagagatttgcagcatttttcactgcactaaatatcagtaatgtaaaatattattaaaaaggaagcttaacataaacttgttagtttttctttgaatgaataaacttgttagttcttacgtacatactacatacgaacgaaaataagggaggaccagatgtgcattcagtgatggtggcattcatgaacctgagcagtttaaaaatgaagaaatatacatcgcttcagaagcaccagaaaataagatagaatgaacctgagcagtttaaaagtaaacattgcacatggtacaaaagcagaaatcgattaatttccgggagatataatgagcattgcacaaagcaatggttgaaaggcattataatcatacagtccaatttgtcagatatttttaatacatacacatatttgtctatacgatatataattctaatcatggaagtgtatatttcatcgtcgataattaactcacttttccttaaactaactctagaaaatcccaataattaagaatctaatcagaatctgcttgcaagtattgggtttttcattaaccaatcaaccaatcgcagcagaggaaatttagggggagaggataaaccaaggcaatttccgccttaccttctgcgccttatcacgatgcgaacaaatcgattcgtcaactacagtacaacactaactacctcatcctgatgaaggcatgaagcagagaagagaatctgaatttattcagacattaaacatctgatttttttttcataaattcactaataaactggtaagttgttcctttagagtttagacaatacattgaaagtgcttgcacattactaatgcatggcattctacatattcaggtgtcatgaataaaaatgtaaaccaaatttgactttttaaagggaaaaattatcactgcacaaatcagaactttccatgtggttcaatagagcacaattccaccattgaagtaaaatctcattatgtatataaccttcggtacacatcacagaaaatgtatacaacggaaagtaaaagaagctctcaatattggcatcatgatttagataattaaattcttcttttaacttggatgtcaatttggatgttgatctcttaagagagcacacaacatgtctatcaatttaattggtttcctgggttatgttgttgaccaagcaatgaagttcaaaagaaattatctaaattttcagatataaacatcccaataatgacttaccttgttggcgagcggatcgcagcctgtgcgaggccagtgccggggttgagaaatccgaccaccgggacttggaatctcgaactcgcacgcggccagaggaaggggctggtgccgggatcaaccgcgaaaacagggcggcatcactaaggccagatcggagcaagagggaggagcgctaaaaatcaaatggaagacatcaaacccaaatcgtgcttataacttatttaaactgtataactacgagaatccagtttgtgagtattttttaagctctgttgaacacatgataacatcataatattatattcgcatcatcacaatacatgatctatttaaattgagaaaataatttacagaaccaaaagctggtctgcacctgaattgccagcatcacttgtttcaatcccacataacagaatgaccagcacgcatgtttattgtactataaaaatttacaccctacttatcaaaacccaagacatcataacctactctcattcttcagtaaaattagcaaccagaaattaaatgggcatcccacaaaggaatttaaccttctcacatcacaagaacatgcatataatttcatatacaaaaattgcaaaatattatatccatgtgaattaaattcattcttccaatatagcaagcaaggtgtacacctcagaacaagtaacaatgagtgtaacacatcaacagaggcggcttatcaccatattgggttcaggaatgatctcctccagatggtagattgtctaacattagtcaattgacgggtgacttcagagggaattcatctgaaacaaaaggctgggc

SEQ ID NO: 2602 - DNA, 674 bp, Oryza sativa
tttatttttaaagaaaatgttgtgtaattattagtctaacataacattcagacaacgaaagttacctgagcatacaaacacttgagagtgccccaaatgcatatataatgtctccttttttgcggggaatgtataatgtccttaactatgtgcgtatttatagtgtgctatacagacaaggtgaaaatttgcgtaggactttacattatcatgaccgtcatatgaatacagagtgagcgtgtcacacagattatgctgacaataataaaaaaattgtgcgtgacaagataatgatttaaccatggcttatgtagattgatttgagagaaacgcccatagaaaatattctcctcaattgaattaacctatcctttactagacaggggacttacgtgttgattggatatagagacacctgtggcagatccataagtctctatctgtatggccaaatcaataattcaagtcgcacactcccataatccaccttcttttctttcgtaaaattaattttaactatttgtattatttgtatcacaatagttcggagttgaagagaagtatctaaatgacatatcttattttagaataacccatatttatagcaataaaataccacaacctacctatatgatatcacgatacactcagagccgtatagatgcaaactacaa

SEQ ID NO: 2603 - DNA, 658 bp, Oryza sativa
ttcgtttcataatactacctccgtttttttatagatgatattgttatatcttggacacacgtttgatcattcgtcttattcaaaaaatttacgtacgcgcactcacccctacgtcgtctaccactgaaagcacaacaccgttaaatcctggaaaattcgttcccatagggagtcgaacccaggatctcaggtgctactgaggctcttgtaaccactaggctacaggtcctttcgcagatttatatcttatgtatttgcataaattttttttaaataagacaaatggtcaaatatgtccaaaaatcaacggcatcatctattaaaaatacaaagcgagtatttggcaattttgaaaaggacttgcttgagtttgaccactgatatcattaatttaaatcgtctgactatgataaacgagatttatatgttcacatctaccacgtcgtacttgatatgtattttttagtatttataagattatttacagaataggaacgattgccaagtctactccatccgtcataagatataaggtgtgatcaaaactgacacggtctctaaaattatcatttaaccttttgtcttctcacatagtaactatgctagtagcaacaaaatcatgataataggaaagtgtacatttaaatatcaatctaat

SEQ ID NO: 2604 - DNA, 678 bp, Oryza sativa
attcctgcagcccccgctactcttctctcttattttttatctcattaaaatatgtttgtagctggctaatagtcccaaaattttttgaagtatacggacacacatttaaagtattgaacgtagactaataacaaacaaattacagattccgcctgtaagctgcgagacgaatttattaagcctaattaatccgtcattaggaaatgtttactgtagcatcacattgtcaaatcatggcgtaactaagctcaaaagattcgtcctgcaatttacatgcaaactgtgcaattgattttttttcgtccacatttaatgcttcatgcatgtgtccaaatatttaatgcgacggaatttttggaagtttgaagggaactaagggtgtgtttagttcacgctaaaattgaaaatttgattgaaattggaacgatgtgacgaaaaagttgaaagtttgtgtgtatgaaagttttgatgtgatggaaaagttggaagtatgaaaaaaaagttgagaactaaaccaggcctaagcacggcctatctggtctaagctttcacaccttctaagccttatattcctttcatcttccatctaagaaaaattttcactattgtactagaaaaccgttgctccttgtattgagattgttgctacattgaaactgttgctgattgagctaattg

SEQ ID NO: 2605 - DNA, 1310 bp, Oryza sativa
tgatactactggagtatcactgggatactcagaaggatatccatgtatgaagagaaaactcaagataaaatcaacgtaaataatttcaatgctagaaaatcatatgtttatcaagagagggctcaataaaaaccaataagggaaatcgattccagaaaaaagtcgtcatagctgtagaaacacccatagaacatgtagaaaaacctaaatcaaaccccaaagcaagccaaggcaggagcttgagggtcatgaacccagatcttggtctacatatctacaccacaaaagggcattgtccttgatggtagtgacctcgttgacgatggctgcatcttggaacgtggtgagcagctccacctccgtcatgtgctcggacacctaccccacaaacaacttcgtgatctcctcctctactcagtttacacctccaccaacagcaacggcggcgatcaagacggcaacttcctcgacgcccgacgcgccaccctgcatgaccagctgccgtcattgcctccgtgctcatgtgggtggtagagagagagaaagagtgtggggaggggaaggggaagagattaaggagaggataagattaaataggtggtgtgagtagtggtgctggatatttactagtagtatcccgtgtctacgggactccgttctctagattttctgattttttaaagatttttgtcaatgattagtagcggaataaatgttttacatatacctagatgtgattaattgtacaaactagaaaggtatcaatccctatattttccgagaagattttatataggttcatgcccccattcaaggaaatacccctacggcccactaggatatatatacaaagtataaaaagtacatatatgacactaatgtagactagtaatctgcccgtgctaactctacggtgttataatacatttttgttaacgaattacacgttatttcctccgtttcatattatagaactttctagcattgcccacattcatatagatgttaatgaatctagacacataatgtgaaatggaggaagtagtaaaaatatgtttcctagaatccacccaattgagctttattttgatctaggtcagatattaaggcaaagtacagtgatattatattatctaaaatattaattcaaaaccatcaataatcatatttaatcacttcaataccaatatattagacaatgcacatccacacttccacaaaaaatggttgagaataaattacatgttccaagcaattccacgacttctgaatcattaacacacacggagctggcaaaatggagctgggaa

SEQ ID NO: 2606 - DNA, 2536 bp, Oryza sativa
tggaagtagtgggagaaacgctacatcactagtcgagaaccaggcagtagtcgtaactcgaccacttgaagtggagatagtgggagaaacactacatcgctggtcgaggaccaggcagtagtcgtaactcgaccactgaaagtggaagtagttggagagacgctacatcgctggtcgaggaccaggcagtagttgtaactcgaccactagaagtgaaagtagtgggagaaacgttatatcgctggtcgagaactaggcagtagtcgtaactcgaccactagaagtgaaagtagtgggagaaacgttacatcgctggtcgaggaccaggcagtagtcgtaactcgaccacttgaagcaaatgtacgagagatcactacgatcaactggttgagaaccggtgagtaggtgtccatcgatcatttggagtcgtggtacgaggaccgctacgctgccggtcgaagaccagtcgtagctgttcctcaaccatctgaagtcatggtgcgaggaacgctacgctgccgtagtcgtacctcaaccatctgaagttaaggtgcgagagattgctagagcagaattatctctcgaacaccaatggaagttgcggtgtgagagattgctacgtactggtgcgagaaccagtgagcgagcagaattatctcttgaacaccaatggaagtgctagagttggtttattgcaagtgtatctcatgtggccagcatgacttacgtacccaacttatagcatatctggatgtccgttcgcaatcatgtcgggtgatcaagccgacgacgttcgcgaggaattatccgttaacaaccttttctcgagtagtccagccatggccgatgctatgagataggtcatcggtctttgttggtaggttgggtgcgatatctccgcatttgtcgagaatgttctcgataatggagtgtactcgaccataacctactcgagtgctcaattgttcctgaaattattttctagaaggcaagacatatagcagataatatcgagtatgtactcaaaaactgtgtggatcttctagtattatcatgatataacgagcagattaaatatcaggcattatgtaaaccataaacaagcatgatttatacagaagagaacggagtgagcccctagcgttagaccatagttggcctatcatcggaagtactcgcacaacggatattgtataagaagcatgctctaggtaaacataataaattatagatctgacaatgctgtatgatctgaataggtacgataaattgcatataaaatattgcgtacctttgtagatatatgccggatatatctacggcattagtagatcaatttgaaaaatcaatctaccaattaccttattgcgtactcgttcgacatcatatgatctgacatcttttggtacgccgcggagcttgagggttggataatctcgatagaccaagttgtcgatgacgatgatggttccgatctggtcggaagatgtattttagtcgggttagatctcctcacagccgaagtcgtcgagtagcttgttgtcggagagtccatctcttaaacctatctcgtcgaaatcctagagcaccaaaatccccctacctggcgcgccactgtcgacgtttgatgtctcgactatggtatttggacagtatggggatcgtcggtactaggatatacacgagactgaggtaaaagagatggagacaaagatttttatacaggttcgggcccctgaattgtcaggtaataaccctacatcctgttggccgaagccggtattgcttttattcaccataatcacaccagtacaatatgtgggtagcctatctaactgttgtggacatgtcggtctgaaggtctgactcgtagtcgacaacagggtagtcttcctcctcgaatctgtgcccggcgagatcagagatagcgctttcgtatctcctgacggtatccggagacaccgtaggggaatagccatgcctatccttcaagtcgatatccggcggcgtgtcttggcgtatgtaggcttgtatgttgtggcttctggtaggcgtgtgttgattgtcatgggtgtctttcactttcatggtggttgtctctccccctgtcctcctaggagggcttgtatttatacctataggtgtccccttgtccaagtagaactagggaaaccaatatggatacaatctgagtagtacttgtcgtttccatgtagaactctggttatctttccttatccagaactccctcgaggtcagtttccgtataagacatggtatgtagtgtatcctgccgatatttagtcaactactattaggtatatgtggtatctataaccctgacatatatatatatatatactgttatacacatacgtatacgcaggggcgaagctacagccattcataggggtcagttgaccccgacgatgtttcacgaacctctcgtacctctctttattttaccatctatgaccccagcgaacagaaaaactagaccccggtgattttgttgattgttccgggctgcaggaat

SEQ ID NO: 2607 - DNA, 682 bp, Oryza sativa
caagatgattaattagcatgtttgtttgtgtcttcgatgatatctttccctattcaatttttgttgttgcagggtacccgcgctcgccgtttcatccggtgagcatttcgtcgagcagttggtaggcggggggagttcggggtttcttgattcatggggaggagctttgccgttgatttcctgcgctgaagcagttcatcgtccagtttcttgggcaatcgtttctagggaagcaaatgagatgtctctgctgctagacgcgagctctgttcctcgtttttaccattctcagaacttgacgattgagcatggcagattagggtcgtagagaaaacggtgttcgtgtcagcttcttgaggtcagagagccaagaagccatttgggtttttcttggttcatggaggaaatgggctctgctcagctttctgccctagctgtgtgtgtctgcattttcggatgcctagccatggctgatggccagaacgtcactggaggtgatggttcaaggccagctgagctgcgcatcggtgcattattcacatttgattcggttatcggtagagcagtgatgccggctattgagcttgctgttgcagatgtcaatgccgatccaggtgttcttcctgggacaaagttgagcgttataacgcaggataccaattgcagtgggggctgcaggaat

SEQ ID NO: 2608 - DNA, 867 bp, Oryza sativa
tatacaatgtctcaattaaatcagcacataaaatctggtgattcggaggtggatggctcagaggttgagcgccgtggctttggagggcatccaatgtgtgagttttgcaaaagcccattttatggtgataatgaattatacacccatatgacaagagaacatttttcctgccatatatgtcaaaggtattctgcaagactgcagtcattatcttatttggtgaggcaacagcataatgctgactttgtgattgttaacaggcaacattctggacaatatgactactttaggaactatgatgacttagaggtatgctatatatatatcaagctggcatacttgtatgaaatcaagtactgtcttaaattcaatccggacatggacacagaccctgtgaatttcaaatccaacatcaacattacattagagaaaaacaggatgagatgaaatgttgcatgaaaagtgactggtccataaccatatccaaataagtcatacttgaattatgttaatgtgttccatctaataagttgaattatggccatcttatgctactaagtttaatgctcacttgtatttgatttgaggttacaatttagcattgtgcttgtctgtattcagatgcatttccagagagaccattttctctgtgaggataaagggtgcttggagaagaagtttgttgtctttgaaagtgaagcagagctcaaggcaagtgaatacagttgtgcacatcacttgctggaaatgtcaccattctactttttgagtgtctatgcttagttgatctttcattcaattctcttattccatccagaggcataatggtgtggaacacgggaagcacatgcctggtgctgttgacag

SEQ ID NO: 2609 - DNA, 695 bp, Oryza sativa
aagagtctggtgtgaggatctttgtagcagatataatataccacctttttgatcaatttactgcatacattaagaatctgagggaagaaaagaagaaagaaagcgctgaagaagctgttttcccctgtgttctcaagattatgccaaattgtgtttttaacaagaaggatccaattgttttaggtgttgatgtccttgaaggaatagccaaggtattttctttggtgatttatcactgtcttttttgtgtggttccaatcccaatgcaagtagttgaagtagcaagtagcatatgaaagtttaaatactcaaagactgggatgctatgttactcacgaagtcatcttttcttttatcttttcgaataaatgtctggtgtgcagttccgctaactcatttgcctttgtatctaggtgggcacacctctatgcatacccactaaagaatatattgatattgggaagattgcatctattgaaattaatcataagcaagttgacatggccacaaaagggcagaaggtggctataaaggttggtatttctgataatttgtggctgttgatccttctcttattcaattatattgttaaatatatgtttgctgggatgtgaacagattattgggagcaatcctgatgagcagcataagagttttggtaggcattttgacatggaagatgaactcgttagtcg

SEQ ID NO: 2610 - DNA, 620 bp, Oryza sativa
tcaggatttaattgacaggttctctacatctgtatatatggatggaaaacaaaatggatgttgggtaatatcagattacaatatcaggcaatagagatggatgcagtgccctttcttcatacgaagtatataccaatcaatgatagggctaatgcaagcaagatgaagtatttacctgccaacaacaacagcaaggtcacccctgatggttcctggttcagacttctgtgggtctgtagcaccaatcagttttctcccgtacttgataacaccctctccttcccaaacctgtataattgtggaagcaattcgtgtattgttacccagcagcacagggcatagtataaaatgtactaggtgattccccgcactttgctacgggaattactaagtaattttcaatatatatttttttcgttagaatcaagctaggggtaaaaagagaacaaatgaaatatcagagcttatcaatatttttcatgaaacaaacgaatgaaacacgtgctttaatgtggaacatattgataagttttgttaaatattataaaaatgatagatagatttgtaaaaatattgtgaaaatgatgtgaggggtgatgattggatatgtttgcatgttg

SEQ ID NO: 2611 - DNA, 1693 bp, Oryza sativa
aaacaggagcacagaaattcagactatcgaaaatacatttatacttgctggacatcaggacacaacacacttgttatactagtactagattcgaaatcttgagtcacttaactgaccacaagtcttaaggacaaaccatttaacaatggaagtattgaacatgcagatcaaatgacaatacaaataacagatgcagcctaaagtcctaaacagcattttaacatacctcatcatctcgttcaattacttgtgcctgcaataagcaaacattgacacattactaacatgttccataatgctagagaggactatatcagtgaaggtaataagagcataagacatcagtgcccatttcctcaggtatgtaaattctagcatgctaccaaagctcaggctgctgcaagttcagacaatcacctcttcaatgtcatcattgctgtacattccataccggaatgcctggctcaggttattagcaagtgccgccacatcatagtccctgtctcggaagtcatcatcatcgctatccctaccacgatcatgtagagaagtcggacgactgcagcacaaagcattgatagccaaaagtcagcgaagacaagtgtacgcaatcacaaaagcatcacaaaacatggtgataacctacccacaggcccaatgataaacgttctcaacctcattgcgtttgaccagggcagttgtctgccattcaacccactcgctgttctcctgtaaagacattattcaccaagttagctaattaataaagtttagatgatattatgcacaagaagtacatcatgcaattgctaaagtgataggctaacgaaagaagagaaactcaaagtacctgcaaatgagactggattatgctgttgctatttcccagttgaataagcttattagctattcgagttatgtgcccaatattcccaatttttggaggcaccttcccttcagatagtaatgttggctgcacatagaagataagaatactcaatatacaggaccctgtgtatatctggtcttgcaacaaggggtatgaaggacataagaattcaggaatagattactgtgttagattctgttgacagggaggaacttctttcagcagcaagaattttgccaacaagattgcattcattaagggcatggtcaatcagctgggatctattaacttccagacaagaaatgataatactctcgacatgatggtgcagaaagttattgtaagggtacctgcagcacgaaccaatatgtgatgattctcttgcaattgttaggaagaagagcacataaaatagccccacttactggaagaacaaatcaatggaacgttttactgcagattggttgattagctcctgttccgcagtttcactaccaatcgtcagcaaaacagagatgaattccacaatctgggaggaacaaacataccgcgcattaaaaccaaaatggaacaggaaaggactgtgaaggaacatgtcaaaagaacagaaatgattcattggacattgcaagcctagactaacaaaagagacttatgcaagggacacgatagttttagaccatcagaactcaattgcatgcatatatcagaaattacttcgccagaaatcccgaggcaagattaataaaagtaagtcaaggtacccataagcaagatttttgctttacgtcaaataattagaaa

SEQ ID NO: 2612 - DNA, 781 bp, Oryza sativa
ggcatctggagatgaggtgagacagtcggcatatggaagtgctcgtttgcaaattgcaactgcagatagcaaaagctttatgttgttgcacagcactcattgcttctgatttctccatgattgccaagatgtgaggttagggactttggcatgagtactaccataccttctggaaggatctgccgagcagtagctgcttttggtctgatggtacaatccataccacaaccatactttcactctgttgttgtgggctcatcagttttctgtccatcctgtgaatcttccttggcatgcaactctgcacctgaatcgttggatccagttgagccagcagtatggatatcacctgtgtctggtgaagctccagccgaagcattgttgggctcagatgatgggctgacaggttcatccactgctatccctgtacccatatccccgcatgatccttcagctgcatcttctgcctgtatgtctacctggccatctcgaacatccacgtgtcgctcagattcttcagcttctttggacaaatcttcctcttcagtgcacaatagtttctcgtcttccgtgttagaatctgtttgtttacttacatctgctaagtccccggcctcctcaacagggccattttcaagagagacactttccagttgtggctcgatgctagtgtcctcaccaatttgcacctcatcagtttcctccgtgtttagagaagtttcttcagaattgggagatgaagaagggacagaggcagctaaacggtcatttattcctctat

SEQ ID NO: 2613 - DNA, 899 bp, Oryza sativa
atccaccaaatttgtgcacactgttccagattctacatcacacactggactgatgccactgttatctagttcatctacatggatagaggtaaaacctttatccaattgaccatcctcaaccttctgatcataagcatgtgtttcacttgcatgatgtgtagattttgcactagaataagatgacctcaatataatgtttgaagtagaatcagggatctctacaggttcacctgctgcaactacctcaccacatccaccaagctgttgattgccatacgcattgggcaacacttcaatagctttactgctaccatcactttgtgatgcttcattcttcactaagcagttgcttccacgattggtttgaatcccatccaactccattgcaacatgttcatcagaagctgtactcttagttgcattttcacgcttctgtcctgcttgttttaaaccagaaacagaacgtgcaccatgcccatctgcctgtttttcctgcatttcaccttttgcatcttttggttcagaacttttagcaggaaccgtaggtgatttgactgaagtaatctccctacatggttttgacctgttgcgtcgaacatatgcctggctcttcactccaaggcgtgatagaacagaatcctcagcttgttttgcattgttgtgaccatcagtgggcaagggctgcttggattgagcagcattagttctctttgttcctctttttacaatcttctcctctacaacgtcatttttatctccacgaaagagcataagattgtctgctgtgttggtttcacggcatggtgaacttcctggtctgccgttactctcaccagaatctccacgaggcgaagcagcacaagcaaaactacctttagcatcactacaaatgaaggaaa

SEQ ID NO: 2614 - DNA, 7377 bp, Oryza sativa
ctgtatatatatatgtatatgtatatgtatatatatatatatatatatatatatatatatatatatatatatatatatatatatatatatatatatatatatatatatatatgtatgtataacggcacgcgcacggcggtagccgtacgtctttgtcgtcgtccttcctccgatccatcccatggatccatggagtatgattatgttttagccggctccaccgcaggctaccatccaaacccccttcaattcatcaccctagcctaattaatttgcttacatatatatacaattgatcgactatatatgacacgaaataacaagtacagtactacgtcacttctgcttaattagatttattatactaggacatatctaaccttatcctaatttatagacacgacatagtatatccaacatagacgaaacttaggtggctgtttcagttctcccgctagcagatttgcagggagacgacggtgtggtggccacgtaataaagttgtttacatagtggtaagatgtgttctgggtaaaaacccggcctgatttataagccggcaacagtgacattctcaaacgccgccaccccgttgtgggcattgtcgtggctttctccttccatagtggattccttcaggtggaaacgtagtctcaatttaccgaggcgacggcggcatcctcagtgtcattttgaaggtctattttttgacaatcacttcttgagacggtttgtcctcttgcagtgccacttctgaccgttacaagatggccatagtgggtttgtgcaaagtaagaatggatccatctccttccttgccctctccctctctaatctaaagatgtggatggagatgagtacagttgggatgttgcgctcctgtgtattccttagcgggttgttttgctgtaggcgtgtagtaggtcttgtttttttttttgccaaatcatagtcttcaccggttatgacttgtattttttttatattaataggagaacccatactatcttatgcggtttgtttaaaaaatatagtatattgtgcatcagatgcaatgtcctctttggttgctaacaaacaattaagtgctgctgcttggacatatatatatatgatactagtacataatatgatgccggggccttcgatccagtaggctccgagaggaggggagaaacacctagccagctgtttggttttcataggatggaacaagattagaagaggacacgacaaactgcctgcctacatgcatattcgtgtgtggttaataattaatgcagggaaaattgtatatactatactgggtaggatgcatatgtatgttgtgtggtgccaaggacgaattagaggaagcaaagcatgcaactgtggatatgtgattattgatggtgtagatgcgcaacgatgaaaaggtaaaagacccccatgtgtacctcccagagacccagactgacgtacgtactgcctgtctgtcctacgatgcagtggaggcgcaggcacggttgattttgtgtccacggccgattattattaattaggattaatttgatacatgcaattacaattttacaaatatcaatataattcataaaatcttctacgtgtcactgaaatcttgtgaaattcaaatcatactatatattgcagtcttgtgtccaaacctctatctctgtttaaggacatgctatttcttcctccttggtcttcttcttcctatggaaagatattttgaagcctccctgctcctttcccttccctagctagctcaggtcgctcattctgccgtcgccgccaaggcctagctcggctgcccgttaatcatcaccgcctcggctttcccctacatatctagtactccacaaccctaggaaaggctcagtggcataggggcagtggacatcgtcaccaccgctgcctgctacttgtgtcggagctgggaaagaaacgccggaggaaagagagagaaaggatagaatatggaaagaccgtgcaattttgatggagttatgggcgacaatagcacggttaaattttacaaaatttcagtgacatgcaacaggtttcacgagtagtaatgatatatatttttttaaatacgctaaaattacattagtatatggatcaaacttaccattgttattatttagtggaaacacataacgggatactctaccttaagataagtgactttatagtcacttgcatgagttcactctgctattggtccgacgcattagcggctcttaagtcaggtaataacataaggtaaaggatctagatccgtaggagtggtacagcttgagcaatagtttctaagagtaattctcaaagagaagaggtaaagtagtagtttgaagcagatgaaagggagaggtaggtagggaaaattggcttgttgctagagtagcaaacggagtagtgtagtttgcatgtgggatgaatggaagcaatctgagtggagatcagggaagggaagggagggaatcacctgcaaagcggccaagggaagctccacaagaggaggaggaggagcacagaacaagacactctgccttaaggcaagtgattttataatcaacggcatgagttcactttgctgttagtggacacgttagtatgtactcccttcttcctaaattgatcatcatataagtttatgcaccaagaccgaggacaatttaaatcacatcaatcaagacaccatgcacacattctcccacaatgtatgcatcgattaaaaccccatgccgattacatcttagcatgcacacattctctcatactgcattaattgtattccgatgaaatccgtgtccatacagttatatgatgatcaatttgagaaattttggattctattacatgatgatgatcaatttaggaaggagagagtaataacgtaagtgaaggatccaggtccgtaggagcggtgtagtttgagtaatataatagttaataggagtaactctcataaagagaagaagtggtaaagtaatttgaggtatatgaaagagagtggtagctagggaaaattggcttgttgctggaatagcaaatggaggagtagtctgcatgtgggatgaaaagcaatccgggtggagagggaagggagggaggaaagaggaggaggagtagacctgtgaagtgcacaataaatatatataagatacgatatattttaatactataaatttagaaagttttctagcagtattagtagtagtaataataataataataataattggaaagaggaggagagaggggaggggaggctggcatcagctgtggtgtggaggtagagtggtgagtggcactgtagaatgcgtgggcccatggaccgcgacagggggggcccacacgccacacatatactgcaaccagcttttggcgtcttgtactccactgtctccgttcattgtcacgcgctccttcgattcctcttttctcctcctcctgaaatgaaagacaagaagagctggttgttttcgttttggctataaataaatctgttgcataagccctctccctgcttccgccttgttcaataatcaatatactcttctcctcgatctcttctcttgtccatctccaataattctccatgtacgccgccatgtacccggagaccttcggcttctctgcttacccccagcagcagcagccgccgcccgacgccgcctcctgcatctacaccaccgccttgccgctcatcgccgacccgcctgacatcctcgtgagctgcctcctcctcctccttccttgcacactagctaatccgcatgcatgtatccatggaatggattttcctctaatcgctctttctcttacccatggttcatgcatctgctctctctctctctctctttctctcatcacatcacacgtatgaagatatgaaatgaatgaagaaaaacagtcgctttctcttgttcctatttctttctgttttttcttgctccgttatgattaagatggcttgttggtccatgtactatctatgccaacaaaagccctcaataattcaccccttcactttcctcttttaagcaaagcaaccacaacatgtatgtacctcagacatttcatgagtgagatgactaatcgaatcgatccatccatcatccttaattgctgctgttgctttcctaatttctcttcaaacgcaaacgcttagctagcttcctaaacagagcaactaaaaattcactcactcacctttgagatttcttttcttcttccaccactactctactacatacatggcgtggcgaatgaatgaatgaattaattaaaattcatactctcacctttccttttcgcactcagctaataagcagctaagccaccgcgcgagtggtgcaagcaactggtcatgttggctgcaacttttcctttcctttttgtctttttcattcacatctttcttcctttttcatacttttttttctacttttctgcgcgcgcgcgcgcacacacatatattggtacatacatgcatcgcgcatgggttcagtctttgagatatttagtttagtggcagggaggggggatctaattaggttgagtcttaatagagcttttttggccaggatttctgatgcccctcctgtccatcagtatatgctctcggagcatgacagggacctgtaagttgacatgtactgcaccatcaacatactacatgcttgtagtcgtagatgtacccaaaaaaaaacaaaaaaacaagagagaggcatagcactacttgcaaatgcatccatatatactcacttttaattacttgccagccacactccacacacacactttgttattgcctcgcgcactgcttcctctcttctgcaatcttcccctcccctccccattgagagaggctacacttttctctactcaaattccctaggagtactttttttttctcgtcactctccttgccttaatttggagggaaaagaatatctacttactgctgtcgactcatgtagacaaaacaaaacaaagcacagtcattaatctgaccttaatatcttttggccttctctactttttttcccatagtaaaaataaattatgttttcactcctgaaacaaaaagtaaaatctactgaccagaaaatagaatgcttgttagtaacatgtttgcaattaagaacgttacatttcagtacttcattcattttaaaatgaattaactaagtggactgaaataacctctttgtcatctgtcgatcctacagggaaacatggcacaaccatcctttctatcagagtatgaccttggaggggaaggggacctgttcaaagctcctgaacccatcattgaagaaccagtgcttagccttgatccagttgcagcagccatttcgatgatgtctggcagtgagaacgtaatggatgaaactatagaggttgcagatatcagcgacattcagaatgactctcttttaagcgaagtattatacgagtgcgagaaggaactcatggagaagtccgcaatcgaagagactatttctgaactgctggacgtcaagattcctatgctgcaagtggaagagttccctagggaaacccaagtacaactaccggccatggagaaggagaagccatcagttcctgaatgttgttcactccagaaaagtgtcagttctgggtgcctcaactcagctgattggatcaatggaccagccaggccaaacttcctggacttccaaggattggactttgagacagcgtttgggttgaggagggcatacagcgaaggagacattcaggtttgatcatttttctcttgcggttatgttatgtacttactactgtatataggtaaggtagtgatagataaggaatcgttgtgagcaagcaacggctgtgtattgtaaagtgtgtttccgaaacacaggtgtcgagaaaagaaatcacctttgcccttgtatgtatatgtgcgtggtgcttctttactcaaattaaaggccatcaaagctatgacactgattttactatttctgcccaaagtaggccttttccttgtggttttaattttctttcaagatacttttacatgcaagctcctgcatacaaagttggtttctaagagactacctaggtgccaaagcgtacgtgtatatcctatggttttttgtttttatatactgtattattttagaaaggccgtgagattgttcgagtaaacatttgcagaccctgctaggttgttgaagaattgtacttacgatgctagttgtctttccaacagaatcttggagctagcacccctcgacccgggaactcaggaaacgctcaattagcatcttgcgagaggcttgtaaccatcagtgacctgaaatctgaagaaaggaagcagaagctatctaggtacagaaagaagaaggtgaagagaaactttggcagaaagatcaaggtaaaactatatattgtcctcttcctttttaatttttcaaagaaaagaaaaaagagaacataaggacagagaaggtactactacatgattaattagagaagctgattgaggctgatgaataatagtacaaacaaggagactgactgactgactgacactgactgatgcatcgtttggcatggttgcagtatgcttgcaggaaggctcttgcagacagccagccaagagtgcgagggaggtttgccaagatcgaagaaggcgacttgctcaagccaaggaagtagtaagaggaagaaacaaattaaagtaactcctggagaggacgagctgccagtgaaggaaggaaccttggcttctagaagcttctagctggtggaggaggaggaggaggaggaggaggagaggaaaggatccaaggtgcaaggcccagcctttgtgtgtagggggagggcgaggccaaggtggaagagaggcgccgtagtcgcggctgcacttgtcggaattaattttagctgctttggatcgtctccttctactactagactagtacttgtaattctattttccttccaatgcatgtgtaataataattagtaataatgctagtagtcggtattacttgctgcgagctgaaggccgcccatccatgtacaaatggctcgatgaagaaacttatcactagtagtaataaacttcagctcccttcaggcttcgcactggcactggaaggcatccattatctctctcatctcgtgtgtacatcttcttcttcttctcttgtcacgacgactctcgtacaagttaaaatgccgtactcaatcaacgcctatgcaatctttaaactagtaatacctccatctgtacaagaaatggagcttccaaatgctgcactatatatcttattattatgattaacaactcctttcctttcagttcgagaatgctccaaatta

SEQ ID NO: 2615 - DNA, 1720 bp, Oryza sativa
gtcgcgctgattcacagacacagtgtaggagtggcagcctttggcgccagcaacagctaatttgtggtcgttcgccgtcgcaggtgatgtatccatgtagtagaggtccaggctctgcggtgcgagcgccatgtcgccgtactgcatgacgtgggagccgagcgtgtaggtgccctcgtcggacgtccggttcttcaccgtcctgtactgctgccgcagcgtctcggcgaggcgcccctcctggtgcgcctccgcgtcctccatccacgccacgctgtagaggtccccgaggcaggtgtcgaactccgccgccggggcgtcgtggtcgtcgccggggcagtaggtgccccagctgctctcctccgcgttggaggccgtggtggcgtacacggagatgtcggaaggcaggaggccctcgaagatgctgccggactcgcacgcctccacgtacacgaccaggctcttgtacccgccgccggcgtgcttcttcttgagcgccttgaccaggtcgtcggcgtacaggtactcgccgtcggctggcatgctcaggacgccggggccgccgtggtcggcgtagtagacgaagacgtggtcgttggggccgctggcgacgaccttgccgctgccggagccggtgagggcggagcggttgccgaggaggacggcgaggaagttgttgacgttgacgtcgtcgccggtgtaatccttggggacgccggcgtagacgtcggggccggaagggtggttgaacatgagcccaggcctggggttgtcggggttgtgggcgatgtcgtcgtacatcatcaccacgatgttttgctcctccacgcctcccttcctcatgatctggtacgcgtggcacacgtccgcctggtgccggtagttatagaacccattcgaccccgcgatcagcaccgcccacctcgtcgtctcatccgacgacggcagccggaggaactcctcctgccaccgccaccgcccaccgccggcgacgacgaggccgacgagctgcagcagcagcaggcagaggagaccgcgccccatgattgacaagttgtgcttgatgatcgatcctgcaatcaagatgcttgttatatcgacattctccgatcctcctcgttccgtgcgtgacgtacgtgctacagcatactcctgataatagtataaaacaaaatcctactactacaagagggacagattgattactccatcagctcagctggcaccaaagctaagaatcctagcattcctactactattaacaactatttcctggggccgttgatttgattaaataaaactagaaaaagatactcctctagtacaacttattgttgcgttgcgtggtgtaggtgcgtgggtcgcctggcgtgtaatcttgagtgacagtgccatcctatatacggcttggcttattagtgtgcctgcctgcctatcatgcttagacgcaacagggatcgacttgcaaactaaactagccagtggcttatgcagcaccagagactcgccatctaatttggaactcgatcgacccggaattaataaacaagtcgtcatctcctacgctacgctctctgcatgcttcctatcatatatacggctgcatatatacgggatttgaaggattttgcatcacgtaagtcgctcaagccctgctgcacgtaactattgtaatttcaagagtaaatttcacaaaactacatgttttatggtccaagtt

SEQ ID NO: 2616 - DNA, 1119 bp, Oryza sativa
gatcttctcaaagaaaactatagagtaagtcaacgtttattgtttatgtttctgtgcattttgatctgcattctccgaatctatttgtaccaaactacacgttgacgatcttaaaaaaatcatttttgcaggacgatttgtcaatggatgactggaaacttgttgttaagttgaagagcatcttgaagataccataaaatcgttaagcttgcggaagcccctcaagcctgtccaccaatcggcaaaaatgaaaagttaatggtggcatctgggctactggggtagcatccataaaattttcacgttactcagacttggatttgccgggttgagaagttctattctgacacaccgatgttcaagctgcccagggagtttttcaattttgatacggttttgttttattgtaatttgttcgaaatgcggttgatcaaacattttacaaatataagtgaaactacccgattttgaggggttcttgaaagaggctatgtttgtcttttttttttccctgaacacaaactgttttcacatcccgttgcctggtatgagtggttatgtaaagggcagccggtaagtcaaatggagtatataccaggctgaatatttacactgggtaagcctattaattcagcatttgttcacgaaggcattagatctacatggtgttagcattgggatcggtccgtataaaattcattcctgaataaaaaccttataatcaatattaatgtattaatattaatgtgtcatgagtatcagtattacgatcgatgctcacaatgtttgtaaaatataaatattaaccttatgacaaattactatttttagcctttcgtgtgtattttcataagccatggccttctctaaaattatgagtattaattttgtgaatattctggtcctaagactttcgtaattttcaccctttggcagataaatttctgtccattccttttgggtaaagtcacaacattttttttcagggccaaaatttatgagtatttaactttttatgaaaaaaatgaatattttctctagccatttcctaaaaaaatcacgagtattagcatcggaatcgttgcgcactaaattttcctgggcccgaaatgtcacgag

SEQ ID NO: 2617 - DNA, 6191 bp, Oryza sativa
catcggtgacaggctttagttactgtccgataaaattaagttatctcaatcgggtattagtatatagccagtcactgatgattagacgatgttattctaatgtatatatagtggctgttagcctgtatatgtagatgattttgcagtcggggttgtcgctgatgtaggctgggagaatcgagtagtgcatgtgcgtggcttgtggccatgagtctaggctatggcagcgcgtccatgatcttgctccccaacccagcggcgaaaagctactccatgaacaggacacggtcgccggtcgtgcgggttgaggcggaggagcggatgctgcacaccgtcggcggcggccggcgtgggtgcgcgcgccgcgccatggtggcgaaggcgagggccttgagccacgtggtgccgcacttgggcgggctcgcgaggacgacttcgccgcggcgctggatggcgatgatcccgggcacccacgtcctctgcacccacactttggtagcaattgaggcgcatcttggggttgctagggagcgaggagataatgctcttgtactcttccagcaggctggggttcaccgccggcacgttgccggcggcgaggcgtggttgaacgtacggcaatggcactggccccatagcagtagattggtcggtggtgctagccatggtaggtacaattggcagagcgccatagcctctccaacaccgtaatactatgtagtattactacacaatctcacattcaaccaacgaagtaaaatgcatacaacggagttgttggattacttgggatcaatataggcgtggaactctcggacccaggggcgggcctaggattttgagattgggtattcggaatgaaaaagggtaaaaaaaactgttttacaacacgaacacaatatttggtacgtatgatcaataacatggtactaccttcgtttcaggttataagactttctggcattatctatattcatataaatgttaatgaatctagacacacatatatgtctagatttattaacatatatatgaatgtgggtaatgctagaaagtcttataatatgaaacgcttattgaattagaactcgcgacatggtttttagcaatttccttgatttattgtgatatactttgtgaaaaaacatatgcagtacaatctactaaccaagtatatatcgattagcatcaatcacagcacggctaatgcacaaattaggcaaccatgcaaattgggtttgaatttgagggagccagcctgctaggctttcttgttgggcttcttttgatcaataatgtttattttctttatttttctgctatttttttggtttaagctaaaaattatgtcgacagaattttgaccttattatagccgatttttcagccgcttgatcctctgatatttgtgcaagagcaaggcaggatgtggactttagagcaagtttaatagtatagccaactaatagctacaaatcatctatagctaatgtaatagctatttcatataatagttgcttactatactattaatatctaatcctacctgtcttggagtccgtgctgcagctagctacaggtctgtagcccgctgcttttctctctcttttttttatctttttaaaatatatttatagctggtttatagcctgctattgtacatgctcttagagcaactcatgtacctcttcaaggccagcggcataggcgagcaacggacatgccacgttgacagtgtaattttacggtgtgtttgactacattaattggtagatttagtagtactacttctcagttaagaaaaaggtaaatactactccagtaaaataaagggtttgtcaatgacatgtggttcagggtggcatattacaaattttgtaaaatttgtgtggtatggttcaaattctcccaataaagaaatagtaagaaccagcacggaacaacaacctcgcccatcatgaccaagacgggtcgtccttcgctcttccgggatcacgcgttggggtcttggtagagatggcaacggggaattcactgtcgggggttacgtctgcgtccccgtccccacggtgataaaatttcaccgtccctgtcaccgtcaacaacgatggggctacattttacccatctccaatccccgtgcggtgaatttatccccgcagttatcccatccccgcttaaacaacaaatccatctccaaatcaagagtacatatctcatcaatatttttctaaataattcactcaacaactgtaggccacagtatcacaaatcaccattacaccatatcaatatatatccaaaatatttcactcaacaaatcaacaaatcataggatcattcatctttgcttcatttgggattgtagcattgtgctgacctagcttcgtggctagaggcaggcgacagcatgaagaaggctggaggcagcgtgctcatcaatggctggaggcggcgggcggcgtgacgacggttggaggcagcaagccacgcgacaacgggtcgacgactggaggtggccggcggcgtgacggcgtctggaggcggccagcgatgcgacgagggctggagacggcgcgctcgtcgatggttggaggcgaccggcggcacggcgtcggccaaaggcgtcgggaccccgcccacgcaaggggacgcggtggcgcacggcacgcgcgtctagagcagcggcagcgtcagcggcggcgctgtggagtggaggactctaatggtgtgtgctgtgtggtggagtggggattggggaatggaagggctgactagggttagaaactatatatatatatatatatatatatatatatagacacacacacacttttgttgttgggcttcaattttatggaccaaaacgattataaagtctaaaatagctccctagctacagtaaatgctggtcacctcgggggatggggacggtgaatggagcaccgtctccgcccccgccatccccgatagtgataggttctggaccattagattcaccatgggtggtagatatcaatcatccccgtcccctaatgtgtgaaatcaccgcggggaatcggtgatcgggtctccattgtcatctctagtcttggggacgacgcattcccttcctcctctcatcccctccctcacacgccgcgacgcctcctcctctttccaatgagcagccaaaccctagcaccgtgcaatcctcactccacggcgccgcgcaatcctctacgtcgcctccatgtcctccttgccggcgctggcggcagcgcgggatcacgccacgtgagagctcaagcggtgccgccgcacgtcacttcggcagcgctgggggggaaggatggggacgccggaggtgacggcgacggagcgaggcggctggtgaacatggatgcccagaagcagatcaggatgggtgattcgctaccaattgtgccgtcggtggcattcatcagggttcatccgcaggctgaggtaagaaatctgtgttctcgcggttgtttatcatgcagattggatgggaaaatgacctctttccctatggcatggatcccttcagataatcagattgctcatattgtttccctgtgtttgattcttcatacctttttttttgtttctttttgtcagcagtgaaagcaaaccaggggactatatgtgcattggagggtgaagcttggtgagatgcattcatctgtattaggacgtgcgtgttccctttgtgtttgttacagtagtttatataggatttggaataaaaaaggggacagttttatgtgcaggggtgcttttggctgcggggtgtccttgttcccaaattcgatgggcacagttgtctggaccatgtcaaaatcgccacaaccaacatcttggttgtgctacaatgcatctgcattgcgattgggcatctactggaaaagaactggtaggtcaatgaatccattaccgtgcttgtcttgcaaggatagttctctcgcgtttgcactccaggtgtttgtagtttttccttacggaagggtagtttcgattctgctccatggcttgcaggggttgatcactagaggtgtgcttcatgcttgtcagtgctgggaagaaaattcacacattcctgtcatcctgtgtctggtgaggacctcttcttcatctattacttccactgatcagtcttcaattctgggcaaactttctatgtaccaatagttcgtgtagttagctcccaaccaaagtggaatttggtttctgttctgtacaggaaaacaaggtgacaatgtgacatgtcttagtttaacttggttttggctaatttaatcttgacaacgaaatgcactgtagtaggaatcacttgagaaattcatgtatttcatatatacacatgatgaaactattttttgcagttgtgtaagatttttttttatctctgaatttatcaaagccatatttttagaactttctcaaacccatgtaatttctgaatgtgaaggtccacttattgaaatggatggattagtcaactacccacccattcccataaaactgtactaaaaaatagattaaacaatcttgactgccctgtcccaaaacaattttttccccctgaaatacagacttaaaaggattgcatcacagtactatctggagcgcttttaaatttagaggacttaggtgctgagtgccaagtgctggatgcgagtaagcttgatcatttagattatttagagaatcagcatccttactcctgcagtaactgaattctaatgtgaatttccagtgttttctttggattagctaataacataaacttttagttgaaatatatatatctttgaaatcactggtagaatatttgtttcattgtagccatctaacctttttctcaatgaattgtatcagtagttttctaacctttttctcaaacttgtacatgaatatattttttttcctggtgaaatttctgaggccaatctttctgatctatagtttggctgcctttctatcagacgccttagattaaactcatggttgaagaattcctctgagaaattcagtcacagatcttacaggctattttattggctgtaatttatgtacctttggtctccattgtatcctgatgaattgagaggctgcatccaagggtaaaatgcgattatgtgcattgtggtagtgatcatgctgcattccaggttatgttggcttgatgaattcattactatcaatgtatgtaacctcacctctatatctccttttctttttctcattttccccttaatcatgtaacgttctaacttattatttctatcaactaaatggctataaggtacggctgctgtaccttcttatgttaagaaaatcattttgagtaccttcaaaggacacacaaaataggatcaagtttatattaacaagagagttacatgtgtaggtaaatcatgtgttttattaaacagacatccgttgaaggatcattcgacaagttgacagagaaagaacataccatcctctattattaatagacaacataagttatttactatttttctgctactttactaaatgggaaattttgttttacgaaacttgtatatcttacccaacatcctattaaaaccgtcacacttcaatcaatcaatgtaaaatccaacattgttgcagctaggttgacagtcagatattagcatattactatttctgtgcatccctctacagaatctaattacatccgtgaaatctgataggccggatactattaaaggccacaagatgttccattcatgccccaacatctccctccaactctatttcctagcgaagattacccaaaggtaaatacgcagctttacaatatcagttgcaatgagttgactaattaatgattgttgaggttttgagcttttcttgctttgttgtttggttttgtgctcttttgcatcatcagtctgtgtgaatgatgcaatatggaagatgtatttcagcgacttgcttccactatcactgtagatgacgatgatgtcatgatggcaactaacattctaaacgaacttgtttagtacatccgtgaaagataacggagcaccatcttcagggtccagaccagtagttcgatttcttcaagaatcctgaatgtagttagatttctatacatatcccaccaagctctaaacatgccattgtttaaaacatattttcagggctgcaggaat

SEQ ID NO: 2618 - DNA, 32758 bp, Oryza sativa
  unsure (1)..(32758): unsure at all n locations
gaaataacaaaaataaaagttttagatcttgatgagttattcaactttgttgttgatgactttttcaattgaaatcgtttagtatttgaaaatgttgttgaatttgttatattttcaaattcaaattcaaagtgttcaaaaaaaatgttatatagaaaaatgaccaaactaaaagttgtaaatcttgataagttatacaactttgttgttgacattttttctatttgaaatcatttactacccgtaaaattattttgactcataaaataaattattatactgcatttaattattttgctatagttcaacttacaaatataaacatttcatatgaaaaatgaaaaaatagtcatcggtgacgggctttagttaatgcccgatagagattaagtatatagcccgtcactgatgagtcatctgtgacaggcctagttgctatctcaaacgggcctcaagttggtgcacgtcacggatgatggtcatctgtaacgggctacaacttgaggcccgtttaagatatgaaatgttatctcaatcgggtctaaagttggcgtccgttggttatctgtgacgggccacaactttaggctcgtttgagatatggaatgttatctcaatcgggtctaaactacggcccgtcactgataggtgtcatccgtgacgggcttaagttttatgcccatctaatttgtctgtgcgaccataactcaatcgggcactttttgacccgattgagatgacttccttatgacggcccgctatttctaggcatattagagcttgtcacagatagaaggatctctagtagtgtcggcgttcaccgtggcggccgcaactggagctccggctggcgcggcctctagcgcccgcggcatctaatttcttcaggggaatgagcccatctatctatccaagtgaaaggtgaattctgctttgatcgtagaataagccacgccatctgttgaataatgaccgttcgatgcaacacaaatttaatatgtaccgttggatatagtcatccgcagcaccgtccaatccacatctcgctataaacacctggagaaaaaagtgaggtctggacgagcacttcccgaggaaaaaaaatatgaattagctaggaaattaaaaaaacatattccctccattcacaattaatcatcctattattaaaataaaaaaaagaattgatcgtcccataacatgtggagccagcggaattcctattttctcatgtgcatgcattcaagaattcagcgaggagagattactggttggatgcaagcatatgatttgaatgcacagtaattagtgggtgattagtttgtcatttggcatgcgctgctagcgtgcatgcgtgggccatccaaccgacattacggcgttatggttttctgaaagttaactgtctctcaatttatttttttccttagtactgttgcacaaacacaatgtgaccatcaattgcgaatggagggagtactggcatccctatctgcctgttatcgccatctgccttgcacaacagaactaatagatagtcagatggcaacaagcaatagctcatcgccgagaaccgatggagccacaaagggaagcttgccgacacacgcgaaggaggttgatatcgtcggtcattgcctagatttgacatctgaagcttttgggaccgaaagatcgagatggacaacgtatgccagcggctgcacaccaaggaggaaggtaatagaaagtgcgtagtttcaatctacccgagtgtcaattcccctaggcaatagctgcagacaggcagttgaagccaagacacttgagcgacgacaaccatcaacgcgagcgagtcaacacatgagggaagcaacggcgttagcgttatggcgagagagataaaggggctctgcacatctcatattggtaggcttaatgggctggctgtgctacttaggccaaatggtcatttgcacctagggatggatattgagcctcggctcggtttattatcctaacgagctaaaaacctagctcggctcggctcgttggaaaactcgagccagctcgtttggctcgcaagcctggccattgtttcccggtgcctctgttccatctttgatggcaggctcctcctcctccatgacgcctcggacgacgattctgtggcgaacggcggcgcgcgcgcatgaagtggtgcttgctcctcgtcctcctactctatatcgcctcggacggtgattccgcggcggacagcaacacacacgcatcaggggaaggagaggaaaagggaagcgcacgctccggatgtcgtgggaagaagagcaacagcgggaggcggcgcttgcacatgcgagcgacggggccattgtgacgcacagaggtgagcagcgacacaagcgtaggacgagcaacggcggtggtggcgtggtttgtgtgtgaccgtgaccctgtttagttggtgaaatgaaaatttttgggtgtcacattggatatttgaccggatgtcgtaagtggtttttggacacgaatgaaaaaactaatttcataactcaccaggaaaccgcgagacgaatcttttgagcctaattaagccgttattagcacatgtgggttactgtagcacttataactaatcatggactaattaggttcaaaagattcgtctcgcgatttacatgcaaactgtacaattagctttttttatctatatttaatgctccatacatatgtctaaagattcgatgtgatgttttttgcgaaaagtttttggagattaaacagggcctgcgtttatgtgttctacttgcttgcctagggtttgtgatgtgcatgtgtgtgggcctactgctgggccgtagacttgctgcttggctgtggacctgtaatttggtgggagtacactacttcttaatgggagtgcagacacgtgactagctactgcagctcgtttggcttgcgagctaagaccctagctcagctcgttaacaatttcaaacgagccgagcgagctaacgagtcacgaatttttcatccagtcctatttgcaccggatcaaattacgagaagagcaaaatgaacaaaaaaaaacatgttattttacatataagactttgtaataataagtaaaattatagaaggtaataaaaaactattgttcttttgcaaataaactttttaactaattaacaatatcttttcctgacaatactttatttacagatctatttctactatgtaaaataaaattaagtttgcttataagctgaggaggacagggggaacataagaggggctcatatgacagcaggaatggtaagaaggcagttgactttggtggtgcgatgggctaaggtgtagatgtgtttattctctatgtatgtaagggcacgtttccttttcagacaaatgctggatattatgcttcatgatagcattatttataaaaaaaacacactaaactccttacaggatttacaaaagattcttcaattatataatattattaagatttcttacacactatggaccatagttcatatgcacttcagtcatatgcctgacacatgtacgcattgtacagggatgtgtttgatctattatgttcctaatgcaggtgtaagatgtacctactccgttacattcctatagagagatatatgcatgctcatttgcgtggtacaagttagctgtacaactgccacacccacatggccacatcctgacaccaaagtccctgtttggtcaaaactttatcttgtgtctagccaagccgacgtcacatgcctgtgattgaaatcattttgcaatattattttcggacatcactttgcaaaaatgatttaggacatgttcttaagtttcccaacttcacattcctttttctcatgcacaacttcactttgcacgttagtgagtttttgttgaataaatctctcacttaatgtgagcacgttttcaatatgctaaaacggtatgtttctttgtaatagatttctatatagaagtttttttaaaaaatcaaataaatctatttttaaaacttatattcgctaatgatttatatcgtctcgcgtgccataacagctagttcgaacgcatactaaatcacatttggtgatgaaatgggcatgttgtaaaatactaccagtttttgtcagttggtcactgtgtctatcggttatatataactgtgctatatcactttggcgtgtattaaaataaaagaatgcatgtctggtaatttttttacatctatatgctaacatctcattttgttatagtctgcttagaaaatatatcaccatgaatgtccactcaccacccaaacatgatatattgtgaaaatgacatttaaagtgatgtctgaaaatgatatatcacttgggatttattgaaataaaaaaatacatgactgatatttctacaaatatatcctacatcataaacctatttttctataatctagagaaaataatgtctagagaaaatattgtctgtgagataagatagcatgtggcccatcaactaatgtacccagattttgatatatacgtactttggtcaattttggtatccattaactgccaatcaacttgtctggtgcgtatatgtctttctaaccaaccaatctagtaatgctaattgtaattacaaaagtaatataatccagccataatactagtataccaccggtaaagagccaattttgagattagatagtatcacttgacatgcaaaaatcgattagatcatctaattagcaatatttactaacccaaatatataaataaatttataaaattagttttgcacagtgaatgtcggatcaagggaaaaaagctacgcaggtagtcttcccaactctcctggctagttggacctggtttagttcccaactttttctttaaacttctagctttttcattacatcaaaatttttctactcacacaaactttcaacttttccgttacatcgttccaatttcaaccaaacttgcaattttgataaaaatataagattggcatgaatgagtgacaagacaaaacaagtctgtgcttgaagtgtgaaaaaaaaaaccatctctgtactacttgtacgtgagcactatgactgtttgctagtgtaattaagaaaggaacagtcctgctaagtagaactcaaccctcctaactcttagccacttgcgcacgtatcttggtacccctcaacggtcaagatttatggttcatatgaactacttccgttcatatatgatttaccctataggaaaatgattttatactcctaggagtacatactccctctccatccaccgttcatccgcaacctgctctaggtcctctattcggctctcctaacgggtgcgtacacaataaacccgtttccatttatatgaaaaggaaataattctcgtagctgttaattatacccccataatcggaacagatgcccacatcgatcccgtttcgatcaaacaactcgatctcgttggcgttcccaggcggcgacgccgtaatcgatctcatcggcgttccgcagatgctgaagcatgagggtgatcgacctggagatgctgccacccattggtgtcactggaggagaggcgggtcggcggagtgcatgagcagggcaaacgtggcataatcgacgggtcatagtagtggagatcatccaaaacagcaggttagtatcggtgtatttctacggccagatcgacgcacgacgtctaaatttttcttgtttgcaggggcacaagagaagagaaccagtttatcgaaattgtcaaagatatatcccagaaattttgatgcctgtgattgaatatcttgatgtctatagagaaggaatatgtttacgtagttcggtccatgcatgcttttagtttcagatgttttttttttcctgtagatgctgtttttttttggtaaattatatgctgttgcctgcttttacacatgaatgtttatatgctactttgattgctatgctagtctctgtatatataactgcactgttcccggaggtgtatgtgtgctaatttatttaatttttaccgagagacatatacactacatgttccttagagagggtgtatgctgctttatttccagtaggggtatgtaatgatttttttttctccagaagaatatgctttccatacagggatatgtactgaatttttttctaacagaagtatttacttaactttgtatatatactgcatttatatggagtgataatattgagtttttctatagagaggtatatactgaactttgttagacaatactagtatatagttcattttccataaatatgctgattttttccatagaggggtatatgctgattttttttttacagaagtacatactgaactttgttagacaaaagtatatactgcattttccatagatatgctgaattttttcaatacagcggtacatactggcttttttacactgaaaggtagtacatactgaaaaaaagaacagtatatactccagagaaaaagaacagtatatactccaacaaaaaattcagtatacaaatttagaaaaaaaagtggtatatactatagatctagaacaagtggtatatactagtactctagaaagaactgcataaactaccctctttatccctgctaaccgatcgatatgtcagcggggatgtagagattaaggctttcaatctggtattacatgtatttggctagcaattaattaaccgatactttgatgcgtccaattgatatttgatatatattttaattttttcttgtagaacggccgccatttaaagtacgtgaagaaattactctacttatctgaagcagcaaaagaccaaaaagcagagagctacatagtgcaatttttataagagtgaattgcactttgggccatgttttattaccaaagttttattttggaccacctgtacttaatatttttactttggactaggtaaccttacctttgttgcacaatagactacccaaactcttttcgcttgtgatgtctagcgtctctttcgacaaaagtatgtcatgtatataggtatgaaagtttgttggcatgtcgttaacaatttgctcgaagtcatcgaagaaataaaaatgtgttttggggtggtccattgtgcaacaaaggtaaagttacctagtccaaagtaaaaagattagataaagggtggtccaaagtgaaactttggcaataaaacatggcccaaagtgaaattaactctttttataaagaaagaaaagcagaatatacttggccaagcaaaaaaaatcttcaatgagaaacgtagtagtatatactgaccaaaggagcattatactcctttaacgaaaaaatgagtatataactcattaaacttgaaatgcagtacatacagaccaaacaaagagatcttcaatgaggaatgcatatatactaactctttacattctgaaaaaaatacatactgaaaaaaagagagaacagtatatactcctaatttagaaatgtggtatatactacaaatctagaacaggtggcatatactactctagagataacggtatatacttgtagtcttaaaaaaaagtggtatgtactactaatgtacatctcaaattttgaacgtacgtgagcattcctgtgtatgcatgcaaaaaatttgaaaaaagaaaccgagcacggcccatggacatgcatccatgcgaacgcacgacgttggcaggagagaggaactacgagcttgagatatgcatcggcgtcatcatcattcatccttgcctctgctttcgtggtcaccatcgccatcgccagacgccagctcgactgactagcaggcattgttaagccactgactgactaaatatttatttcagtaatataaaatctcgactaaattgaaaccatgataaaaacaatggtccactatatagtttattattacttttcattttacaattttcccacactactctcttctatattgcttatatacgcacactatatggtctaaattaataggcctttccccttttttttcatattataagtaggcacacacaaaaagaaaaaaaaatacacgtaccatcacatactcctgcaggagtagaagtaacgtgtgtactgtactcttacccgaactactccctccgtaaaaaaaacaacctagaagaaaatgtgacagagggttatccagattcatatagaggggtcattctcctcatagattgtctttttcttggacggagggagtacaagagtgaaagtaacgtgtgtaggcggtgatgagatcgataggatacgagtagaaaggtcgtcgttccctgcaatgcagggtgagtttagttcctgaaaaaagttgaaagtttgaagaaagttgggcgtttgaaaaaaaagttagaagtttacgtgtgtagaaaagtttttatgtgatatgatgtgatggaaagttgggaataggaggaaactaaacacggccgtagatatgcaggttcaatattgatagacgtgtccagcaatgatgcggctgtgtttggaagttatcttcaaacttccaaaaattccgtcacatcaaatgtttgactcatgtatggagcattaaatatggacgaaaaaaaccaattgcacagtttacatgtaaattgcgagataaatcttttgagcctaattatgccatgatttaacaatatggtgctacagtaaatatttactaatgatgaattaattaggcttaatagatttgtctcgcagtttacaagtagaatctataatttattttgtagcggcgcactggagaaaattttggccaatcaactaaggccgagtttagttccaaactttttcttcaaactttcaatttttccatcacatcaaaactttcctacacacaaacttctaacttttcagtcacatcgtttcaatttcaatcaaacttttaattttggagtgaactaagggtgtgtttagttcacttcaaaattataagtttgattgaaattgtaacgatgtgacggaaaagttaaaagtttgtgtgtagaaaagttttggtgtgataaaaaagttaaaagtttaaaaaaaaagttgagaactaaaccatgcgtaaacactccctaaactcctactcctagcctatagcgacgcactggagcatagcgatgggacttgggagggataagatgcagaaaaacaaggcagcctacttactgatcgatggttcaaacttcacccgactcgcttgcctactggccggcttacctactgtccggccggtcagtttgctcacgctctctctggaaataatcttgatctttactattcgttccgttacagttcatggctgtgtttagttacattcagacttccaacttttctgttacatcaaatgtttggacacatcagtctaaaaaaatatttgaatatatacatggagcattaaatatggacaaaaaaaacccaattacacagtttacatgtaaattgcgagacgaatcttttgagcctaattacactataatttgacaatatggtgctacagtaaatatttgctaatgacggattaattaggcttaatagattcgtctcgtagtttacaggcggaatctgtaatttgttttgttattagtctatgtttaatactttaaatgtgtgtccgtatactttaatttttttttgaaaagtaactaaacatggcctataaatcgttttgtttttttaccaaacttaaactactctaagtttagctaagtttgtagacaaatataataatatttacaataccaaattagtttttattaaatataatatatttgtcttgcgttgaaaatgttactactttttttctacaaacttagtcaaaattgaagcaggttgattttgatcaaaatcaaaacgacttattttctaaaacagagggagtattactgtactagtactctctccgtctgaaaataaatcaacatcgtggtagaaaaatctaaacatatactccctccgtcccataatagatgacgtttttgactttttatttgtaatgtttgaccattcgttttatttgaaaaattagtgcaaatataaaaaaagataagtcatatgtaaagtacttttgataataaaacaaatgacaaacaaaataaataataattctaaatttttttaaataagacgaatgatcaaacattgacaaacaaaaactcaaaaagacaagtaatattaggacggaggaagtacatgtctaattcatcgtagtaagagatttgtttttaagtagattcgactctatgttgaggtggagtcgaatctctgacctggcacgctcaggtcaaatgacacctgagcgcactatgaaaaccctaatctcgctactcaaaccctatatggctatatcggtagacttttgctctcactactgtagacaacaaggaatcggtaggaaggccagcaggcaaatcgcgtgcttcagtttgattccacccacagttcgtgcggtactcaaattttaccctatcagctctcgcaaataatacttttcaagacccagttttttttcaacaccaaactaatttaactatctcgttttccgttaacattcaaagaaattcacttttaaagtttaaaattattaatacttaattaattataaactaatgagctttctcatttcgtgtacattaaaaatctctctctccgcgaagtgagcatagctcaactggttaggttccttgtggtggaaccagcccacccgggttcaaatcctagatttgacacgggtgctcgtatttacggctaattattctttcagtggtagacgacgtacccgtcgacagcgaggcgtctgtcagtcttcctctcctctctaaaacacggtcatctgtggtgactttatgcttttcccaatccactgccactactagaaaaacgatttttcatggcgttggtctatgattttcgctggcagaaaaatgccaaaatcgctagcaaaattgtaacgaagggtaaggggcaccgaccgccagcgaaaatggatcttcgctggcggtcacgctatactagccgccagcgaagatatgtctattttcgctggcggtcacttaggtgcaccgctatcgaagatggataattttcgctggcggttgtgttatacagaccggtagggaaaatgcaattattttttggcctacttaagcaaccgccagtgaaaatacatttttgcttgcgttcattttaagccaaccgccagcaaaaatacattttcgcttgcgttagcttaagacagctgccagcgaaaatagattttcgctggcggtagaaggaccgcttgcatagatggaccaccatctattaatatagaccacgtggcccaccaccaccaccaccagtccaccacccacccgccccctctctccagctcccctccctcccttctctcccttgcgtctatcctccctctcttctccaccaccaccgccgacgccatccatcctcaccaaccagctcctcccaccccacagtcggcagcggcggttttggcgtggcgacgacgacgcgaggcgggtgcgcggcagcgacggtaggcaggcgagcgacggtggcgggaggcggcgcggcggcggctctcgggcatgggagcggtggcgctcgggagcaggtggtggcccgcggggaggccggattcgccgccgctgggccgcggggaggcaggatccaccgtagccgggccgcggagaggcgggatccgccgccgccaggccgcggcgaggccggatccgccgccgtcggctagatttgattttttgtctttttctttttacatgttgttccagatgatgcatatgtttggatctgagtaaatcatgtttgattgtgtaaatgatgtttgatctgtgctgatgatgattttgtatttcgtgtttgaatttggaaatgagcagcgaatctagatgtggatttgaaattaatgaatcaatgggtgccttcatgggtattttcgctggcggctgggcagctgcatgcgtgttttttttccccaaatccattttcgctagcggccgatttaacacagttgacagcaaaaatctattttcgctggcagccgtcttaagctaacgcaagcgaaaatgtatttttgctggcggctggcttaaaannnnnnnnnnnnnnnnnnnnnnnnnnntggcggtcaataaccgctagcgaagatcttgatcttcactggcctttgctttgtggcggccgtaaatttcgctagcaaaaatctaaaatagccgccatgaaaaatggttttcgtagtagtgtgcacctctgcaaaccccaaccgacgcctccttccccttgctgtggcggacaaggagctccgagctgagcggcggtgcgatcgtcctcgtagaggttgccgcggacctcgtcttccttgtggagccaagacgagccgtggcgcgctcatcctcgcggagccgagccgagcggcgcgttcgtcctcacggaggtcgccgcggaccttggcttcctcacgcagccaggcagagcagcggcggggcggctagattcggccttggctcatcagatctcccctctcctcgctggctgttcaaggcaacatcagcgaactcctcggctatggaatgagctggatcaacctatatcagttgtccccttccacggatcgtcctcggccacggcctcttcttctctgtcgctttccccattgagccggcgagcttcaacagtgagagacggcatccggtcgccctcctcccctcccctggacgacgagctcggcagtgtggagcacgaggcaacgacacatccctttctctctccccctcttccttggcggtacagagcactagtgtgggtcgtatctaaaaaactgatgaggaaccgatgggatagtttggctacgcggtttttgctttgctccactggtgaaggaggtggcactgaatatattcggttccctctgcccagtcggaactcggaacgccacatgcgcaccttgtgaatggcctaacccgcattatgcctgcccaccttaattgacccggactgaagcggcagaccgcgcgcataacgcagctgcgccgcacaccatcccatccaggacgagcatcgacaagttgcgttgatcttcacctttttttctcctcttccctgagtcctctgttcgatgtgttcggcacacgtacaccgccaagaacactgctgcgctatgatacggaggcccctggcagagaaagtggccatatataacaaggcagttctagacaagcaagaagagcagaagaagttggacgaggcacttagcgcgccggaagacccgcgaactgcacagcttgagctactgccgttgctcggcaaaaacctgccagatctgaacgtaactgtgtatgatcgccgcagcgcgagaatccggaatgcctacaacgggcagcgggtggccgaagcagtgcaatcaagctccggctccgacaaatgcagcagaacaacgaaaagggtaatacacgaacgttcgtgtccggcgaatcagtcggaagggacacgtgaaacaggatgacacgtcattttcttccgttttcattttttcccttcttttacgttattctcttctgtaatccgttgtatcttttacgtgattcttccataataagtatttctgtttctttccttcgcttctgtttatttctcagattccttttttcgttatacatagtatttttttatatcttcttaacggaaattttctatacaaataatttccggggaaacttttctatatatagtgagactttatatatatgtaaactttatatatatgggctttgaatatatatacttcatatatatatatatatagattatatatatgtagactttatatatagagtttgtatatacaaactttatatacaaattatatctataattaaaaagtttagtgcataaattttactaaaaataaaaatacttagatatttttcaaaaaaagtataatccaatctgatcaatcctcataacagaaaaaggataaaaaaaggaaaagtttatcttttaccatcacgtgaaaggaaaacgagaaaccggaaaacatttttttttgcgcggctccgtttttctttttgtcgttttctgttcgctaggttcgacgctagcgcgcgtttgcgcattagacccacacccattgtatccatttacctcggctgtctatttctagtcagaaaaagtgcaccggaggtccctgaacttgtcaccgagatacgaaaacgtcctcaaaccgcaaaaccaaatatatgtggtcccttaactatagaaaactggtcacccaaggtccttcggtggttttgaccccggttttggtctacgtggcggctaagtcagtgtgggacccacctgtcagcatgccacgtcatcactcctgtcgacgtttgatgtcacaattctgctatttgcatagtatggggatcgtcggtgctaggatatatgtgagactgaggtaaaagagacggagacgaggatttttatacaggttcgggcccctgaactgtcaggtaataaccctacatcctgttggccggagccggtgttgctctttattcaccataatcacaccagtacaatatatggggtagcctatctgactgttgtcgacatggcggtctgaaggtctgactcgtagtcgacaacagggtaatcttcctcctcgaatccgtgcccggcgagatcagagatagctctttcgtctctcctgacagtatccggagacaccgtaggagactagccgtgtctatccctgaagtcgatatccggcgtcttgtcttggcgtatgtaggcttgtatattgtcccgtgtattgtggtgggtgttgattgaggtagtcgtttgtgttgtccgtgttgttcgtgttgatcgtcgattgttcgtgtcccctctcctcctagggggccttgtatttatacccatagatgtccccttgtccaagtagaaccagggaaaccaatatggatacaatccgagtagtccttgtcattttcatgtagaactctggttatctttccttatccggaactccctccatatctgaagtcagtttccgtataggacatggtatgtggtgggtcctgccgagatgtagttgactactattaggtatgtggtatccataacccggacagtatcccccgacttcaatgcaaatgaacgaattcatattctcaaccgcgcgcagaccttggagtaattgttatcgagctcatgtgaccgttctcggtgagttcagagataacgttagacttcctttgttagcctcgtgcgggcacctaaagggtttgtctaagtcaatctccgatgtcaaccaaggaagtacatagcgtacgactaagtctcccgtcttgctgtaatcgagaatttggattgaagtcaagaaattttatctcgacgggtacaccatctcttcattccgtattccttgtcaagatccagcaaccgttctcgagtgatcgagaaggcgtagagtctgcgacggagccttgtcgacatttatcgttctcgccttagtcaatcttggtgtagaaccatagagacatggagtcttcgtcaatgtcaaatagaattttcctgaaatcaatactcagaaaagaatattagatagaaatagcccccgagtgaatgctcaaagggtgacatgttataatatgtatggtaaattgaaaatgaattaaatttactgaccaatgttttgtgtatgagcgtcttctctcttaccgacttcgatcagtcagtttgtagagtcatacactctccctagcccccagccttgtcgtcggagaatcgttctcggaggataaggctcttggacccttgacctgcctttgttaaataagcgctgatcctaaccccaagccgtgtagttggaaagctcagtttccgattacacagcttggttaatacggacggcgagaactcttacacgaccagatcttacatggtcttttgtctctacaagatccgacaaggccttatcggctctgggcgtccccagccgaagttcccttaggttcctcggaggccttgtcaagacggcgtaaagggacagtaggataggtttcaacgctaggtgtcgtcatggtaagggatctctgggtaaaacacttggcgatattgtgtacctgctatcaactttgttgaaatagaggtagtaggagagtcgctacaccgctggtcgaggatcaggtagtagtcataactcgaccacttgaagtggaaatagtggaagaatcgctacaccgctggtcgagaaccagacagtagtcgtaacttgaccacttaaagtggaaatagtgggagaaacgctacatcgctggtcgaggaccaggcagtagtcgtaactcgaccacttaaagtgaaagtagtgggagaaacgctacattgctggtcgagaaaggcagtagtcgtaactcgaccacttaaagtggaaatagtgggagaaacgctacatcgctggtcgagaaccaggcagtagtcataactcgaccactagaagcaaatgtacgagagctcactacgatcaactggttgagaaccggtgagtaggtgtctctcgatcatttggagtcgtggtacaagaaccgctacgctgccggtcgaagaccagtcgtagctgttcctcaaccatctgaagttaaggtgcgagagattgctacgtactggtgcgagaaccagcgagcgagtagaattatctctcgagcaccaatggaagttgctagagttggtttattacatgtgtatctcatgtggccagcatgactcacatacccaacttatagcatatccggatatccgtttgaaatcatgtcgggtgatcaagccgacggcgttcgcgaggaattatccgttaacaaccttttctcgagtagtccagcgatggccggtgctatgagataggtcgtcggtcttcgttggcaggttgggtgcgataactccgcatttgtcgagaatgttctcaataatggagtgtactcgaccataacctactcgagtgctcaatttttcctgaaaaatattttctagaaggcaagatatatagcagataatatcgagtatgtactcaaaaaactgcatggatcttctagtattatcaggatacaacaaacagatgtaaatatcaggcattatgtaaaccgtaaacaagcatgatttatacataagagaacagagtgagcccccagcgttagaccgtagttggcctatcgtcggaagtactcgcacaacggatattgtataagaaacatgctctaggtaaacataataaattatagatctgacaatgctgtatcatctgaataggtacgataaattgcacataaaatattgcgtacctttgtagatacatgccggatgtatctacgaaattagtagatcaatttgaaaaaccaatctaccaattaccttattgcgtactcgttcaacatcatatgatctgacatcttttggtacgccgcgtatcttgaggcttgggtgatctcgatagaccaagttgtcaatgacgatgatgattccgatctcgtcggaagacatgctccggtcgggttagatctccacagccgaagtcgtcgagcagcttgttgttggagaatccatctcttaaacccatctcgtctaaatcctgaagcaccaaaatccccctacctggcgcgccactgtcgacgtttgatgtcacaattctggtatttgcatagtatggggatcgtcggtgctaggatatatgcgagactgaggtaaaagagacggagacgatgatttttatacaggttcgggcccctgaactgtcaggtaataaccctacatcctgttggccggagccggtggttctctttattcaccataatcacaccagtacaatatgtggggtagcctatctaactgttgtcgacatgacggtctgaaggtctgactcgtagtcgacaacagggtagtcttcctcctcgaatccgtgcccggcgagatcagagatagcgctttcttctctcctgacagtacccggagacaccgtaggagactagccgtgcctatccctgaagtcaatatccggcgtcttgtcttggcatatgtaggcttgtatattgtcccgtgtattgtggtgggtgttgattgaggtggtcgtttgtgttgttcgtgttgatcgtcgattgttcgtgtcccctctcctcctagggggccttgtatttatacccatagatgtccccttgtccaagtagaactaggaaaaccaatatggatacaatccgagtagtccttgtcgtttccatgtagaactctggttgtctttccttatccggaactccctccatatctgaagtcagttttcgtataggacatggtatgtggtgggtcctgccgagatgtagtcgactactattaggtatgtggtatccataaccctgacaactccctctctctctctctcccttcctctccctttctcctctctctcttcacttttctccagctggcatgggcggcgggggcggtcgcagcggcggcgctctgggaacggcagggacggtggaaggggaggaggggtcgacccagacgttctacggtcgctgccggtcacggtgtacagccgcagcacgacggcggcggcggcgaaggaggaggaggacgacggcgtcgagtgcgtggtgtgcctcgcggagctcgaggagggcgacgaggccaggttcctcccccggtgcggccacggcttccacgccgaatgcgtcgacatgtgggtcggctcccactccacctgcccgctctgtcgcctgaccgtcgtcgtgttgtcgccgcttcttcttactcccgtcccgccggcgccggccgtgatgcacgacgacgacgtacgggcacggcggcgcccacgccactcgtcgcagcgggagtcgaacacgagcgcgctcgtggacgcctgggccacgggcccacgtggcgcgagcacgacgtagtcgctgtgcgccgtgcactcgaacccgcccccgccctccgccgtggcgaactgcgtgtgcacctccggcggcatccacgccacctccgtccaagcgccgccgccgcttgctccacctccgtggccgccgccgcgcagcgtccacatgcgtccacagcggagatgttcctgacggcgaaaggggacatgaggtcatccccggccatgacggcaatgatggaggtcgggccggtggccaggccgacggtgggggagaggcgcggggtcggggtgatggggagcgcagcgaggaggcgcgtgattgggttggtgagcagtagcgtcttgtgcccctatgcatcggacatgaaggcgagcatgctggcggacgtggccgtgggtgagaacacggcggggccgctagcgacgggcgggagcgggaggcaggaccagttggagggttgaacctggccgccagcggctacctccagggacctactgctggggcggttggcgatgccgacatagagctcgtggccgcaggggaggtggccgtggaggttgcggcaggcgctgcgggtcgtaccgtcgtcctgacggctggcgagggaggagaagcggggcgcaccgtcgatgcggcgaaggaggaggaggacgctagccaccacgccgcggcaggatctggcggcaaaagaggaggcgaggaggacgccgacgaccaccatggtgacgccgacgaccatcgggagaagcggggcacgccgacaccgacgaccaccatgctcgccgctagggggccactacctccactgcctctgcctccgtcaccgccgtctactggccgccgctccccatccaccggccgttccccgcccgcctgtcgccaccgccgctccgcgcctccgctctactccgcttcgtcggctgccgcacgctcacacaccgcctccgccggccgccgctcagccccactcgccaccgcccattccttccccgcggcaaatagaagtgaaaaaaaagaagagaaaaaagaatgggaaagagagagttgacgtggcacgctgacaggtggggcccacgctgacttagccgccacgtagaccaaaaccagggtcgaaaccaccgaaggacctcgggtgaccggttttatatagttaaggaacctcgcatatctggttttacggtttgaggacgtttttttatcccgttgacaagttgagggaccttcggtgcactttttgctttctagtacaagcagacctcttcaaggcccggcccttttcttttttcatctttgttttcctttagggaaaacgtacaccgaaggtccctcaacttgtcatcgggattaaaaaacgtcctcgaaccgtaaaaccagatatacgaggtcccttacatatgtaaaaccggtcacaatagatccctcggcggttttgatcctgattttatcctacgtggctgctgaatcagcataggacccacgtggacctcacatgtcagcctcctctttctttcccctcttctctctcttcctcttctctctttctcactcttctctggctctaggcaagccgacaccggggcgaggcgggggaggaggtccggcggggcgaggcgggagagaaggttcggcggcggcgtcgacgcgggagcaagggaggggcgtcggcggcggcgagggtgaggaggccgcggccggggtcggcatcctggcgccggcgctcgccctggcgcgccagcggcggagaacggcggcctgggaaggtgtcgccgcggggccggcggtggacgtgagaaggagttgacgtggagccggcagtcggcgtcagcggcggcttggtcgattggtcgattgagcaccgccgccgcgtccatctccacctccgccgctggagaacaagttacgaaagaacttcagagtcaagttacgaaagaacaagatgagggtcttgagaagctggaagagacagtactgagcacaaaacatattgcaagattgattgacgatttagatgatcacgttgatgttacgaactcacgtcttcagcgcgtgcaaagaggcttgccattctgaataagcgcgtcaaaggtggctgctcatgcatggccctgctgctatctgtctttgctatagtgtttcttgcggttttagtcaaaaaaaaatcgtgtttcttgcattgcggtcattgcttggcttcttatcaagcacatgtaacctctgtccaactcaaatcagtttgaaatgtgcagtctttcaaagatgtggatgctcccatctcatctctgttttgtgagattgtgagaatggaatataattgcaacaaatcttcgttcagaagatgtgccaaaagaaatcttgatcattatcacaataaacggaacataatcttgctaagagattgtacaactgggaagcaaacaggtaaatactaacaacaaagagagccaggagctactcatcaaagaacaaactgcatggataatcagtgcaagaaacctacatccatttccagaccaaagccgcatttctccaaacgaactctagatgcaagccatcttctcaggcaatgagattgtaacgaactgagagccgctcattcagcgggctgcggatccaccacctcgctctcggaagaagcagcgggggcatctccctcggacggcgccgcggcggcggcggccttggcggcggcagagcgggacttgacgaagtcgaggaggcggctgctgacctccttggagtagagctgcagcgccttgatgccctcctccacggacgccgacgccgcccctgctcgccgtcctccgcaccccgtctccgccgtcctccgcgccgccctccaacctcgacggcgtgctcgccatgggcggcggccggccgcgctatcccctcgccatgggcagatgcacgcgccagctgcccagctgctccccagccgcccgcgcgccgcttttccgccgccatgccgccgccgccgcctgccgcccttctcgcggcgtcggatgagaagagaagagagagagaatgaagggagagagattgacgtggtattctgacatgtgggtctcatgctgactcagcagccacgtaggataaaatcgggatcaaaacccacctagagacctattgtgaccgattttatatagttaaaggacctcgtatatctggttttgcggttgagggacgattttgtaactggatgacaagttgagtgaccttcggtgtactttttccttccctgaatgttgtaagccgagtaccagcagtttctttacttccaatcgttttctttcccgctgttcactgtcttcccgttatcgcctcgtccttttactcgtttcacgtctccccgcctgtgccctccatcccaatcctttttccttgtcttctcctaaaccgcggcttaggttttggcgacaacttgtttttcattgcgttttcgagggggatattttgctcctctggctcttttcctgtttttggatcctctgttctgttttggttcttccgtcgcctaatctctcagcatgagaattctatcctggaatatcataggcttaggagacaaaaagaaaaaaaatctctacttctgtccactctgattgaacataggccagacatagtttgcttgcaagagaccaagcttgcatccatagacagattcacaatgccagctcttcttcctgttttcctacgagattttcattggcagcctgctctcggctcagctgggggcttgctaacagcttgggactccagagagctgccaaccactctggttcacgaaaacagcgactccatctcctgcactttccactcgagaacagaccaaaccaagttctgggtcactaatgtatacgccccccattcggaagatgaaaagctaatcttctttaatcaactttcaacgctcagaattgcaaacaaagagctatggtgctgcattgggaattttaatatctacagatacccttttgaggaaaacaacgacaacttaaacacaagaggaatggtgggtttcaactgttggataaatgaagaaggccttgtagacattgacattcccaacagaagtttcacttggtctaacaaaagaagaaatcccacactggtgaagcttgacaggattcttgtcgacacaagctggaaccaatcgttcgcaacctcatctgccagagccctagtggcgacaacttcggatcatatccctattctggccgagtgctcaaacaactcaaacacattccgatatttttcgtttggaaaatttctggctacaattaccagattttgtcagctgagtggaagaaagctgggttcaaggtacaagaccaatgagagcaatcacgaaattcaaccataaactaagaagattaagagctagggccaaggcctggaacagaagaaaacgaagcttgccaaccctgttgtcagcaaacaaatgcactcttgaatatcttgataagattgagaaatggagaagcctgacaaacctagagttttgtctgaggcaaaaggtttttaaacacattgaataaataattaaattggcacatcaaactaaaatggcaaagaacggccaggatcggattctgcactctgggagaggagaataacaatttttaccacacagtagcctcggtcagcagacagaaaaacgatttaaatttgaaaatatactgttcatttaattttttctcaggaatattcgggatgcaaacacttttgcagaaatataccgtcggtctcgcacaacgtaccgttgcgcaaaaatgacgtgggaatgacgtcgcatgtggtatcgcacggtctcgcggaatggaagagcgagactactgtgattaattatctggattagcgattaattattaggtctaagaaaccagcgacattgtacaatgggcttcatttgattagtaattaattacttaattaacaattaactaataataattagtgattaattatccggattagagattaattaattaattaatcgctaatcaggataattaatcgtaattaaatcgcaaggcaccggtattgttgtttgcttgagcgatatcgctgattacttgagcgagaccgcgcggttgctgcgtggagacgacgtcacctggcggcggcgtaggtggccggcgtggagatgtaagccttcaggcggcaacaatgtggtagccaagtaaggcagccctccacggtaggtatggctcgaggtctcgggtacgcccacccggacatgggcctcatgctcgatcttcagaaaatacgggtcagtagctatgcccagtagcccccttacgccgaggtagaatgaggttaattcattgtaacttggggtaaaaagtacacttatcttcttggaaaagagaagccgggtagcctcctgactccatgccgggatgactggggtcatcgcgaggtggagttgtcttgcacttttgcagcgaatcaagtctatagtcttccactgtgccactggatggttttgagccatggggcaagcaggtaaggtacacctggcttagccggccaagacatggccagggccgactaggtcgccggcaggttttgagcctccgggcgtagcagtaccacagacaacaaggactatcaagcccaagtgcctgaggtcttcgctcaacccctaggtggttgccagccacctgcggggccaaccgggagtaggtggccgggaggttttaagcctttgggcgtggcagtaccatcggtaacaacgaccgtcaagcccaagaacccgaggtctttgttcaaccccctaggtggttgcaagccacctgcggggccgacagaaaaaggactcctgctcagccgggtagggcgtggccagggccaagtgaggggctaggaggttacaggcctccgggcatggcagtaccaaagaaaagaaggaccgtcaagcccaagaacccgaggtcttcgatcgctcgactcctagatggccgcaaaccatttccgaagccgacagaaggggggacacctggctcagccggtaaggtctgaccagggtcggatgggtggcctggaggtcgtaagcctccgagcgcggccatacttcaggtaacgaggaccgtcaagcccaaaaacctaaagccttcgctcaacccctaggtggttgccagtcacctgcggggccgacagaaaaagggacacctaacttagccaagtagggcatggccagggccgagtgagtggccgggaggtcaccaacctccgggtgtggcaataccacaggtaatatggactgtcaagcctaagaacccgaggtcttcgctcaactcctaggtggttgccggccacctgtggagccgacggaagaaaggacacctggcttagccgggtagggcatatggccagggccgagtgggtggcggggagctcgtcacttggtcagagcgacagctcattgttttcttttccttttttaatatattgatgatcgcttcttcatttttaatatttcctgatataaaattcataaattgtgaaagaaattgtaaaagtttcagacaaattaaatgcataataagtaataacttttagggtctattcatacatgcacactctaatccataggtatttttcaagagatttgagtggatagatattttctatgtttttctctctacaatttataagaaagaaaaatttcatttggttttcctataaatacattcgtacgaaccgaatggcactcatgggaattaatccatagaaatccaaaaactttggtttttctctaaaccgaacaagtccttaatattgttttaaaaattcagtaaaacacctacaccttactcatttacggtcagcccatcctttcactaggattttataaaaatcgaatctaatcttcattgggttctattttatagcttttatatgtcccatcgatcaatgtcacctactccattacgacaggttaagaaataaatttatctaatattttaaggcaacttttatatacaaagtttttgcgcaaaatgcatgggttagtagtttgaaaagtgtgctaatagaatacgagaaaaaatctagatcttaataaaaacgaatggaccaataatacccctataagtgtacatacttaagaaataactttttttttgtcacaagtagggcatacgcataaagagcgccatccacgtttcacacgtgtataacaaaatgattgtggcccaattgaaatgcataacatacgagatagtaatcttttttcatataatttttttcgctccactaccaggctaaagctagcgtggcgcaaaatctagctaaaagtttcccgttgcaacgcacgggtatttttctagttagctaaaaaatcaaaaaaaaaagtgcctatactattccatttaaaaaagtgcaaatttcttcgcattgcaccgatgaaaactgacaaaaatggaagaaaaagaaggagaacaagctctacaccttttatatggaacccaatcatagatttgaggtcaaaaacctcccccccctaatttgtgtatgtttagaagagagagaacgccgaaaaaaatgggcttgtgtcgggttggtggctatatagcccgacgatcatcgcatgcggtcggattatcccgtgaacgggataatgcgtgcggccgacagcccggcgtcggtccacggatttttccagccggagccacttatgccccgcctggaaactaacggggctggcgtccaagaaaatcaatcctgtagtagtgcatggtcgcctctaccgctcgtcggagtttcatgctcagacctgcttcagtgccgcgcgctcaagcatgagaccgataatggggaagaggcttcgtcattgccgcggcctactgtacaagctgaaggcggcgattcaagggaggtgtacgggggcgagtaccagcgcgccgtcgagaaggcgagggagatcttcttctcggtgagctgcattcctgaaccccctcaagctcccctcatagatgttttttttgtgtgttttcatgtaataatccatgtatatggatgtttcattagttagatcaaagtgcttctacgggtttccaaaggtgtttcattttttctttgattttttctcagatctttgttgatgtttctgtagcttaaatcatttgtttcatgtgttgaactaaattgtttcatccagtgatctgatagtgtttctctattttttaagcgtttcgatgacttaaaccatttgttgcatatgttgatcaaaattattttatctagtgatttgactgtgtttcacattttttaagaactgaaacattttatctagtgatttgatcaaacattattttttcaaaattgtttcacatttttctaattagtgtcccaacatccgatattacgggactaaaaatagcccctgtgaaacaaataccaccttagtttcttgccaaacttgagtaaattttataaaactgtagatactttgcataatctatcataaaactatagatttaaaaacttatttcacaaaagtagagatttagtgtttttttaatcacaaaactacagatactttgtacaatatatatcacaaactgcatatttaagaacttgtttcacaaaattatagatttaatatcttcatttgtcacaaaactacaggtttagtgtttttattatcacaaaactataggttttagcatttgaagacactaaatatgtagttttgtgataaatgaagacattaaatgtatagtttatagttttgtgaatacactgaatttatagttttgtgaaacaagttcttaaatctatagttttgtgatagattgtataaagtacatatagttttgtgataaagggagacattaaatctctaattttgtgaaacaagctcttaaatagttttgtgataaattgtgcaaaatacatgtagttttgtgaagtttactctcataaatacatatctcaccacggcgtccgctcctcctcacggcccaacattggcggcccagacaggggaaaggggcccatgggccagatgagaatcggattccgatattgttttttttttgacaccccaatattgttttttgtttgataggattccgatattgtttacaacaaataaaaggatcctaaaaaaagcgcaacaaaaagaacggatccccctgtgaagcggctcgaaagaggacacacgactccaccgagatacccatcgagcaaaccctagccatccgaccgtgtcgccatggccatgcgcgctctgctccccaagctgaggatcccggcggccgcttcccgccggactctcccaccgtttcgctcttcatccaccgcctctcaggtgagattcaatccaattcgttccccctcctctaccgatacggactcaggttctcatgttcatgtgcgatgcgacacctcgtgattttacacctgcttctacattttttactcttccgattcaccgtttacctatgtgtgccttgcccttgcccgtgccgatgaacctttagaccctttgtttccttcaaattatctagtttctttgctactacctctctctctatatatagtactaccttatatgcgtgtctctgtgtcggaattaaatcttctttatttgccccccgagatgagcaaatcgaccctgttatttccctttgcctgtttttcttcattattatttaccaataacaagtagaagagtagcatttccttttggtccctaagggtgtgtttagttcacgtcaaaattggaagtttggttgaaattggaatgatgtgacggaaaacttggaagtttatgtgcgtaggaaatttttgatgtgatggaaaagttgagaactaaactcggcctaatcttatatagtagctagcctctgtttctcacctagtcttcttacgcgtatgatactcgcctcgctggctgttttttagctagattgatcaagccagtccttccaatttgatgttagattcacaccttacttgattaccagcgcatgtatatagtgtctttgcttccagcagttcattaattatttctggtactctggttgattttcgcttaccattgcatcgccatctgaatttttctcttccatcttatatgcaactgcaggataagcttgcagccgtcaaagaacgctctccacaactttatgacgagtacggtgcagattcatgttctattttgacatcaatttcgtccttttaacttgcccaacatacatgtttaactctaaaataaaacttgctgactaatgacttctctttatttttttcctctccctccaagcctctactggaaaaatgcttgtgaacgcgaggacaggttcgagaggaagattttgttttatcaagtcattttcaatttcatcgcattcaacacatcatcttatcttttcggctcttccagcgagcaggactaagaggagtagtgttaattaatattaattaattaatagcactttgagtaattatgtggcatctcttgtagtagcactttatttatgatatctatctgccccctctctgcatgtaacaacactttgaatgttatcagtgtgccctgaaacaaatgtagcgagcaggactaaaaggagcagtgttaattaataataggtaatgcactttgagtaattatgtggcatctcttgtagtagcactttatttatggtatctatgtgcccccactctgcatgtaacaaccctttgaatgttatcagtgtgccctgaaacaaatgtatgggaagctaacaatttttttgccatagaaattgcgctctctttaattgtttttcaatctgttcaaactactcgaggtatgtataccatgactatttggggtgctgtttggagtcgaattgagtttgtattgtttgctttagttccatgcatgtataataggttgcaacctgaaaccgttagagaagaactgaagttgtaaccgatatactataacatatatactactccctccgtttcaaaatatttgacaccgttaactttttagcacatgtttgaccgttcgtcttattcaaaaaatttgtgaaatatgtaaaactatatgtgtatatgaaagtatatttaacaatgaatcaaatgatatgaaaagaataaataattacttaaatttaaatatttttgaataagacgaatggtcaaacacatgcttaaaaaatcaacggtgttaaacattcttttttgctgataacatccacacatgacacatccaaaaaagcactaggcacttccctcccgatccttctagcgtctcctctcagacatgtggcaagcaagaaaaagattactccataaaaaataaacaatgggctattggttttcatggcaattaattggcataatttaatgggctgcactaattaagatcaattttgagacgtcaaataagtaaaataaacatgaacggttgttgtgaaaaaaaataggaatacatattacgatactgcagtatgtaacttacggactactttatttgtaacaatcaggaaaaagaccactataattacaaggaaaaaaatcttgatatcttttacacataatatggtcgcgcaaacgcgtgactgagtggctcgttaaattaaaataagaaaacttgtaatattttaaaagaaaaacaatagaacaaggtagagacagaaaaaaaaagaataaactatcatagaactgcgggaactgttattcaaactcagtgccttcacgcgagaggaaatgcaatataccagcaggctagtgctccttcattgtctgttagctctgcgcaccttttatattccggaatagaggtcagcgccagctacaatgacggcgagctcaatggttggcgctgaggtcacggcttatttttagaattagtttttgatgtaggttattcttgaaataagttttataaaagggtcaatttgtcaaaaaaaatagcttgttcgattggagttgaatagtacatattggaaatacatatacgaatgatacaaagccagaacatattgctcgaaattttttattagcaataataataataatcctagttactggaaggccttgtatcaacgacttagaacggtaaccaccatctcaatcgggaggcaacccccactcaatcgggcaaacggccgtcatgaagctatctcaatcgggcctcaattaaagcccgataactttgacccagacgaccggtcaaactatagcccatcacgaatgacctatctcaatcgggccacgactatcacccgtcacagatgactactaacctcaatcggacctagactagagcacgtcacagatgacacttatctcaatcgggcctaaactatagcccgtcacagatgaccattaactatagcccatcacagatgagtataataaaaaaaaatttattttttggctagccttaggcctttgttagccatgccatgccgtcccgcctctcccaggccagtctttttttttcaggccaagcatgcttaacattaaagttctttggaaatcggcttccgaaaaagtagttataacttgttggtatgattattctattaatcctattaagccctgggccaggatgtcacaccccaacattccccattcatatacattcattcacatacacaaccatcaatatatttaacacaaccacattcacataacatccattttgatcacatatttcacatcaattcacatatttcactagcaaaaccgagttaattggatcaaatatatatttagcaagtattatcatcaaaaggaggcaaatcagacttctaggaaaaatgaatttcgaattgaattttataatactaaataaactcatatgaaaaagctgtcaaaaacaaagttatagaactcattaagatctgtcaaaaataaagcccatcacagatgagtcatcagtgatgggccctatactaatgcccgattgagatgacctatttctatcgggcattaaataatgcccgtcaccgatgagtattttttccattttccatatgaaatgtttatattcaatttatgtggtattttttattttcaatttatgagaactttaaatttaattttaggccatttttgtgtgtcaaatgcaaaaatcacaaacaacaaaattgtataactcatcgagatctacaactattgtatcggtcctttatacaaataagttcatttgaacaattcaaattttgaattttcaaaatttgacaacttcgaacaaaaattgaggttaataaatgattttaaatggaaaagtcatcataaccaaagttgtagaactcatcgaggtgcaaaatttttattttggtcatttctccatctgactcaatttgaacaatttgaaatttgaaattcaaagtttgagaaattcaaatagaattttttgttagtgaacgacttcaacagaaaaagtcatcaacaacaaagttgtataactcatcaagatctataacttttatttttgtcatttttctatataacattttttgaacagtttgaatttgaatttgaaaatatcacaacttcaaacaacattttcaaatattaaatgatttcaactgaaaaagttatcaacaacagagtagaataactcatcaagatctaaaacttttattttggtcatttcttcatccgataaagtgatagtaacattattcacaaaattgacatatttcttatctggttttataaactataacacatatatgtaaaatttgtgaacaatgttatgaacattttatcggatgaagaaatgacaaaaataaaagttttagatcttgatgagttatacaattttgttgttgattactttttcagctgaaatcatttaatat

SEQ ID NO: 2619 - DNA, 4555 bp, Oryza sativa
tataggtaagtttggtttgctctgattttagaaaaaaaaaaggaaagagaaaatagaatagatcaaaaagccctcgagaagattgaaaaacattcggtcgaattggatagggaggatcagccccagtattgtattgacacgggactactttcctgagattgaagacagtggtaggatgtgcaagctgaatgccgaagagaggtagcttactagctaggacgtagtgccgaagagaggtagcgtactaggccggggctgaaaaggaagaaagaaatgggctttcgactcaaaaacaatattaatttttattaactttttaattataatgtatagtgatcccaatgttttaatttattactcagctcctaatagttattgtatataaaaaaatactttacccgttgcaacgcacggtattttttctagtaatttaacaaaactaatttggtaatgtaaatattactatatttgtctataaatagtagaactaagaggttaaatccttcctggcgatgcaccgtgaatagcctaaatattgaatcacaaggcagttgaataacaatctcagttccccaccaggaacaacacattattaaagattattaagaggtttagttggcaactcaaaactggatattatcagacatgaatttcattttaacagatagaatatttcgattctgcttccaaatttcattgacatgatggtagatgaaaatctagcctgaaaatttaggcacaagcatgaaggtatccagcgagtaataattgagagacataagatagtactagtaggattttaggatttgagtttacagacagacttagtggactttttatttttgttattatattattattgtcaagcaactcggttatcttttcatgattgccactagtaggaagtaaacacaaatccaccaaaaaaaagagaggggggattcgtaagaattatgctatctaagtttatttttcactcattccatatataccaatacaaataacaaaaggatagaatacctatctgatcccaatgcaactcccctatgagcatcttcgaagactggccacgcacgcacactcacccctatgagcaatcttcgaagattggatcggcaaatctttgagattgacgaagtcaccaccgtcactaaaagcacaatgtcgttaaattttggaaaattcgtttttatgggaagttgaacccataacctatggtgtcgttaaatcttggaaaattcgttcttatagagagtcgaacccataatctaaggtgctactgaggctcttgtaaccactagattacatgcgctttcgcaactattactcactttatttactcttaatacaattattccctacttttgtaaacttcgatacaattattactcaaaaataaatttatttcgaaataaatgagaggagctgatgaacccaatcaatatggaacatactccctccgttccaaaaaaaaaaagacaaaccccgcgtttccgtgtctaacgtttgaccgtccgtcttatttgaaaaaattacgaaaaaaaattaaaaagacaagtcacacataaagtattaactatgttttatcatctaacaataatgaaaatactaattataaaaaaaatttatataatacggacaatcaaacattggacacggaaatctagggtttattttttttggggggaacggagggagtaggtagtacattggaaattagaagaagcattaggagagattgatggcggtcgctggcaagataggagtagtagagtcgcgggagagaaaggagggaggcgagcgagacgagaagatgatttgatttgatctgattttggttaattttgatttcgatttgatggtacgagatacaagacgagctggtttgtccacccacgcacggcaacgccggtcggtcgtcgtgcaacggagtacgtgatcgaccagggtcggagtggcatgtgcatgcgatcggcaacaacgtcgtgcatctgcacgacgggtccgggtcggactcggacggattacttccccgtccatgtccagatttccttcgacaagttaaggcgaagctactggggcgcggttccgggagcgcttaagtcctaactaacctgttttagactctaactaattgaattagttttagataatagtgataattaagataagattttttttgaacggaatgtttgttgttttacgtcgtgcatcatttctctatctccacatgctgctagctgctgaccaccacgcgtgcatgcatgagccatgcatgggggcggcgggcgagcacctcgcaccaccttaccaagaatcgccgccgccattgctgttgccgttgccgagcatgctgctattctagaaccctgtggtctcatggccaccgatgacgccgccatcgccaccttggttcttgccgtcgtcgtgctgatgatcaccgccgctgttcgtgtcgccagccacagcgctcaccaccggcttcaagtcctcgaaggggaacaacaacatgcccaccgcgctctcttgcaacccagcactgcacgcgccgaacaccccggagccgccgcctgcacccgcgccgtgcgtgtcttgggagaaatcgagcacggtctgaccttgttgctgctgctgctgtcgtggtggcggcatgcggaactcgccgagatgtaacctcgccgctgcatactccgccaacatccctagcgactccatctgaggcagaggaatgcagtagctgatgctcctcagcaactccatcgccgagaacacgcacccacactgcccctgccaccggcgccattcaccgccgccaggttgcctccggggttgcacatgctgctgctctccaagctcgggaacgccgtgaactccagcgactgcagggcgtggccgtggtgttgcgggaatgctaggttgaggtcctgcgcgccctcgtgcatcagcttcaggttcttagccgccagccccacggggaccgagccggacaccgccgcagaggaggaggtcgacgcggccaccgatgacaccacgaggacgacgagcgctttttctcccgtgccattgccgtcgtacgcgcctccctcctcatcgtcgctgtcgtcctcgtggccgtcgccacgtctccaccaccaccccaattgccgctgcaatcgctaaccctagaaatcacacaggtggaggatttgggggagaatggttggatcggaaatgggggagccaaaatgtggggggctaaaatgcaagtatgtttccaccgtggacggccacataagcaagtcaacccagtcagaggcgctttagacctaaatgattcacttaaataagatcgcggactcgaatgacgattttcctatatcatagaactaagtgacacctcactccaactttaagtaccggccatgtactttactctttaaaaaaaagtacgaatctatcgtggtggagggggtatacaataaaccaggagcgcacggcgcgagacatctatcgtggaaaaccttgcagcgctgatgatgaggttacaactcgcactagaagggataccatcatctcaatcgggcggtaaaccccatctcaatcgggcacggcgtccgtcacaggctagaagtcacagatgtgaagagttatctcaatcgggcaaacggccatcacggatgaatctatctcaatcaggccctaattaaagcccgtcaccgatagctttgacctagacgaccagtcaaactatagcccatcacagatgacctatctcaatcgggccacaactagcgcccgtcacagatgacccttatctgtgacgggcattaactatggcccgtcacagatgagtcatctgtgacgggcattaactatggcccatcacagatgaccctcatctcaatcggacctaagttaacgcccgtcacagatgagtataatcaaaaaaaataaattttattttttggctagtctcaggcctcctaggctagtctttttttgtcctcacttgaagttcaaactttccggtcggtcaccgtgaaattgctccaagccaagtacgcttaacatcaaggttctttggagattggcttccggaaaagtagttgtaacttgttggtatgagtattctattaatcttattaagccctagaccaggatatcaaattggggttattaaatgatttcaaatggaaaagttaccaaaaccaaagttgtagaactcatcgaggtgcaaaatttttattttggtcatttctccatatgactctatttaaacaatttgaaatttgaaattcaaagtttgaaaagtttaaatagaattttagatcagtgaatgacttcaactgaaaaagtcatcaacaacaaagttgtataactcatcaagatctataacttttattttggtcatttttctatataacattttttgaaccgtttaaatttgaatttgaaaatatgaaaacttcaaataacattttcaaatactaaatgatatcaactgaaaaagtcatcaacaacaaagttgaataactcatcaagatctaaaacttttattttggtcatttcttcatac

SEQ ID NO: 2620 - DNA, 3319 bp, Oryza sativa
ccagaaagatggggtggggtaagggggggggggctccgggacatcgaagcctctctccggaggtacactttgtttattccggagctcttccccaaacacattttaacgacatattgcaggatagttagagttgtgtgaatgcacgacttcattatatactggccatgtgattgatccacgtaatgaataagaaaaaatgtttaacagcagaggttatagtcgcatgaatgtgcgactgcatagattagtatttcttgaaaccggaggtcagtgcagctctcaacagatagatatggtggaacaattttatttggtcagtgttgagtttccttgacatgcactgtgcattagtaaatgtatatgctctacacacagaaaattgtaggctttttcttgacagaattttatttgtttgtcaagtccaacccactcagcatcaccaagacattgacagtaatcaattcccaaaactaagggtctgttcactttgatgccattttcaaccttaccaaattttagtaaagttgccaaaaaaatggctacatttagtttgctgccaaattttggtaactatataagaaatcctgccaaaattttgacaagttaccaaaattctggcaactatgccaaaattttggcaataacaaaatttggtaaggtttcttttggcatcaaagtgaacagacactaagttttttggagctcctgaactgtatatctaaagtaccgaaagaactaaagtttcttgcaatctggttaggccacgtcatctaaaatatatggaccgtctgatttcccctcgagacaacgtgagtcgttcgatccttcacttggtgtaacctcttcgtgatactccgagaaacttctttttgcaaatagatccttccaggtccctacgatgaaatcgcgattcccctttatctcgtcttctcctcgtcacgctcgcgccgcatccgctcacgaggccgaatcgccctcgcgcctcatctcgtcgtcgtcgccgcctgcccactgccacctcttcccctgccatgccgtcgcctgctctgcactatcacctcttcctagtccccgccaccggcgccgcttcctcctcctcgtccctgccctccacctccagcccccagccaccgcctcttcctcctagtccccactggtactgtcgcgccgcctgcacctcctcgtcctttctccatccctagcgccacgctgccgccgcttcctcctcctgctcctctcctcgcctcccttcagaaagccagcttcaaagcgctatggcacatcccagagcaatggcagcatggacgcatgtgaggacacccatccgtcgagccgaccgtggtaaagctttcatcaaggtgctcgaggccgactccatgtgagttcacctgatctttcctcctgtttgctactccagtatttgggctgaatgtatagctctgctcctgctatgagattgatgagttgcttcacatgtccgttctcccaaatacgttgaactcggtgctgctcaaatacaactggcagtgttgatttgaattatggaaccataatggtcagttacttagttgtttgagtttaatttccagaaacatccactattatgttgtaaaataattgaagaccggacaggtgaagatgatctttcgaataagccgatagaaaaaaaaatatatgggataccttctggctttcaatgggcaaaacctaacagaagacttattcagtttggccttggtgaaatctgtaacctggaaacatattgttttgttttcatatatgatatatgcagatccaacaaatgctttggttattactcagtatagttgaattccatcactcatcagcccgttaaagaatactgttaattttctgaaactaagagcaatgccattacttaatctctattcacttatgaataggaggttttgttcttatgggaaagtaggtttcactattgattcctcaattttttgtagttttttctatgcgcgctaactcagcaagttttttatgggcctaattgttcaaagacagattcttttagactctagattgaattaaatttggatacttgacatgtacatatttttctataattcccatctaaccatagcttttgctagcagactacaaaatagaatttcctagaacctgatttgtgattataacattttgtacataacaggtcgaaatcagatgtgcatatgtaatggctcagttctgccgaccattaataaatttctgaaggttagaagtttcttgccaatctcaattaattaacatccaaaatatcaagtgtgatggctgctctaagttctaattgtttgtgtatactccaatatcgctatgaatctgaacctgtatgtggttaacattacagatttgctatgattgattctatcaataatgccttggcatttccctttacagtgtttgaaggcactcaaagttagatgccctttttgcataatgtaagttttctctggttattgaataaccatgagtggtttttgcctgactgatgattctataaaaacgagtggccactgatcaagctttctatcctggtgttatcttttgtctgacgttatgtaatttgataacatatttttttgtaacataatttgatatagaattttagtttctctaatcattgagccataaaccttttgattcattgactaatttatatgttaatgtgagaacattcttggaactatgaaaatatggcgaagtcccaagtattggaaaccaaaagcaagaggttgatcttgaccataatatttaaaccttttgttcggaacataggttcatctcgatatataattctagctaaatgtttatcaagttatgtaattttgaaagagaaatcaaatttaaagtagaatccaaaattataatacgtatatgtaggtgaatctaacatagctttgccactggctttagtggcttaagtggttttttgcctgactgatgattctataagtctctcgagttattactgcgaactactacgtactccctccatactcataaaggaagtcgtttaggacagtgacacggtctccaaaacacaactttgacttcttattactataaaaatatttattaaaaatgatatatgtatacttttatgaaagtatttttcaagacaaatctatacatataatttttatattttcaaactcaacaacttaagagtaattcatgatttatattcccaaggtttgacttaaacattctcctaaacgacttcctttatgagtatggagggagtatttgttaactgtcaagtagtagtgtctacagtggaatc

SEQ ID NO: 2621 - DNA, 2228 bp, Oryza sativa
gttaactcaaaagtatgaaaaagttactcatatgctaactgaagtattgatccaaactaaagttaccaaagcagcgaaaagccgaaaacataagaaaagcttagtggcccattggagacaaatcaatagagcacacaagaagcatgttaccatggacatgttcaataggcaccaaacatgctatatatccgtatatggtatcctcaagtactatcatcctaaaatctaggttgctatctattgttatgaataagaagctaaaaaaccagtgcaagcagaaaagcttgagtcggaccattttttagaaaagtttagtgttcatgctcttctataatagttctgtaaaaaaaatactattttttccctgacaaactcttataatctcaaattaatcagttcaaccagtattgaactcccaaattaatgagcccgactggatatcttactgaacagaacaaaaaaaaaaatgcattagatgctcaaatgcttgagatttccatcatgtcattcatcatgaaattccctcttccaatacatgcaatggcaaaagcagtgaaagaacaactatacaggacagtacctgataggatgaggaagaataattatcaactgactggaaggcggccaacgtttgaggtggaagagttgtcttattcaaataagacagtgtttcttcagtctgatcagaagttcagaatgcattactaaccattttttttcagaaaattagtttgtccaatcaagcatttagaggcctaatggctaattgacccctttcatgggactggacaaaaatctaaccaaaaagaaattatcactttaatccattttatattcctcccaatgaacatcatgcatgactccaaaggttccagcatccattccatttcaatttcagagattataaccagaatatgagatatagctttatgcaacgagaagacacagcagaatagcctaccaagacaccgggttgggtagttggcgaacatggccatggcagtgctctcactgtcgggaatgattagcgagtcgagcccctggagccctagaagctgtgtcagcttcaccacctccaccccctcacctcgatcctcctcagcgctgcacccaccggccacaaccgtataaagccatcaataacccaagcacgcagcatcaaagcaaaccataccgaccatgctcgttgtaggagacatgggcgttggacttgaggcggagcgcaggaacagacgccaacgccgatggagaccttcacagagagggatcggaggagcgtcgtgggacggacggggatgcggtgacccgtcttggtccgagcaaagcgcacggtgaggaccattggctagggcctgcagatcatcagtgaggacccgttggctgggacgcgtgatgaatcaatgaggagggctggcgcggcagatcagagcggatcccactctgtcggtggtgttgctgttggagttaatttatttctagaacataccagcctactctctaaccctctctactactcgtgaaactaaagtcaaggttgaagtccttgctctgtaaattttctagaacagtgtagtgtgtagacatgcatgatgtgattttacagtagtactagtaccagtgaagtttgacaatgtagtagtactacaagtctctagctaggtcctgaagcttcctacatgtcggtttatcaagcctataaatagaaagccagtgcatgtgtatagactgatgatggtgtgctgcccaacgtacaagcaagtgtactgttcagccctcaagcaagcaagtaaagaaaccagttaaaactagcacaagcttctctgctcctcttctctgatcccctgcttaggaaatatttagcaccaacaactggtatcagagcgcccaggttcgagtagggcgtgacggagtagcacggcgtatcggtattgtcaattgaagctacaagtatggcttcaagttcgggcgccacaatggcgcagtctatggttcctgtatttgcaggagaaaattatgatatatggagcatcaagatgcggacgctgctgctatctcaaggattgtgggatattgttgagaatggctatcaagagtattccgctggagaaactcttacggcggaacagaaaaagtctttggcagaggatcggatgtcggacgccaaggccttgttcttgatccaacaaggagttgcggaaagtctatttccgcgtattattggcgccaag

SEQ ID NO: 2622 - DNA, 1159 bp, Oryza sativa
caaaaggtgtacggtttggtactgccttggtaggacttctatttaaaatataaacggcagtattaactgcttcagcccagaaagatttaggcatacctttgtcttggagcatagaattggccatatcattgatcgtccgatttttccgttctgcaactccattttgttgcgcactatagcctgtcgtcagctgtcttcggatgccagcattttcacaatatttctcaaattcttttgagatatattctcctccttgatcactgcgcaatactttaatttttcgattactttgattttccaccatgaccttgaattttttgaatgtctccagggctgcagatttttcttttagaaaatatacccagatcattcttgtataatcatcaataaatgtgataaagtaccaatttcctccttctgacattgttggcactttaccaactatatcagtgtgcactagttcgaatggtgcacttgctctccaagctccactgtgtgggaaagaagcccggatttgttttccaaatacacaaccttcacatgggtcagacttgagagtaataaatggaaggccttgaaccataccttttgtcctgagtagcttcaatgctctgtaattaagatgacccattcttttgtgccataaatcggaaatatcaacttcacttctgagagccatttgagttgtatgattcatccttaatagaaaatttctattcttctccatatttattttagcgaccagacgattatttttacggtccaatattttgcaagaaaaatcttcaaaataaaccgcgtacccgtgttctagaagctgcccaatacttagcaaattttgctttaaatcgggtaccaacaaaacatcttttataaattttggaccgtctgctgtttgaacagcaaccgtacctttgccttcactttgggctatagagccatttcccatgtggatctttgcatgatacgatgaatccatttctcgaaataaatttggatcagcggccatatggtttgtacaaccactgtcaataacccaaacatcatctttttcttcttgagcagtatggcaagagaaaaccatttcttcagatttttccttttcttgtgaaaaattagcccgattaatttctcgagttctgcaatatgggctgcagga

SEQ ID NO: 2623 - DNA, 715 bp, Oryza sativa
tctatatactatctccgtcccatattacttgtcactttggctttttttcttgtaacgtttgaccattcgttttatttaaaaaattagtgtaaatataaaaaataataagtcaaacttaaaagtacttttgataataaaccaagtcacaaacaaaataaataataattctaattttttttaaataagacgaatgatcaaacattataaaaaaaactcaaagcgacaagtaatatgggacggaggtagtattatataaaaaaagagttttggttttaatttgtaaaaaaaaaatatttttgcctttctaaaattcagtgatttggctaattttgctccctgtgaaaatatatttttcatgctaacaaagaagggctatgtgactctatcaaggtttcaatctgggtatgtaaattgcgagacgaatcttttgaacctaattacgccatgatttgacaatgcggtgctatagtaaatatttgctaatgacagataaattaggcttaataaattcttctcgcggtttactgacggattctattattagtttttttattagtgcccgagcaccccatgtgataccctatataatacccgatgtgacacgccaaaactttacacccctggatctaaacaccccctatatggctaagcatatagaaaagaatcaaatcctaactaccaatctagacaagactatgtcaaaattcaaattcat

SEQ ID NO: 2624 - DNA, 10623 bp, Oryza sativa
ctggtgttccaaccacaacatcaacaccataattaagagctctcatttgatgactgatgggaacacctccatagacacaaagagagtccaaaggagcagattccttaaattccttctcaacttgtctagcaagttctctagtaggtgcgagaattatggctaaaggatttctaccactcctgcatgcaccaaactataccattatcacaataaattctatctgtccgataattacataaaacaaattccaggtgagaaagtgaaaccaacccattcttctcattgtgacgaagaatcctgtccatgataggaataccaaaagccaacgttttcccagttccagttcttgcacgtccaatcatatctttgccttgcattgctggatcaaggacagccctctggacagagaaagataaaacacatcactacataaaaaagcaaaaaaaagaaaaataaagtagagtgacaagagcaccaagcaaatcatattgcaaattagataaattgtagggaaaaacacattctagattgagatgacataaatgatagatctactctataaccgctgcattgccaagaatacaaatgatctgcccagattctggtggaactcaaggaccacaataacttgtaattcttttttccccttttaatattttggatctacatctctagatgaaagaacttgacctggtcagaaattcagaatcactagacctcgtttatattgcagactaaataagcacgagtatacaccaccccaaataaggtacaatacagtccatcaaattttctgttgatggtttgaagcaaagtcctattgatttatcgaatttgctgccaaaataaattagacattctttctcttgtccaaacttgcaaacagttgaacagtacgatgcaaaatacattaccagcagctcagcatcgtgtaagtacaactatacagctcctatgtgcaaaactaagaatggcaaattcctagttttcatgacaaaactgtgccactattcaactaaatctaacgattcagcagcacacgactgataactctacagttctagcacttccaaagctaacgacaccagcatctcatctaggggaaagaatttcatcagccactctactcgttcatgttgaaaacgggcctaatcaatcaaacctcagtttctactgaggaaggcggcgttatggagtctaccatgatagatccacagcaagcctgtcctctgttcatgagagatattggtggggactccatgtgttggtttttaaattcatgatcctatttaatttttgtatggaatttatatggagaaaataccatatgcttctattatggcttacaatttgggtgacaaggcgttttggtccatcagtcatctgttcttatatggcaatgttatcttggcttcatttgaaacaattaactgtgagaacgttatttaacacttagaagcgggataagtcgatcaaaatgcagcatatttgcatctaggactcttcatggatcattaacttttcaatttttaaacagttaatgtcctgtactgtgcaatgatttagtttacagcaaacagctggttgcacagcatcaatgtgaagtatccacactgtttggtactcatattgtttacttgtattaaacctttgtctcgatgcttaacttgtgttttttttttacaccacagcaaaatgtagcaaatgttctactagcttctaagtgcagttaacagaagtccaatgtgcactttggccttttggactactattcaactgtggaaaatctttctaacttgaaaatttctaggacagatttaggattttggaaccaagaaaacttattgagctgaaaaacaggttcaatctttagtgggcatctagtaccgaataagcacaagcacaggaagtgtactaaaacaagggcaccagaagaatgtccatcaaattttgagttgacggttcaaagaacatcctattgaattttttgcagggaagatttgaattcgaatttgtgccaaaatcaaactacacaatagtcattctttctcttgcccaaacttgtatacaattcaacagtgggacacggaatagagagccagcagctaagtgaatagggtatgtactactatacaacctaatgtagcaaactaagatggccctttcctcactccatcacacaactatgctgataattcaactaaactaaaagaaatcagtagcacacgacaatgaaatgtaaatatgacagaactgtagaaaaagcacaatctggaatgagatgaacatataaataggcttgttccataactgctgcattgctgagacaccaaatgtgaccagattccagtggaacacagtgtccaaatatgcaaataacttatgattcccttcttttttcttctaatattttgaatttaaaattttacatctgaagattaaagaacttggctcaggaagaacctcattctgtgattcattgtgtataacaataagcacaagtgtactctaaaaaaaaggcaccagagaatgccaatcaaatttcagttgatggttcaaagcaacatcctattcatttgaattcgaatttgctgccaaaatcaaattatacaatagacattctcttgttgaacattgcaaacaattcaacagtggtacacaaaatacagtactagcttctcagtgtataggatatctacaactatacagctgtgatgtagcacaactaagaatggcccattcatcatttccatcaggaaactatgctgctaattcaactaaactaaaagaaaatcagtagcacacgcacagttctagcgattccaaacctaaaaatgccagcatctcatctggagccaagcatttcatccgtgaatctactccttcatgccaaaaccggaccaaatcaagcaagccataataagtttccaattagcgagcagcaagccggctacctggatggggaagagcctggtgatgccccgtgcggcgagcctctccacgatccacggcgagatccccagcctcgcgacctccagcccgtcgtccccaccgacggccgcccccgcctccgggctggaccacgacgccggtgtggacctgaaccccagggggctcggcgagccatggaacgcccgccgcctcggtggctccggcgcagcagggccccggcatgggtcgagagggctagccgacggggagagcagcgcggcgagaagagatctcccccgcggcgccgccggcgaggaggaggcggcgcagagcgcacggctgagtagcgagaacatggctttttttttttttagggaaattcttatcttgggcttgggatgtgagaagtgaagcgggttagcgggtatagggatggcaaaggggccatccccgctgggtgtgttccgacagggccgcacacccgatgagcccatatgcccattggcattagcgagaacaatatgatagttcggcaagccgactgcgagggctgcagctgcggctacgcacagtgagtatggtactgtttgtaccggctacggcacaaccacaacctagcagccgaacaagtccaattgtgtttttttttgttttttttgaaaatttttgtgttgggctttaggatgtgagaagtgaagcggatacggatgataaattgtttgtgttgtttggatctgtttctattcgccgtcgagtaatttcttattgtatcaagttatgaaccgagttcctttttttagaaaaaaaaagaaccgagttcatataaaatattctattctcttaaaaattcagttttttttacgaaacaattacttcaacgttcgtgctgatacaatgttgttactaaaacttatgctagtcgattttttttctctaaacttttatgatcatttaagtgtagtcgttaaaagaatgatcatttgtgtaattaataagtaaaaaaattaaaaattttgggcactcaccctctcggtctcacaacaactatgagtttttccttttatctgtgataaatcttttacgactgaaactattaatggaactcgggttattaattaaaacgtgtgactagtcaattaacacagcttacgagtgattctattcatagccacaattactgttcacggacataaatgtactactgacattgcaaacttggacaatcaacaacaaaattggcaggtgttatattggagctagaatgagctgcaaattgcttcagcccgagattaaacagacaactaaacccagactagcatacatccaacgcccgcagctaatctttgaatccagattatacatccacatcaaacagagcatgcatgcacgcactcaggcataaattaaaccactgttcttctaatcaagtcttagagaaagaaataagcctcacatcctctcatatagatcacttggagcgtccaaagtatgggatcttcccaaccagaaaagcccagacgttctccagaatgaggttggtaaaggtgtctataaccattttcacgtcttctgcatcaattgattgaagcaccatacccaactcttgcgcgaacttgtcaatcacgaagggaattccgaacttgatcgccagtacaactgtcacaacaactccaacaaagaggcctagtccagttgtaaaaggtatactccaacgaagttgattcatcatgaccttgattttatccatgtctgcagctccggtcctaaaatttccaaatgacaaacattgattattcttaactttcattaaaaagaacacatgtatgcactaacagaaactaatgattggtacatactgtgcatactaaccacataataaaaagattaaatttcagtttagatcacttttaataactgaagtttcacaatatactagggcctaacatatatttcacataaacaccacatatagtaccattctttacactttcgataagaatttacagctatacatatcctagcgcaaaaaaaactatacataacaatagatcctaccaaacaaatagggtttcattaattagtactaactctgtctcaaacataacaatctaggatatgattaggcttatcataggactataaatttagacatgctctatgtccaaattcatagtcttgggatagatctaatcttatcttagataagattgtggaacgaaggaagtacatataaacttccacaaatcagtcaccacatgacaattgagggcacttaacttgatgaatactcagactaaaaatagtgaagtagctcgtcgcacccctaattagagtcaattctttagagtgacaggtaattaagtcattcaaaaattaaatcaacaatttaagataatcaatcaagcaatatgatatttgttgcttgccctttgtgaaccccggtccaaagtgttaaagaatgttactatatgcagtgttatgtgaaaatatgaacctataactagtccggtgtaaaattttggttagtaaagaaggcccaaaataaaatatactcttaacaaaaaagatgaacaaattgattgattttaaacagctcatacaacagagatgattagatgaatggtttctcacctcggacgagaacacaagtcgtcgagtttgccagagatgttcctggcgtagagaagaatcctttggagaagacgttcatcgcgaggtttcgtcctccgacggcgacgagcaccgggcgcgcggtcgtcggccttgtcggcgtcgccctcaacgaccaccccggcaacatccttggccttgtcgacgtcgctcgtgccatcgacgaccaccgcggcgacattcttggccttgtcctggtcgcccgcgccctcgacatcctggctgcccgcacctcccgctccggtaccgaacttgtcgacatcggtcgcgtcctggaggccggcgccgtcagccatcttggctttgtcggcgtcgtcattgatgtgcttgtaggcgatgccgttcatggcgctgctgtcgcctggtccacctccatgagaatcgagcagctctttgagaccttggtctttctggttggaggggagtgacgagatgcccctgttgcggaggaacggagaagggggcagcaacgggagcggacggacgacgagagcgcgcggtgggttgccgtggccgcgcccgcggacggtgatcttggcgtcccggcgccagcccgtctccttggcgacggcgacgtccttggagaagagcacggcgttcaccgcggccaccgctctggtgtcgtcctggatggcggcgagcgacgcggcctcccgtgtcgtcgccccctgcccctggcgcagcagctcagagcggttggtgacagacagcacggaggtgtgacgaccagccagcatcggtggcgatggtggtgcgcccgcgggccagcgacgcggcagccttggcggcggcgcggaggcggatcatgttccgtcgtcgggagcgcgcggttgtagctggttgtggtggagctagcgatcgagctaaccctagacgacgacggagcggggcatggcgaggtcggaggcggcggcgataggtggatggggggaagggatgggatcgatcaaaccctagttagactcaccatctcacaccagccgcggctcgtgctcgtgtgctccgagagtgagagagagaggaataaggacgtgtttcttttgcttttgcttttagctgttgatcccctcaggcggttgcaggagaagacggaaaccaaaccgtgcctaaacggcgttagccagctgattcgtctactcattccctccagggatgggacccaccatgcaagtccgaccgactaggcgactactggttgcattgcacctaagccgcgcgccatgcaccgatcgtatgtatactgcgttcaccactggacctcgcacgcaacgcaaacgtacggttcgaccgatccatacgaccataccctagcctggcgcacggtgcagtggtagcgagtagcgacaaccctttttaattacacttttgcccttttcttttctaccgtagtgggttacaagcgcgcgcttagcccttgtatactttctttctttcttttttatttttaagaaagcccttggtaatactagtggtacaatgttcgtgtggctgacctgatttaaagttgctggaaaggattaactaattattcccactctccctaaaattttcatgaggccggtgagagtgggcaccaagggctagctgtttagtttgatgtcacaaatatgtagtttgaatgtattttgttatatattctttgaggaggaggggtatcctttcgagtttctcaattcaataatatctacctggtgttcaagaaatcaatattgttagaggcaattttatggtctaccgatggataaatggctaattttgctacatggctatttaattcgttattgggcattataaaaatgtgctatagctagaggacacttacaaaactggtatattttgtgaggatgtcgtggctgttattttattatttatggcctaatcatatagagaaaactttcaaaaaagataagaattttgcccataagcttctaacctaacattggattgaataagtaataagatgtatgatattaatgcacttggcatgatgaccaattgagagttgcataattaatgtgcattttgaaaatatggaaggaaatcaaaattctggtttattttcaaaattctgtaaaaaattaaaaatttagaagagttacaaacacagccttaaagagctagcaattttaataaaaatgtagtctccaacagagttggtattcgactatctaaaccaaaatgtgacaattttaataaaaatgtagtctccaacagacttgccaaacggatggctaagccatccggctagccaaactcatctcctagctagcaaaacttgccaaacgtgggccccaccaccctccaaaccccctctttccccgtcccctcactcactctccctctgtgtcgccgtccttttcttttccacccctcttcgcaccagcgctccctctctgtcgcactcctctcacgtcgcagttgttgaagatccataacttcgcgccaccgctgtcaaagattgggagccaagatcactagcaagcgccaggcgccagggtcccctcctcacgttgccaccgtacgtccgctgctgatttccagtagtctccatcgcatatgctgctgatttccatctccgtcgcctcctcgccgacgcacatcctcctcctccattgcagcaagcatctaggttgggggtcgccgttgtccatcctccgtcgccagctacgtccagcaaaggagctccccatcctctgcctcctgcccccgtcgtcgtctgctacatggatccgtcgtcaagctcatcctccacgccgactaccgcccctttttccttgccaccgagttcgtcctatgcgtcgactgtcgcgccctctccgtcgaggtcatccggatcatcgagctcaccgctccgctgggccaccacgtgaatctcactcccctggttggagagagaagacaatgggcgaggggaaaaatacagagggaaggacaagagaagtaaagagagactaacatgttgggattgggataactattactccagattggagaatgtgatagaaagtttgttggactaaatacaaatatactgtagttctctaatttttactaaatagccatgctctaggctcaacttttctcgagaggcagtcagggccagccctggccctatgcagccgaggcgaccgccgggggcctatgatgataggggccaatacctaatactagtagtctagtacctcatccgatgttgagatcaattatttttattcataattaaatgtgttgcaaatgagtttgccagattcttcgatgtccgcgcctgagattctgaagtttgttatggatgcaaattgttatctaaatatttttgttgcgtatcgaattctcttaactgtacctgtgacggtagcttcagctaaaagaagtttctcaaaattgaagtttcgaagaactatctaagatcaactatgtcacaagaaaggttaaatggcttggctatgtgctcaatcgagaagaatatcttggacactattgatcttaataccattcttgataattttgcatcaagaaatgcccgaagaagtatctttttatgggaagcaatggatatgatgtggttctattcttcattaagttaatgaataatgatattaatttcaagttacaaatatattgttattttggtcgactttatttcttgataattatcagacatgttaaatttaatatatgtatgtatttgtttttattttacaagtaaaattaatgtctatatatactataaaattttatatatagcttagagggtccatcgtgatgagttcacttaggatcctcggaatcataggaccggccccggaggcggtagccatattgtgttcacgcaatggattactagaggagtaatagtagttgacagacatgactatactagagttgcctggaattcaaacagcgtaaagcaaggtactagcctctgggcatgcgggacctagctacccagcagcatctgggcacgacggcacgggtcagcttgcccattaaggaaagggaacagacaccgatgaccggactcgggctctggaaggaagcacaagtaagccagcaaacggaactaaacggcgtcaaaggggaaaagaaaaaggactccctcccttccagtacgcatagatgagatcagtgctccgatctcatctatgccttgcctaatcttcatcaatccctggtcgatcgtgggctcgtttgaaacaatattttttttctctggtttttataggaatctggtttgaaaaaaaatatattcaaatttcaaggctgcttgtaaatctaataatttcatagacttttttaggaaaggcacaacatttttcagctgaacggatgaatataatggacgatgaattatccgatttgcagtgatattagaggtatcttattcgaaaagaaacaatatttaaaggtacaaaacagtatacattaacaattataaaagtgtagagttttgttttatagtagaagttttctaataaagcttctgaaaaattaccgtttagaaacttggcaagtatactctagtgtataaatataagatcttgatattatataatgcgtaacagcgtaagagaaaaaaaaagacgtgggctttaggctcatttgactcagacctgtaggcatcgtttagcttagacgggacggctaagatgatgaaaacacgatcgataattagcacacgattaattaaatattaactattgaaaatttaaaagttgatctgtttaatttctacataaaaaagttttgtttttaaaagatacaccatttagcaatttaaaaaggaaaaaatacgaattacccccccgaactattgcggtcgtctgaattaccctcctgaaccacaaaaccggacattcttcaccccgaactatgtaaaccggacgaattacccccctcgacccaatccacagtggttttggtctacgtggcgtacgcgtggcagtacagtcagcattttatttattaaaaaaatatgggacccatgtgtcatactcctatccaactattccgggctgcaggaat

SEQ ID NO: 2625 - DNA, 7323 bp, Oryza sativa
aacatgctaaaacctgtagttttgtgataatggagacaaaatctatagttttatgataaatgaaggcactaaatgtgtagttttgtgataaacgaatacactaaatctatagttttgtgaaacaaattcttaaatatatagttttgtgatagattgtacaaagtaactatagttttataataaacgcggagacactaaatctgtagttttgtgataaattatgcaaaatacatgtagttttgtgaaatttacactaaaatataaaaaaatattcatgctatctttatgcactattttttttaccggaccatacgagagataaggatatcgagggggtggcgtggttcataaagtcggtttttttggaaaggtcagtttttgtgccaaattgttttttgtttactgaagttaatttggcttttgaacggttgatgtttttttgtgtgggtaggggtgggtatggacggaactccattttcaatgttgtagagatatggaacatttttttaattagcatacttgtactacttcctctagctagaaatatttggcgtttaggataactttcaaattaatgttcagtttaaaacaagaaaaacgacatgcatgtattgatgtgccttcaaaagtagtaccgatcataatatcataaactcattagattctaacatacaattaattgatagtcaaagtgttgaagtttggctaaatcttgtcctaaacattaaacattttatgacataaggaagcacttaatttatgcttggtaatcttctaattaattacctatatgatgttggatatatagatatattcatgagatatgtggtgcgtgggccagtttatacatgcatcattccagacttcccagtagatgtcttcgctagaagttgagagctagagtacatgcacgaggccacacttttgttcgatcgatcaatgcagtcacgcagatgcagtgtagtggagagatcacgtactcgagtagcatgcatgcgcacacggtggtggtggtcgccggccggccggccgggagattcgccggcgctcgtgcagaaggcaagtggccggcaggcattgcatctgatcatatgcatgcatgatctcgatcgatgctgcaagaatcatatcatacatatcgatcgatagatatgaaatcagcatgaatatgatgcaatgcagaatgcagatgagagcgagtggtagcttagcttagctgcttgtgtttgtccggctcccgtcgccgttttcctccctgtcggtttctgcatgcatgccaactgcaatcgtacaccgatactgtgtaccagtttttactctgctctcgctgcagctgcaaccgcatcgtttctgaatcatcttcagacatcacggcgacacgctgcccagcccagctaccccctccctctccctgcctgtctgcaacaacacataatgatccatcaaccttgctaacatatagaaatatacatttggttaataatatactctcttaacacccagtttttcaatcgagaatgcaggactatatatcatcaatatataatatacctccagattaattggtcatgcaaagcattgttggtgtatggggaccagcaaaatatattggagaggaagtacagcatatatatgttgaaaagcagggaccagatcaataaatggctggccaagtggccatggatgttttttctcttggacattactgacctgagaccacccctggtcaccatcatgttggtctgctggactaccctgcagctggccagcacgccccacatgtcgcacgaaaccattcagcagagctccattagttaacccttgcagattaattaacttgattcagagattaacaaagaaaaaattgctacaaaaaagcatcgccacagtgagtccacagctagctagattggaagagagcatatggcaaagggctgatgagaagaatattgacacacacatagcgtcatgcatgtcagaattgtatatttcagaattcagcattgctattgctattgctattgttggttagctgttttttcctttcggtacaatatgacaatataagtagttaggagaatcaagctagagttgagcacaaaattccaaccccaacagcatgcatgggagctagtaaacaaactttagatacagtcttcctttgctcatgccctacatgacaagaaagaaatacaaggtttaggcaaccgttctagcaatgtgtcattttcatgtaatcacctatattggatgaatgtagcatgatgcctgcattttgtgctgctttgtcatttgatcaatgaggagtgactaccccaagttatgaaatggccaaggtgctaagatgtctttagcaacgggacaaaagcgtttcaatgaaaacaaaaagatccaagaatctcaaaagttcggtaaagaacaaatacatctttgagtagaaaaatcagaactaaccagacattgtttgtaggaccaccacatggcacagtgctccattagccttctatggtagttaatttggtgaacatatctgaaaccacattcactttcagtaactgatcaagtaagtcgagtaggtattcgggcagcaaatatctttggtattcgggcagcaaatatctttttcacctggattataccgacaataccagatagtcaacagtagttaccattttttctggcttccaaatatccaaaaaatcaagttattactgtccaatggtgcaggaatacatgctttgacgttacatgtcctcatgtacagccttcagcctctttgcagtgtgccttccagaatttaatacgagctttggcatcacagaatcacacttacacagttatccaatcaaaaacattagggtacatatatacatatgcatagagtacaatattagtgcaattttatttcataatgccagattgtagcaaaatatttgaattaataacattgttatatttacaaaaataattagatactacatctatgatttgctaggttacaggctaaccattttcctcagctggaaattggaataatttccccataataagttggaaacactaactaataccgaagatatcttcatcttagagtaagcgtgccatgggtttctaacttacacaatccatccttagttactttatggaggccaatgctgatctttgaaggcttttatacactccatagtggattggatgctgcttgacacgcccttccccaacttgggcaggttaacgcctcctgaaatctgagggttttcatgaaagtttaggagcctttgtcgagattctttcctcacagccgctacctggctcgcataactgatggcatcccagaccaagcctctgatgatggtaaaggtgtaaaacctagctgattcgaaagggatattgcttgcgaaacctacaaacaggaggaaattctgttatccaaaagtggagaatgtagttggtaccttgcaataatagacataactaaggttggctaactggcaggaggagaaataaaactatgtaagtttatagtagaggagtgttattgctgaactgctatgtctgcattgcatttgatggcactgcagtagcgcgtttgatggtaaaatcacttatgatctaacatctgaacaggactacatgcatatggttagattgctaaatcatgtcgcagcaatcacatgggttgccaggttgcaggggatcccttataacaacagggaaagagcatcattgaaatagagatccaacacaacggtgcagtgtgcacacgtgcatgctactggacatactgatctttttttcacacaaacgggtagttgctttcattttcatttctattcccacatgaacattaattgatttactattactgaacaagttaaaactccattaatttccgagatccaccaactgcagtgcagtgaaacagcgtatattctgcaggaacacaatgaagtaatatcactggataaaaagaacactagccagtgatatttatctcacctatatacagttatagataacaaatcacttccactaccaactcaactactacatggattcgaggagacaaatatcaccctctggtatttagtctcaattatcaataacaaataatttccaatactaactcaacatatcaataacaaaccacttccaatactaactcaattgctatggattagaggagacaattaatcaaacatggcatggcaaacgacgcaatcgaaaactgaaactgcagaagaagagaaaggcatcaccatcaccatcacatatgagcaaagagcaagagagtggcaatataccgctgtggtactggttcctgatgaggccgtgctgcggcaagccgacgccgacgccggcgagcgtgacgccgacgctgaacccgacgccgcagccggcgccgacgtagccgatgacctcgggcccgaacccaggcccccacccaaccccgcacccgagccccagcccgatcccccagaacgtacccaccgtcgggtgcacggggttccacctctcgtacctccccagcatccccttgattatcatcctcggcttcacctgcaccggcgccgccacctccacaacccccaaaccaaacaacaacaaaaaaaaagtcaatctccgacgagaattgctggaaatggcgcgggaggggagagagcatttcaagtggtgggaatacctgcgagttgcgtggggcattcggtgtcgtggacgcggcgggatcggtgggcggcggcggcggcggtggcggcgggtggtggatttggggggaatcgggcatgtgtgtgggttggtctcggggattggatgggttggaggaggaggaggccacttggcgggttgaacagtggtgggcggccatgtcgtcgccgtggccaccttatccttctctcaatctctctctcacacacacgctcgaatccccatccactccggccgtcgccgtcgtgcgcttttccggctgcgctttttggagaggacggaggcccagggggtcggagcttcgctgacttggcatttgggcccagtttacttttctagcggaagaatttgagcgccatttcacagctgctgcaaatgctggtagaaagtacgactaggatcatgtgaaattccagtggctgaattttcagcggcacttctacatttttttaaccagtttttttccctttttttttttttactatagttggtacgtattacctccgtttttttaatatatgacgttgttaactttttcacaaacgtttaactattaatcgtattcaaaatttttgtgcaaatattacataatactttttaataagacgaatagttaaatgcattttaaaagttaacgatgttatatattaaaaaaataaaaaaacggagggagtatgaaaaaaaaatgtggattgtcttactatttgctaacttcatctgccgcaagttcaaaaaaaaaaaaaatctgccgcagtttagaagcatacagagaaacaacatgtacgtggttgaagctgaaacatataccattcccaatcacaataagatgtttggatgccaaagtaccaccaaacgagatgataggggtcaaagtgcaattcaacagggagtacatggacataaataatgaaaggttcctcattttcagaattttcttacactttgttcagagagtgcataaccaaaaggtacaggctagagtatatacattacatgttttggaacaaacctaatacacaagcaaggctacttatttggctacaacaacagactacttaggccaagcgccagaaaaagcgattggtgatctcattcatgacatagaaaagaagattgaaggtcaaaaaccacaaaactatacaaaccggagtcctgtgatcagttggaatcatcgaacccgcctgatctgccgaaatctgatgttccaaaaccattagggcgtctgctgtaccgtgtcgaacctgaatcatcaaaactcctagagcgtctgttgccatttctactgaaattgccttctccaaagtcaccaaatccgaatccatcaggctgcttggaactagacctgccaaaggcattggagggtcgtctaaaatctccaaacccactgccatatcttgaaccagcatcgcgtgatctcccaccacgattaggggaactgccaaagccatcaaaatcaccaaagccccgggaacggccttctccaaaaccaccatagcctcctcgtccgaaagaggagccaccggttcttgggcttccagctaatctagagcgattgtctctcacaacattaaacatgtctgaggcctcatctgcaacttcaatctttggaagctacacacggtaaagcaaaaataagcaaacatatttttatctcagctgcaaaaatgatatcattaggattcaacatgcacagttttggaactgtttttacctctgtgaatttgcatcctatatcttgctcaatgatccttacagctctagcttgatcatttgtgtatattaaaattgcacttcctttcttccctgctcgtgcagttcgtccagatctgtgaacaaataactccgaggtgtttgggagttcgtaatgtataacctgaacaagcatgcggaagattattttttaagttaaccgatatgaacgtcaaacagctagattaatcatacttttccaaaaatttccattaaagaaacacatcaggctacttacaagatcaacattgggtatgtctaatccacgagcagcaacatcggttgctactaggatattaaagcggccatctcgaaatcctgatagtgtcctttctctctgattctgtgaaatatccccatgaagcgcctgacatgcatagctcctgcccatagcatatgctaatctatctgcctctcgtttagtttgagtaaacacaatacattttccaccattagcatgctcctgtggaagtgtagagaaaagagtcgttaacggtgcaaactataaaacacatcatacattcagaagagtgctcactttgatcaatggaccaagaattgatggcttcccatagtgctcagaggcaattgaataaagagagattccttcaggtaatttctggtcctcatcaccaaccttaggaaacaatgtaaaatgtcagaattatcttaacaatcctgttgctcttctcagaaaaactgtgataaagtccaagtactatttccagagttaatcaaacaattcaacaaatgtttctaacctacagatgtgcccaccccatcatttcttatatcaatatgaactccacattatgttatgctactccttatccaggagtaatatcccttcaatttaccatggcacat

SEQ ID NO: 2626 - DNA, 11702 bp, Oryza sativa
ccaatgtcgacgggcacgcggcgggcgcgctcgcgctcgcgacgccgacgccgacgccgcgggcggcggcgaggagcgacgacgtgtcgagccgtctcgacgaggccgacctgagcatctgcggcagcaacgcggtcgtggcgccggcgctgcccgcggacgacgacgacgacatcgacgccgccgcgccgcgcgaggaggaggaggaggaggaggaggggccgggcgccgcgcgcgccgccggcgcgtcgtcgtcgggcgggtcggggagcgggagcgggagctacccgctgttcaagcgggggagggaggagctggttgacagccttagcgaggtcgccgacgagacccggccgtcgaagcggccggcggcgaagcgccggactcgcgccgccgaggtccacaacctgtcagagcgtgtaagacctcaagaacaccaaccaaccattgatggatagatggtgttgcatcatttgcaacaaggtgaatgttcttgattttttttgctgttcttgctgcagagaagaagggataggatcaatgagaagttgagagcattgcaagaactggtacctcattgcaacaaggtaaaataatttctgcgaaaagttgtgggaatttttgttatcctgtataatagtatagtgttcttggctattgccatggttgaattttgtggcaatttgatgattctagctgtttctcagactgacaaagcatccatactagatgaagcaattgagtacttgaagtccctgcaaatgcaagttcaggtttgaaatcaaactttccccatttctccacagtagcaatagaatttcaatccttctggatgaatcaaatcacggtgcctgattgtgagactgttgcttcatgttcagatcatgtggatgactaccgggattgtgccgatgatgttccccggtacccaccagctcatgccaccgatgggcatgggattgaacacggcatgcatgcctggggctcaagctcaaggcctgaatcagatgcaaagaacaacatattacatgaacaattctctgccaaaccagatgcctcagatcccttctccagctatgaatgcacccagtgttccagacgatatgcagaatgataatcgcatccgcgggccaagaaatccttttcttcattgcaatgatacactgacagcaacagctcaggttgattattatgttaaatttcatcattaccgatcattcagacttcaattcttgtttatcttacaatatcagttcttttcaggtgccaggtttgtttacctatggatctcaaattgcagaacaaaatgagattcaggagttactctctggcgctgtcattccatcctcatctgatgggaccataaaataagtaagatgttttgatggtcagtacacagttcttgatatttccaaacttaaatgcagcatggacatgtacatgaaacctccctatagatgcacttgcacaacaatatgaggtatataaatcagagaatacatggtatatcatttttttgcgcttaaccgcactaatttgtgtactgaaactagttgattgtcgtcatttgatctaattccatcttctgatagatcagttttggacacttcagttctgctttgggcattgtctagtcctatcctatcaatagatgaactctggctgtggttgtgcgtccatttcgttctttcgctgttgcattcaatagactattttgtcacattagaaaaaacagtgggctagttcacaaacaattgggttgagcatcgctttcatgatatggacatgataagcagtgtatagggacttgcatgagggatcagcaactagcgaaaaacgctactagtagcactgcatgttgagcaagttgttgcctccttgatgctatccttaatatctcgacaaccaatgctttcttaacacgattgctgaaagataggttcattagctgataaaggttatgatgatctataaagaaacaagtttagattgaccatctaaaacataactgaagatgtcagggaaaattagacatgtgcaatgccatctagcattataagaatactttctttcagcatataaaattcacagtcattcccaagcaatataatactagtgatgaaacaatgttttcctcactttttttttctcatcatcattgacttgtttgttgtgcagtgaccaacatgcaaacaactaggggagataaacaaaggaaggcagaacaactggtcctagaagaatgatttgattccaagatgcagtttgtgtcctgtgagtcgtgtaaggctgaagctttgggacaccactcggcagtcgacacgtgtacaccgcctcctgatgctattcttatctgaagagtatagtgatcaacatcacctttctgtttctggaagggtttttgtctatgggagatgaactggaggatccctttgcatagataatcaagacaacaggaagatgcttcatatgatgctacatgtatggaaatggcaggcaccggcaatatgtgaagaatatagtggctgtgtggactcagcttgagccggcatcgcaaaagctgcacaagaacacaacagtgacagtttcactcttcttttagctgatgttactgttatatgatgcctgagggacatgcatctggtgagttcttacaagaacaaatcaaggaaccaaatgacagttttggttgctatgttgatttttcaactggataagcataaccatcggttcttcaagattgcacatggtctaaagcagaaaaagaacttaggtagactgaaccatgtacaattcagatatatggcacatcaagatcattggaaatgcgcagatatcggcagaaattttgctcctgaacaaaacagctaccacatctgtatctcctcttgccttggtactcattgcctcatcaatgtaactttcacctttctcatgatcttgactgtactacttgcaactagtcgaattccctgcacaattgtgcagtagacagtatagcaaatatgaaattgcatttcttgtacatctataatcacattattcgatcaatctccatcattataatttggacttaatttgcacatttcgcaacatatacataatttgcaagagaggtttttgcaatgtctggtagtgaaaatgccaaaatgggggactatgttcttcctgtgttaatgatagttagctggtacaccgttgctttgtcgttagttaatcatgacagggatgtgcttcattaatcactacttataaagtaattagtgagtccatttcagtcgctatcaatcaagatctgagcttttggtccgcatttatacgttgagatttggttctcgccctaaagttggatgtagagtatcttgttgggagaaaatggcacatcgagattgacataaacatatcatccttttttgtcaaaagatgatgtttatacgacaagccttcagtatggaagcattgcaatgttcaacagtagtacaaactaacaaacacaaaaacagccaacgcactacgtggatctcttcctatcactattcttccctcaatttgttaatctctctgcacccaaaatcgtgtattatcactctgatcagccaacaattcaggcagattaattttctctttaaaaaaaattaggcagattaacagactgttccatgaacagcagtttgcagggatagttttaatgctcttttaaattatttttttctactgcaaacacaaatggggtggtggcgcagttggctagcgcgtaggtctcatagctaatgttgtgagtgatcctgaggtcgagagttcgagcctctctcaccccaaatttttttccttttttcactgcaaacatgaaaccttagctaaacccacatgagttcatggaaaattaaatatgaattattatttttttgtaatgctgcttttatatttgttcagagcaaacatgaaacctgaacccacatgtgttcaatgaaaattaaatactccctttgcttttaataaatgatattgttgactattagaaatatgatgaatggaatgacaaaaaccgagtgattgcgtgtatcagctgttcttcctgttcatatgatcatatcgccggcgccaggggcaatggttcaactgctgcattcctgttcaatatcatcagggaggcaagggcacagcacagtgttgccttttttttttttttttttttttttttttttgctctctgcgctgtgcagcctacttcttccagcaatttctgcacagatttctgtttggagaaggtggagttcccttttcagcttcactgtttagtgatctgtaatcttttcagtcgggtaaataaagacattgatcattcgataggaacagaaaatggagtgtttgcttggtaatgtagatgtggacctaaattaattggttttaggcaaaatttgctacaggacaccgaaagattgcggtctttgctgtgagacacctgaagatcgtgtatttgctggtggacactgcaaaaaagtggtaattagctgctggatactcctcccattattttattatttccggtaaaaatggagagagagagttgtgtaagtactaaaatgcccttggacactgttcttcctctctctctccttttcttttcccaattcttcctcgcgacggcggccggcccgagccaggatggctcggccacggtggggcggcggcggcggcgcatcaccggggttcaccaccgacggcgatgacgcacggcggcggcccggcgcacggatgaggtcggcaaagcttggttgtcgacgatggctcgcggaatgtctcggcggcggcgcttcaccttggatgaacggcgatggctcaatttcttcaaaggattaccatgcatgcatgtctttcgtgttagagaggtccatgtgaggctaccatggcaaggaatcggattgggactcaccggagagggagaaatcgaagatggacctcggcgaccggagttggagaaagatgatgccgatctctaagatcgctgcgcgactggatagggtacttgggggtaaatggagaggaggtcgaggtgaagctgatggcgtggtggctcggcctacaacggtccactgcacccggaacggtgacgacgtcgaggcggcgacgcgcagagcgcgctccaaggccggcgatgacacgatggcgttcccgtcgatccgctgcacaagagaggatggaatcaaaatgaaaaatcttcggcatgttaaggtaagtatggaacggtggtgaggcagagatggagatagctctacggtgacagtgggcattgtcttcttcatggccggcgagggatttgaggacaacgaagagattgagggcttcctctctcagtttggtcgacactagagccggggtttaccgccgacggcgacgacgcatgacggctcggccatggtggagctcggcggcggcgcaatgagaaagagacgaacagagaaagagaggaagaagaagaatagagaaagagagattgacaagtgggcccatgggcaaacttgtctttaaccaaagtttctctctccattttgatctgaaataataaaataatgggaggagtgtccagcagctaattaccacttttttgcagtgtccaccagcaaatacacgatcttcgggtgtctcacagcaaaggccgtaatctttcggtatcctgtagcaaattttgccttggttttaagccatgccattatgcagatgtaatgtagatgtgcagcctacatcttcgcagcaatttatgcacagattcctgtttggagaaggtggagatcctttttcagcttcactattgagggatctgtaatctttttagtcaggttaaacaacactcaatcaatagaaacaggaaatggagtctttgcttgataatgtagatgtggacataaattaagttattttaagccatggcattcttgtatcacgaaaacagcatagtaagttcttttgtctgttaacatcagttatctttttggtagtactgacatatgctgccagcatcagcattacttttgtctgttaacatcagtaaacagttattatttgattgataatgtatggtgctaactgtatatacaactagtaagttcttccttgacacatgaaaggacatccaattagcattttcttcagataccgatcaagttattcaggaaagatcattcttagcacaatctatcaacaaatctacaagttattctgttgtcaggactgagcatcacaagatgcattgtttgagatcatggaaaaccttgtcgaagttctgatgctgtcacaagtgttcaaatgatatgccatcggtatatacttccgtttgttgaagccaccatagaagcttggttgcatgtgaattagcaggagttgttgttggatcatcctgggagccttttgggtgaagaattcttgggccagcatgagatggtacagggttaacaagtaagagctacaccatttagtaactgtgtaactggaactggactgagctgttgacatgctgtgatgacacacaactgggagaaaggggaacgaagaaatgagcgctgttcttgacctgcatatggacagagagatattcaggcacctggcagcctctcccagcagcagctagatgttcagattaattggttgacatgctaatacacattaatgagggatgtggaaggactacaataatcttctactgttccaaaaggttgtcttgccttttttcttgtagtgctactatgcagttggaccttcttgttgtttttccattgtttgctggttgcaagcgattctcacatgtgctgcttcatgcaacatttctgtgattatataatgtaaagttgtgttttttgcaacttcatatatatctcagcagatactgcacctagattttcagggctcaggatcattccaatggtgacttagtttcagacttactagtatggtttcttacatggagcttgtaacctgaattcggaacatcttcgttcttcaggttatcgaatattcagatgttaacatggagatcttccagtccatacagaagcatcttcaggttagcatggagtttgtgatgaaatctgtcaaaccaggagggcctttggctcttgttatcagaaattcagaatggacagtgacaaagagcatcttgaatttgctgaaatgcttctgtcaggtaagctttctccctttctgaacatttgactaataacacgcaacagattggatggttaataatttgaagttttaaactcaagttcatggattcagtatcatctgaaaatgataacatgctgatgttgttggattattttgaagacttcagcagtaatttcttcgaaaaagtaaaaaattatagcatgcaccatgcatcattttaggccaaggcccaaggaatttgacacccagctttatatagaatgcaaaatggaatagagtgtgaactccagcttacaatcactcaccatgtcaccagctcttactcctttctgtttaaggactatgaagtctaaaactctgaagacaacaactgttacagaaaaaaggctaaatgaataagtcgaagacctcaattaaattgagaccaaattaagtttcacctttgacatacactaatcctaccaccctcagtgagtttcttaattagtatcctaaattaaggagcatgcattattcaacctccattattcatgcatcgaagaatatatgcacatttttcttcttcttcctcctgaatttcttgcaggtccaagtacagataccgcgtttctacggatcgaagcaagcattgaaattacagacaaatatacaaaccgtcggatttaattaatgggtagttatcgaatatcaagattcaatcacaatgtgtcacatccagggttcactctattgggacagccctttgtatcgggggtcaccgaaatcctaaaatttcggaaatttcggctcgaaatttccgaaattttaagcaaaatttagttgaatttgaacaaatattacccaaattcataaaaaattgaaaaattgaaaaattacaaccgaaataatatcgtatcggagatgaacgaaatgaccgaaagttcagaaatttcggtccgaaatttccaaccctggtcacatcaatctataaaatgcatcctttttcctttaaattgtacaatattatagagtatgtgtgccgaataattgggcggctagtaggaaggaagaagtacatctattttttcagaaagccccctcaataagttcaaattgtacaaccacaccccatctcctctctctccggcgacattgcggcgcctccggccggccgggttctccggcagccaccgccttcatcggcgggatggaacttccgacgttcggcatgctcggacgcgtccctgtgttctcttctgcgcaggcggcggcctatcgatctctgtctgccatggacggattgaggcggcggccggcggcggtgtgcagctctcgccggagtgcggcgcggcgccggccgtcaacctgactcaacggcggcatgcatgcatgcaggcaagatattcgaactgattggcacattattttgctctaactgcagcaagttcagaactgagcaaaggtttcagtattgaaaattattttcgggaatacgcaaggagcgtattttttccattaaaagaaataaaagttatttacaaggcagtattgaaaattatactactataattaatctatcatattagttcacatgcatgatcttgatttcatcacaagataaacaatgtaggagtacgtatatatacatcagaaacgcagcgagtaaatgcaaatgcatgcaatgcacacagtaatatataattaatctacaaaggctagctatctgacttcagagaaattccaaaaattagactagctcgggcatgcaatgatgtaaatgctgtatatatatatgcactgtcatgttcatatccactgattgtttttttttaactcaaaattcgtgcatgcactagctagatccatgtgaatgattacttaacaagaaaagaaaacaagcattctaaggatatataaaacatgcaatgcaacaagaaagaagagagagatgtagagagagaaagagagaagggaagagggccatgcttggcacctcgcacgccgtacgcagcggccaacaacgagatcgagttcattgggttggcagccatgcgagcggcatacagggagccaggcatatcccctaccttttcatcaccttcacaatcacccaaagtaccaaacacacacacacatatatctcccctccaatgccgccatattgccacaccaaactaactacatctaaattaacaccatgaacactacctatatctatatgtctctcttaaaactatgtcactctttcttttctccctttcaaagtggatatgcatggctagctagaagagaagatggatggatggatggatggatatggatatggatacatggaggatagagcatggtgtgtttgttgtgctaatgctgtgaaatggtgcatgtttgcatgatgagaagggaggcctatccctacttatatagtgcagccactagcccacacctcctctcctcttcatagaatcatactagtcagtgtggctacacatccctataactaaatatatactccaagcaataaaccatgagtaattaattaacctaattatgtaagcccacatccaatgtacacttgtgtcaatgcactaattaatctgcatgcatgcatgcatgatgagctttcaagtttcacctaaaccctagctaagctatagggcgtctccatgcacatgcatggtggtgtgtaagtagcacagacaaacacatgcacacacacatcattgcaagatggaataaagtggagaggggcactatgcacccacagaaagagccacagctggcactgtacatgtcaaaagagtctcttctctctcgcttctcttatgtattgtatactccactttgtatatatatatatatatatatatatatatatatatatatatatatatatatatatatatatatatatatacatgtacatacattatacacagtatgtgtcctacacagcatacatcccatcaaattgacatgcaagttaaacctaacatagtgcaatgcattggccattggaacatatttgagggatccttttgaacggggtactaaaaacacaagaacatgaaaaattgcaggaatcagataccatgttctacacgatcctatagggttacacacgaagatttaattggtgcgttacgtttggatggttcacagaaataaatattggaatttttttcgaaaaagaaaatattggaattttaaagtgaactgtttgctagagaaaaactagagggagaaaggaagagagtgcattggacttctcaaatgaaaataaaacatgaggtatgagctctcgttatattttcctatagaaagggggcatacgaaggcaaccaataagaattttggcatatccctattctttgatccaacgtacggtcctcataggaaaattttttctaaggattcaatcctccacaaatcctttgaaaatccttcaatgcaaaggagccctgaactttttgtgtacatgtttgcatagttgcattgcatcatgcatggtactctctctctctctctctctctctctctcaatctctctgtgtgtgcctgttttgcaaagagctggctttctggactgggctttgtctctgggtgtttggaagcaagtaggattcccctgtgcaggacagatgtggaccagacctgtgtgagtcaagaatcaagatagctagccattgttttgatttgtttcaacctctttctccatggccatgcatgtgctactgctagctagctagcttcttgcacatatgctctcctcttctttttcacaatcaattattactgctgctaccctatttactctttattcgttgcttgacatggcagagggtcaagctctagcttgagaagaatcttgtcgctttatgtcttggacttggaacatttcaacccatgcattaaccggctcgtgtcgatctatcgtcactcgaaatattctcagccagtgtagtaaccgctgtagtattgtctcgagcttcctgttcctgtggccgagaagagaatgcataaaattaatgataacaatttattttagcaattctggaatgcacattcatcaaagttagttttgctatgcacaaataaattagttttgctatgagaagaacgtctgcatatttattcataaaaataagtaatttgctatgcagaagtttgtatgatttcttctgaattaaatgtcaattattcgatggaactcattgcctttcctcacatagtcatcttcgttgacgactttcgatggtggttgcagtgtatcttaatttgccaagttgttcggattatgtcaccggggtgggtgggtgtattaaggatagggatgggaagaggaaggatccatggtttagacggaggctggggaggggtgaaggtaggttgacgtatgtggtaggacaagggaagattggttaggagggaggtagattttcaaggcagtgaaaataagtggaggggtgatctgaagggcaatggagattggtagaaaggggtagagtggtagacttgaaggcggtgacaagaaatgaagggtgaggggcaatggatattggtag

SEQ ID NO: 2627 - DNA, 10737 bp, Oryza sativa
ttttgtttgtgctggaaaagattagttcttgttgctaattgttgcagtcaaatttagctccaggtgattctcagttgtttaggtgttacctgtagtaggtctggttctaagcagctcaaagcagcaggggcagaaagtgtgtgatcaggtcatgcttcccatgcgcacaaggtgcttgttgcattgcctccccgggtgacttgcacttgcacgcatgtcacttcaatcctctccggtgtgaaatattttgtcatgtgatttcgacaaccaaaaagtcccttttgttgagacatatcgtctacaaaccaacggtcatccgattgttcttgttccggactacaaccatcaggcaggtcactggttttggtttggtgtttccctttcaagagggcccggtgtaaatctcttcctgattagttaattagcaacttaacatgtccctatcattggttagttaattatcaactctgtccttttcctgcccctcttccccctctttctgggagagtttttcttttgtaaggtttccacttcaggtgtatgttatggtctttgtatttgtgatacaatcgttgctgctgttttgggaagaaaagtcttccaaaaacagaacaaagaaatgataagaaaacgtgcttcctttgatttcatcagacaggagactgcaggaggctaaagcagcatttgacacaagcatagataatgggatgaccttatttgatacagcagaagtttatggtacagcggtaagaaactagaaaaacttcatgattcctcgctcatattttccttgcgtcaaaattctgaaggttcatttaaccttagttgttctgtccttcagctgatgggagcagtaaattctgaaagtttactcggagggtatgccacgttttgctgttcagcactccattttttttattattttttatttttgcgaaagtcacatgtgcagcaatagtcacctgttgttgtctctcttgccgccagtttcatcaaggaaaggcaggagaaagaacagattgatgttgccgtcgcaacaaagtttgctgcacttccatggagatttggccgaggaagtgttctttccgcactgaagaaatcgcttgaccgtcttgggttatcttcagttgagctctaccaacttcattggtcggcttgtctgctctttctctgatacatactttttctgtaaattttgagcattttgatctcagccgcttttgtttctctgttttcaggccagggctatggggaaatgaaggtacacagtccaatgaaaattacccatataaccatttttatgaattattagatagttccttctagcatgacaaaaacttcaacattctgacatcgttgagcattattcagggtatcttgatggacttgcagatgcctatgagcaaggccttgtaaaggctgttggagtctcaaactacaatggtctgtattctgtctgtggcctgcaaattaaatgttcttgtacattcctcgaattgtttcttcctcagtaaactttcattgaaataatagtttctatgatgacttcattcaagagaaacgccttcgggatgcatatgcgcggatgaagaaaagaggagttccacttgctgcaaaccaagtgaactacagcctaatatacaggactcctgagttgaatggtgtgaaggcagcttgtgatgagcttggcatcaccctgattgcttattccccaatagcccaaggtgagaaccatttctccttattttctgtcctaattgcttcatcgtatttagtgctatttacaatacaatcgcactcgttcttgtacatttttttagccgggacggccaaaggattaggccgctaaaatttgaattttaaaacttaattttggagttgattttacggtattttcagcgtagtttctttttcagcattggttttttgatcgctaataaaccatttggcatataattagctcttggccaaccgatggggcccttgttcttgtaatgactcatttccgttgttcaggtgttctgtcaggaaaatacactccagaaaaacctcctaccggtcctcgagcaaacacatatacccctgagttcctcaccaaggttatattagtacatattactgaacccttaagctagctagttacatacagcttcagcttggatgcgccatttagtctctgcaactgaacatttttcttatctaaaacctataaacatgtttcatgtgcacagcttcaaccactcatgaacaggatcaaggagattggagaaagctatgggaagaacccaacccaggtgcttcacctcatataatgctcagcaaatccatgcaagaaaaggaattaatatctccaagtaggatgagcagcaacttgcaaggaacagaagtgcagttccactgaaaacagctggtgttttcttttttttgtttcaggtttcactgaactggctgacatgccaaggcaatgtggtgccaatccccggagccaagaacgccggccaggcgcaggagttcgccggcgcgctcggctggagcctcaccggcgacgaggtcgaagagttgcggtctctggcacgcgagatcaagggcatcaagatgcccatcgaggagtcatagacatgtaaaaactgaagaagtttttcatgtatatgataggagatgtgtattgattgtaccatgcaatagtaaacattttacggcgataaaatgtgtagaaggtgtagaaaatgagtcagaaatttctgcctgcatgaatagaaaaggtttatatgactttgagccagccctgcccagtgatgattcaaatgcctgtacaatgtaactttgacgcaaacacgcgtgaaccattacacacttgtatttaaaaaaagaaatagatctcatacgtacgttttatattataagtcgctttaaatttttttctagtcaaacctttttagatttgaccatttcataaaaaaatagtaacatctataaaagtttcccataaaaaaaacatctatacaagttcagagactctttatataaattctataagtaacatacgcctgtagtgactttgtcaatctctagtatagatttgtcggctcagtcctcaaagatgcttataggggtatggtttgtgtgtgttcataggggtgggtgtgcgtgcgttgtgagtgtctgcgttgtactgtgtaatttaaaaaaaaaatgatgatatgaatactataagtttgattgaatcttatcataagcaccagatttaaacaataagattgcaaaatttaattatttaacatcgaaggaggccagaagttcttttttttttctatagaatgattttaccgccaaaaaaaaataaattctctctctctctctctctctttttgagttatttggaagcgatatacccagagcggccagcggcgcgtccacgtgtttacccgccaaacacacttgccagtctactctcgccggcgtcttcctctcctcgcctcgtctcgttcgtggccaaacgaagctcgcgcctcccggccactcgcagtcgaagcccagcaaccgccgccgcgccgaggccgagcaacagtgaggaggtagcttgcctgcaatgatggccgggaccctgcaggtcgccggtggctgcctggcgcccctcctccccagccgacgagcggcggcggcggtacgcccgccacgcgcgtccggggcgtcggcgtcggcggcggcggcggcggcggcggtggaggaggacggcaaggtgaggctgggtgggtcggacgtggcggtgaccaagctcggcatcggcgcctggtcctggggcgacaccacctactggaacgagttccagtgggacggtacgttcgcccaatgcgcatactcatcgatttgcttattaactcttgattatttttgtgttattccacctgcaaacctgcaatcgatcgggattgattgaccagttcttgatttaggatctcagtaggagagtctggagtccggactccacctaatatgttgattttgggggaattgttgggattgattccactcattgtgttgtagagtttcatgtagctgatgagctagctttcaggttcaaaggggtcatagttttaacctgtactaagggctaagtagtaattaaggctgtctaactgaggtttgtaaacttactaaccttgaactaacagtgtagtactatttgcaattgatttctgtcccaaggtaactgtaagtggtggtatcattaagacatgaacatcctggggcctagtctaagtaaacattgcattgcaattatgacactagactaaacgtcaaatatttatggtcagggggagtatgagttaaggggtcaggtctctaggtgaatctttgatcatgaacatgctcatggatttgttctctctgcttgtcctaatgttgttgcaactcgcaacgttcgaactaattacagattgtggaatttaagcaactcgcattggaatgttttgagtctgatttttgtatagtttggaaggcaccagccatctaaggatgtaggatctgaaagtgtgatatttaacaaagttgtctttcttttttgcattccttttttcctgctacttgttatttgtttgttgggctgaaatcagggtcatacatcccatgtgcttgatgtgcatgttgcattatctgcaagaaaccacgtgccacatgtaatatgctttgcgaaattttaacgaccaaacacatgaaatgtcataaatctctgcaattgttagtgaagtagacaatttgcttaatgtcaatgacaatccaatgacaaagataccagtgacagtcccttaatatgatgaagcactctgaaatttgccagataggaaattgaaggctgctaaaggagcatttgatgcgagtgtcgattgcggaataaccttctttgatactgcagaagtatatggtgcaggggtaagaaccaaccctgttcatagtttctgatcattctctggttcatttgaaggaaagatctaacactgcattttggttatggatgttctgaagatatcaggagccataaattcagaaagtttactaggaaggtatacaatgtacaactgtttgttgttccaaatatatgacgattttagcacaaaatttgttctaagttctcatttaccatcagattcatcaaggaaaggcaacagaaagaacaggtcgaagtagccattgcgacaaagtttgcagcccttccgtggaggcttggccgaggaagtgttatttctgcactgaaggactcgttatcccgccttggcgtctcctcagttgagctctaccaacttcattggttgtctcattgtcttttcactccaatattatgtgtttattattgttgctagtttatttaactggtgtcatcatctccttttcaggccagggatatggggaaatgaaggtattctttaatatacccatatttaaatactccctccactttttaatatatgctgttgatttttgcatatatgtctgaccagtgcaaatatgcaaaaataagttatgcttaaagtatgtttaatgataaaacaaatgacaacaaactaaatggtaattatatgaatttttgaataagatggtttgtcaaccatatgtttaaaattcaactgcatcatatattaaaatatggaggaaatacataatagaaatatttgaactgtactcaggaagcagtgggagcaattacattgttcttacatgattcaggttaccttgatggtcttggagatgcttatgagcaaggtcttgtaaaagctgttggagtctcaaactacagcggttgtaatctgacttcaagagttacatatgatgcagtttgttgtgctagttacctcttttcagtgaaactaatttcaagaacgctctttctataatttgatacagaaaagcgtctacgggatgcttacgagcgcctcaagaagaggggagttccacttgcttcaaaccaagtaaactacagtttgatatacaggaaccctgaagaaaatggggtaaaagcggcttgtgatgagcttggtattactttgatcgcatattccccgatcgctcaaggtagaattctgattctctgattctgttcttcacattaccattcaactatatcaagatcttttttttgcaagaaaaatgttcaatctagtagtttaaatgaaaatgtcctatcttagaactgaaatgtttacttcatcgatcatcattccatttctcaaatgagtgattatcgaaaataaaatcctagcttaatatgtctcctctgttcaggtgttctgacaggaaaatacactccaaataatcccccaactgggccccgtggacgaatatacactcctgagttcctgaccaaggttgtattttttactaatattattatgagcttgttgcatccttgttcacgaaccctctcctattgcactgctgcaactctgctcattgaagatgtttcttattccaaacagctccaaccacttattaacaggattaaagagattggaggaagttatgagaagaccccaactcaggtgttcttgctgctcaatatttccttttctgaagtctacccattgccaaaaacttagaatgcaaattattcagacataggagtaaattgtaagagggaaaaaatgataatttcatctttcaacaagctcaagggctacctggagatcaacaagatcccaaatgctgaagctaaaacaaccactaacactttgaattctcggaaatttgcagtgcaccaatttcgatgacatagtagtaagcaaagttgctccattctttttttctcctgcattttcttcaggtggttctgaactggctgatctgccaaggcaacgttgtgccgatccccggagcgaagaacgcagagcaggccagggagttcgctggtgcgctcgggtggagcctgacggatcaggaggtggaagaactgcgttccatggcacgagagatcaagccggtcatcggattcccagtagagaagttgtaatttctagtgagtttttcttctactttgggtctccgagaacatcatttacataaatacacaatgatctagacatacatagataggaaccatgtgtagtctttggaactgaaaattaagatgtcttagaaaataaccaaaatttacagtctgagtagcgtacatgcatgtatgctcatcgaccatattacaactaagattggtaactggattatcttcaagaaaccaatgttttattttctctggaaaaagagaaaacctgtttgcaatgtaatgaatatggccagtggcgaagccaggatttgagtatgggggggggggggcaacaaacaagtgattacacttcacacgaggtaaaatatatgttatttcactttacactgggtttagtacatatttttactttgcatcagggtatatcaaaataatttgtgttttacactagattgcatcatataactgcaggaaaatcttataaaccacgtgtgaaacttgtgatatttttttaccaagtttcacaaagttttatccatattttgtaaaacttgatgaaatttctataggtttgattatgtttatcctggtgccaagtgaaacttatttgaaagcagctcggtaaaaagtgaaattgggtgtgttttacccgatgcaaagtgtaatttactccaaaattaacaacaaagtgcaaggattaatatttcagcgatttgaaactaaaatgacgtgagaaagtttcctaatcagcatgtgcaagcgcgagctggaaatacaatatatcaaacgtatacacagtagtagctatagacggcgacgtaaatgatccctgactaattagagcaagattaatagtatagccaattgctagctccaaatcatctatagttaacttaatagttaattcatacaatatttataaacatatactatacaattaatatctggtcccatctgtcatacacacatgcatcttgtagtccgtgctgtagctggctataaatctgtaacccgctgcttttctctctcttttttttatcttctcgaactgtgtttataactggcttatagtatactattgtacctgctcttaagcttaaagctttgaggggatcgagcaattagcaagtgtctatatgggtcattactgcgttttcatgaagttaataaaattattttaattgcggcctcccacaattcttttttcaaacgtgtaggagacccgtgcatcattatattcattcattttgatccgcaggagtgttcaaacacgcataaacagcaccttgcaaaatactatactaacatagtacaacataacatagatttgatttatcataatactatgaattggacaaacagctattcagatttgtaatattaaaatatatcacatccgtattaggtttcagggacggatgagagagtgactgtcccagaagaatacatgaaagaaaaaaaaaggggagagaaatagagaagaaaaacagagaaaaaggaaacaagaaaaaggaaagggaagtaaaagagagaaaaggaaagaggagaaaaaactgaaagatacacaagcgtttattgtagtttattttacaacgctggttataaaatcgctaataacacatatataaaaattttactaaagtatttttttagttgttaataagttgtattccctccgatccaaaatataagcatttttagcatagtaacaagtcaaacatttttaactttgactattaatagcaaaaacattaaaaagaacatgtaaaattgatgttactaaatttatcattaaacaaaccatcgtaatatataactctttttatttaaaatattttacttttatagatattattggttaaagtaccatcattcagagatcgtgtcaggatcttaaaatatacttatattttaaaatggaatgagtacatataaacacataagccaaacaataggctacaacagagcaggcatgctcgaagtgccagctgtggtgaatgatgccattgccgtggaggaacaaagctccagctccggggaccgaccggagaggggtatcgacggcacggtcagaggatccttatccagtacttacatggtgctcgtttgtacccaagataatgttagagcacggaaaagaacaaaaccattaacacatgattaattaaattttaattattataaatttaaagaagtaagtttacctacttacttcgttccaatataaactgtaacttagtatatatcatatttacattagattgcacttatattagaactagaaaagtaatatttttaagcaatttatatatataaagtttttacgaaacacaccgttaagcagtttaaaaaaataccaataaaaattgaaataaaatatatatcttaatttttttagggtgcatatgcgtgcgagttgcgacggtgtacatgtgagcttggggtgtgtttagtttaaaaataagttaaagtttgaagaaagttaggagtttgaaaaaaaaaagttaaaaatttatgtgtgtagaaaagtttttattgtaatataatgtgatgaaaagttgagaacaccgggaaactgaacacggccttggtcactcgctccctccacagaaaaagtactacgcctacggcatggcctgatcatggtcaggtcagcggccaccgccggctttacgcagagcacacaggcagagctttgacctccccacgattccccaaaaccgaatattttttttcttcttcttacggttccggccggagtacgtgccactctacactacttgtactagagaagtatatacggtacacggtctaggacctccgagatctccgcaagatttttttgccacggataataagggtcccctgccaaaattttacatcctatcatattaaatgtttaaacacatacatagagtattaaatataaaaaaaataactaattatacagattgcgtgtaaattgcgagacaaatctttcctaattgctccatgatttgacaatgtggtgctacagtaaatatttgctaatgatagattaattagacctaataaattcgtctcgcagtttacatgtggaatctataatttgttttgttattagtctacgtttaatactttaaatatgttgacacgctacaactttacacccatagtccatagatttaaacacttcctaaggcaactgacaacgttaatagtattagctttgtttactcttattgcgtctcggtggcattcggtcccaacgtgccagcaaggatttatgctgtcacgttcatcacggtcgtagccgtatgaagctcctcggcacccaagacgggccagcctctagtcgaagccgcgttagggacgtcatgctcccgcgacgtgatgccccccctcccccaccaacctcttccctccgagctctagcggccagggtacaagcacggcgacgaacctaccattgtagctcatcgccactatgggtcggctcaagaagaatcgtcatcgtcattgaagagcctaccgccttggacaagctcaagctgaccagatccgcgtcggagaagaccgtcctcaccttgatccggtccaccaagagctcaccacccctatctaaccttgattcacgcagccgggaagctcaccgacaatgccgcctcgatctactcaagaggatgttagcgtgcgggaggagaggatgacaccagcgtgtgggggaagaggtcggttgtggaagagaatggcaccgacgtgtg

SEQ ID NO: 2628 - DNA, 10687 bp, Oryza sativa
ggagccgcctcgcctcgacgagcgctaccacgaccatggtgaggcagaccgtcgccgcatccggccggttgacctggccgtcgttgcgggccatgtggagccgtcttgtctcgacgagcgccgccacgaacatggcgagacaggccgtcgccatgcgggcgccgatgcgctggagcatcgtgatgcctccgccgcgctcgcctctccaccccctcgcctcctcatccgccgccgccgtctaaagaagaagagagaaagagatagagagagagcgagaaactgacaggtggggctcacataatttctaataaatgaattgctgagtggactgccatgtagaccaaaaccaccgcggattggatcaggggggtaattcgtccggtttacatagttcggggtgaagaatatccggttttatggttcaggggggtaattcaaatgactgcgatagttggggaggggggttaattcgtaccttttccatttaaaaaacacataaaaattattaagcgtgtggctacgtatagtttactctttccatctatactagccactttgtcacgcgttgcacgactttgatgcccactttgacatgtaaaagttctatgatgaatgtccgttgaaaatatatgcggaaattcaatttttatatgaagaacttgataaagaaccgctatggattttatttcgttatattttttcatcttaaattgaattaatgttttaattgtcaagtgtatttttttagataatggaatgaaacatcccggcctttgcttaaaagagctatagccaattgtcaagtgtatgaatatctttcggtttgaaagaagaagattcattttaatagaatccacattttattagtagaaaaagtttatttttatttttcttttaaagttgggtttcatggtataatggataatcatcagtctgtttaagctcgtcacatgaagaaaagaggatggaatttctgctttccagcttctattagaaaagaatttactcagagccacaaacaaattgcttcgtctccatagccggtggaactcttccctctccttttctcccggagcctcttgaagccttcagactacccttgggcccttttgatttggagaaaaaacataggaattttagaggttttcaatcctataggaaaatttcctataaagccctttgaaacaaaggattgaatcatatccaatcctttaaaattcctatggaatggacaatcctatagagattttggaggaaatttagcaagagcttcaacctcttgctaactttcctttgagtctatctctctcatccaattcctgtgtttttcctgtggttcaatcaaacagtcattcctgtatttttcctgtgttttgcaatcatttgttttacacttacattcctatcaaaatcctacgtttttcctattcctacgttttctcaatcctgcgattcaaaggggcccttaaccttttgattctttgttgggctctatatccaacggtaaattttgtttcaaagctatatttgatggccattagtcttctgatgacttggtaaatcctccattcgagaaagaataattctttcactagttaagatgtagcctttgacattggtattaagaagggtaaaataaacctaaggaataaaatttaaattttattagttgttatattttaagatgaatatagtagtttctataaattcccttagaaaattactccctccattccaatataatatataagatataaccatccttaacctaaagagtaaaaaataattattatcgcattattgtttgaatcatccaaaaaatattatacatacacccaataaaatcactgatttttactatgaaagagataaaaacataatagtttagggccctttgaatcgaaggaatgaaaaaacagtggaataggaaaacacaggattctgacaggaatacaattgtaaaacagaggaaaaacacaggaatggccgttatttgattggaccacaggaaaaacgcaggaatcagatgagagagatagactcagaggaaatgttccaagaggttagacctcttgctaactttcctccaaaatgtgcataggattacccattccataggaattttaaatgattggatatgattcaatcctttgtttcaaaagccttcataggattttttccttaggattgaaatcctctaaaatttctacattttttctaaaaatcaaaggggcccttagtggagaaaaattgctagttaattacatacatgcatgtacgccagtacatgctactccctctccccaaaaaaattcaaaccctagcatcccaagaaagttttaagattagcaacaaaagtctagaatacccttaattaatgtgaatgttgtattggttgatgcataggtgaggggtattgaagtaataaaaattttcgatttgcatattggtgatagataataaggaatgagttgatttatttttggataaatttcaaacctaggagttggtttatttcgaatagaggagaactgctagggagtccttgctactgttcgagtgactgcatgcacttcccttggcaaacaatcaaataaaaatgctgctgctactactactccactactccatcctcgcgcgttttctgttgagcactgagagcaggctactactactagcttcatgtactcatcacaagtcacaagtcacaagtcacaataggagtatagtacacatcaaatcacatcctgtagagattctcccttccctcttgtctccgtttctctcacacacgcatactcctagtatttgtctctccatcagaataggagtacaattaaacatttgcagtagtaggccagcttggtactaataaccggttacatttgcagtataggccgtgtttatactccctcacgcacatttcgccactttgaaattgcggatgataaacaatgtactccctccgtccgagtgtataagaagttttagagttggacaatgttattaaggccctgtttagtttcaggggtgaaaagttttgacgtgttacatcggatatatggacatacatttgaaatattaaacatagtctattaacaaaacatattacagattccacctctaaaccgcgagataaatttattaagcctaattaatccgtcattagcaaatatttactgtagcacaacattgtcaaatcatggcgcaattaggcttaaaagatttgtctcgcaatttacacataatctatgcaattagtttttttcgtctatatttaatactccgtacatgtgtccaaacattcgatgtgacatggtgaaaagtttttgtgtgggaactaaacagggcctaagaaagtatatagaaatgaacggtggaggtttgtgattggatgagtagtggaggtactaggtggaaaaattgaatattggagggttgttattggttgagaggagaatgttggtggagaagttgttatattttgggataaatcttaaagtctagaagttgttatattttgggacggagggagtatgttgaggtagaagaaagtcactcaatatgtttttgttggcctaagaagaagtgaaggtaggtggaaaaattaaatggtggagggttgttattagttgagaggagaatgttggtggagaagttgttatattttgagacaaatcctaaagtctagaagttgttatattttaggacggatggagtatattgaggtagaagaaagtcactcaatatgcttttgctggcctaatatttactccctcactcctaaagtataaacacttctaaaatttaaccacaaggagagatgtggaattaaaatgaagggctgttgaaatttgttgagataagaaaatatagataaagaaattattaaaatgaagggatgttgaaatttgttgagataagaaaatatagataaagaaattaaatgagagaatgttatgattagttgagacaatgaaaggggtaagcagcattattttggaaaagaacttcaatgctatatatatatatatatatatatatatatatatatatatatatatatatatatatatatatatatataaaagacgaacagggttccctgttaactatagaagtagagaaaagtagaaagagatatgtagctaaattgtggtgattcaaattttaaaggtggggattaatctataccattttaccattttttatttaacctttttaatttttaattttaaaaacaatctattccaaaacttatttttaaaatccgaaccttttatagacactttagctgactgttggagtggaataatactgtcacggtgatgtgaataacgtgatggtgttatttggttacatcggtttagaacgggttattttttaaataaaaaaggttcccgtcttacacaaaatgcaaatcgcattatgaaaaagaaaaacaatactgcaaaatcaaattatgtttttctttctggaaaaagaagcctgagtttatacgtcaaatgcaataatacgccgctttgcgtctgttcggatggttggctgctgcagccaacaccaacaatgttatacacacaccgagaaatcaacgaattacgacggctgcagttgaagatattgaatatatctactttgcatacgaatctaaataagtgtacgtttagatttatatagaaattaactttattaatatgaatgtattagtttcgtgtaatactatctacgaaaaccgctagtttgctggtaaagacatgaatggttgttttggattaaaaccaaaatgtgctctactaaaattttggtaacttagccaccaatggattggtagagtatttcaccctaaggaacatatagcgagtcatatacagtaattggtgttaactcgctggggtcatatacagtaacaagtcatgtacaaccgacccgaggcccggcccggcccgtgagaccgatacgatttggagcttgcacttggcataaagaagaggagataaacggagcaacacactttccccctcgaagagagcgaccccaaaacaaaccaaaccaaaccctagacgcctcgccttcttcgattcgtccttccctcgatccgctgtgctatggcgctgcgccacctgcccgggaagctgaggctcaccgccgccgccgcatggttcctggtcgccctcgacttctctcccgctcctcccaggtccgtcgtctgattccccacctcttcctcatccgtggtagctacatgtggtgcttaatttcctgcgcatccgagacgacgaggtcatgcatctccgcgcgtaccatgttttcacgtggaatcgtagatcgatcgcaatcgtatcctataatcatcaatagactgcacgcacgattctctttaaataattgcaatccccagctgccggtgctttatttcccctcgcacctcactttttttactgaaatcgtcgctgtttttgtatatttgcgattagccttagcaaatgtatattgtgcctgtcgatgctattctggcaaacccaattaggatgctgtttggaactattttgtaccttattaattttaatataagtaaagaaatacaagtgtgaaacatggaatctgagccaccgcttcttcccttgccatactgctgcttgatctggctcagggtgtggtttctgctgctggatctatcagctttagtaaggggagcggcaggcagcatgacaatggggaacagaggattctttacggttgagggaagtagatgatcatgagcgaggacggaggttgattgaggctaatccggtttagggtatggctgtatgggtaaaccgaagtagcaaaacgagacaattcatggaaacatggaccattcattcatcagcatttcattgatgaagcttcatattatttcgtacattagggcgtgtggatgtgagaaggcaatctgaatgttggttggggggaaagtactgtttatgagctagaccttggtgcatattttggaggtgttggtgttgacgaagagtgataagcctgctctggattcatgcctcgataatttaggattgctcttgaccaagtttttggatttacaggggtataagcggctggaaagcttggtcaaacaagtactggcctcactcctaccttgggagaccttagtgttttgccatatccatgatttattgatttggtttaggtctcatggtttgaaaatatggaagagggcacttatatatgttagagatctttttttttttggccattcttagttacatataactgactagcttcttctatgttagtatagttgcatttatgctacatgaagggattgcatgcaccatataatcttgtaggagtaattctttcttaaaatgaataacatgcacagctaattcatctttttattcaagatggtagtactatgtgctttcaaagattttctgttaggctgtttgcggtgtatggtttaagtaattagtttacatgtcaagttggtttatttggtaatcttgttgaattgcagggcgaaaaaaatggccgtgcaagtagagtggtcctgaatgaaaaaagtgaacgtgaaaaagaaatcttgtaagtgctctatgtaataataacctgatgtttgatttaagtataaatggagtgatcctaattcattcatttaccatggttgtttctggaaggcaagacatggaaagaactatcaagaggctacctatgattacagcgttgtctatggttggtggtgctggccttgcgtttggcttcttgggatgtgtgtttgttattgcctcggccagtgaagactgaggagacagtttaacaattggtcagttcgctgtttgtatgaggcatcgtgcatttggtgttagtccaagagtactaatttttatgtgggtaatgtctgttatgtaagatcgacgcgaagttcttaaatagtagtagtaccacccagcatcgatcccagagggatgtgatcgtagggaaggaaaaagaactactgtctaaaagactgtattatgctgcggtgtgtttaaactaatatattattattatgttgttgtgtgttgtggatcaagttcccatcttattttttcgcttatgcttattcttattagttaaaatttgagctttcaaacttaaatttggagttgattttgaggttttttaatcgaagtttattttttaaagcttttttccttcttttaaattgctaaaaacatgcatgaattattattattattattttctacaaatatgtcgtttggctattctactaataagtaggggccgttcgcagctcatgttattatatatatacatgctatatattgatctgacaccttataccatacctctttctttgatgatgacataaattgaattcatcttccaaaaattactctcccctgtttgtccgcctaagcctaagctgtaggatcattcaaggtgacagcagagccagcatcatggaatatggaggcgcggcttcgctttgtctctttaaccgctcggacgccgagactagactagcaacagctgtgtgctgtgcctgttaccgcggcggccagccaaggagtagcatggcgagagagacagagacctctcggataagatgctcccgaatacttacgtggcactggcatccgctaattcgatccggttcacgtcttctaccctagtggtactattattataaacactaacgtgtgggataaaataatagaatatatcttctccgtctcaaaaaggaccaattctacctacgaatttggacacatgtaggagttcgttttttctgggacgaagtagtatatattagtgattataataataatgtcattatggcagatgattctcacccacttcgctcgactagagagagtgctgttaatttccatcctcagatccatcgtatgcagaccttgagggttgctttcgccatcgagttcgatcgagcacataatttgctctctgtggactgcatgttgtggcctccatatgcatcttgtgtgggcagcgtcgtctgccatggatcgccgcttgtcttgtgttgggcgacgctcaagatcgaatatcagacagagcaagagcgccatggcgccagagtatggagttgccaatttgtcatcgttcggagctgtggtcactacgtattaccagttgcaaaagttacagtacgtccacccaccaccaaactaattaactgcaaaaagccttgtagtggtattctctggtgtcaccaattaagcagctacggccttgtttagttcgtgtgctaaaaatttttggaagttcgaagaacaatttttcttcaaactttcaaaaattccgtcacatcaattgttaggacacatgcatgagcattaaatgtggacgaaaaaaacaattgcacagtttgcatgtgaattacaagacgaatcttttgagcctaattacgccatgatttgacaatgtggtgctacagtaaatatttgctaatgacgaattaattaggcttaatagattcgtctcgcaatttacaattggattatataatttgttttgttattagattttaatactttaaatgtgcgtccatatacatctaaaagtttctgagcatgaactaaacacggcctacatcgtctgtacattgaatacccacactgccatacatgatcctccctaggcgattaggcccgtccctgccatccatgtcctcttgctgcgtactccctcagtcaaaaaaaaacacaacctttagatgtgatattttctagtacaacgaatctggacatactgctgtccagattcattatattagaaaacataccattcaatactaggttgagttttttttacagagggagtatactactttaggttgtgctctctcttaccctggttcgaaatcggagtggcagattagcgtattattagttaagtattagcttaattttttaaaaaatagattaatatgattttttaagcaattttctataaaatccatttgtataaaactacactatttagcaatttgataaacgtgcgcacgaaaaaggatagagtataattaagttggcgaaacgcaatagaaaccaccctaatcgcatattattctgtgttcatttttactagttcccaacccttctatctcgttttccacgtgcacgcttttcaaactgatggtacgtgatttgcaatgctttaaaaatattatattaatatattttttaagtttttatactaaatatttaattaatcatatattaatttattgctccattttgcgtgtgggggggagtggttcccaacccctccataaatacagttatatttaatctataaagcaacaggtacgttctttgctaggtgcacccaacaaaatatacataaaacatccttatctctttgctcaaccatccgatctgttcatctgaagactgaaaatggaccgtgggtatctctgtcttataataccatgatgaaattaccgatccgctcctccgcgcaatttccgctccttttgacgcccacgactctgccacctaaataaaccattgggataatgttttttattttctaatttgatataatgttacacacactacttaaaaaagggttttccttgtacatatacctctttaaattgcagacggaccaatcatgtctgcgaaaatcatcctccattttcgtgcgcggctccttaaaaggaccgcacaaaaaaatcgattttcgcgtgtgagcctcttaaatggatcgcatgcgaaaatgagtctattttcacgagcgaacctcttaagaggtaggtacgcaagcaaaaatatccctccctcttttccctctcactcactttaaaattttcacctatctcccttttattttcccactcatccctctatctcctctcctatctatctctttcctcctctcctctccgcggctcggtggccggctcggcgtcgacgccgacgaggtggtagccgggagtggcggctcgcggctcggcgggctcgggcatggcgaggtgacgaggcaggaggcggcggccgacgtgctcacgtcgacggccgcatgcagaaggcagcgaggggcgacggcgatcgtcccccgcttggatccggcgacggcggccgtcccccacatagatccacgcggatccggtggtggtggcggcagccggtgggcggtggggaagagccgtggcggtggcggatctgacgaggacagcggcgacggtggcttcgaggttagggttcggaggaggcgtggcgacagcggatttgacgaggacgacggcttcgaggttagggttcggagaaggcgtgatgatgatggatctaactaggatgacggcgacgaggaggaggaggaggttagggttcaggtttttgattttatttttagttttgcatgcggacgacataagcacctgaacgcaaaagtagcgatttttgtagatacctgtgtgcgtgcggttcatccttccgcatgagaaatccctttttcaccgcacgcaaaaatcattttcgtagtagtgacgtagttacttctacgatttcaatatattaagacggtctaattggacaagtaggccaactattcctaagaccattttttcaaagtatacatggaagttgataggtcatattttaagaagaaatttcaaaaatctataactttactatcagtttgctgcaacattagtgac
